United States Patent Application Publication US 2014/0057251 A1 - sequence listing, part 152

SEQ ID NO: 297494 - DNA, 5291 bp, Cannabis indica
tttaaatacatttacggaaatttctatccaagtagttgaagttcttataatcttcttaaaaaaattaagggaaatggcatgataatgataaagacctgctgttttttggcagaagatgtggaagttacaagtacctcgaaaaataaaaaatctggtgtggagggcaggtttgaatcataccaagcatattgagtaggtataggaactcatttgatgtctagtaccaactttcttcattggtgcataacagtgttcaagactttagatacagagtagagttgtatccaggttatgcgacatttggggagcacataatgatttagtttggaataaaaaagttataagggcgaatgacattgttgtatttgcaaaaagatacattgatcgatgaagacatgttcaagactctaaagtagagcaatcatggcatggtgcacaggtgggtggtggggtggagcattgggttttaccttagaacaacggtatcaaggtcaatgtaactgttgttttgtttgacgctaatcatagttttggttttagaataatagcttgagatgtgaatggattcctgattgaagggcgcactactctattacaaggcaagatggaaccagaactagcttaagcaatgagaattcgtaaggcattgagttggatcaaagataaacaacatgtggttcttaaatatgattgtctctgtgttgtgcaagccttgtgaagcttttttttctatgatttctttatttggtcatgctatcaaaaattgtaaaagattgcttgctcttttgagaaatgtttcagttatttttattaaattgttagctaatatggtagctcacaactttgctcgaacctccatattataccttcattgtagttttagtttagaatctgttctaactaatttgctatcaagattggtaacaaaagtttaatgaagatgaattttttattcaaaataaattagatacattgatcaatgaaggcatgctcaagactctaaagtagagcaatcatggcatggtgcacagggaggtgatggggtggagcattgggttttaccatagaacaatagtatcaaggtcattgtagatgctgctttgtttgacgctaataaaagttttggttttggaatgatagcttgagatgtgaatggattcctaattgaagggcgcaccactcttttacaaggcaagatggaaccagaattagcttaagcgatgagaattcatgtggcattgagttggatcaaagataaacaatatgtggttcttaaatttgattgtctttgtattgtgcaagcctttgaagcttttttttctatgattttttatttggtcatgttatcaaaaattgtaaaagattgcttgctctgttgagaaatgttttagttatttttattaaacgatcagctaatatggtagctcacaactttgcttgagcctccatattataccctcattgtagttttagtttggaatctgttctaactgatttgctatcaagattgatagcataagtttaatgaaaatgaatttcccattcaaaaaaaaaaaattatgtatacaaaaaaggctaattatgaattttgcaccccaaacttaaagatatacgaaattatgttccatgaacttttaagatcattaaaaatttcccttgaattattgagattgttggatttaaaaatttttgtccaattttagtgaaggaagtataacatggatgaaagtttaggaccatcattcagcacatatcaaagttcgagggacgtgatttagtagaagttaaaatttaaataatatgatttaatacatgaacaatcatcagattagtataattgaatgaaattgaacaaaaatccttaaatccaacaatctcaatagtttaggaaaattttcaacggccaaaaaaagtttaaagaacatgatttggtacgtttcaaaattcaagagtaaaaaattgtaattagcctacaaaaaaaatacttcaccagacaaacataagtgtgttacgtcaaaatatatatatagtatgtttagatatgagttggtaattacatgaatttttaatatcttgtttgacaaatagttagtaattacaaaaaagaaaataatatttttagtggttgatatttaaaatggaaattttcaagtaattacaaagtgtaattacactcatgagggccatgagaattgaagagtgtaattgtaactcctcaattatctccaattacaccgttataatgtaactacatgtccgacaaacatactaaattatataattacctttaattacacacaatagctttccaatggctttaagaacccacctaaccaatggcttcggaatagatatgttaagctcacaggctaatcttttattaagaagtaacaaatatgttcttatttaagcagatcttggtaaataaaaaaaaagtatctcaatgaattttgtaaaaacttgtaatcatagttttacaacaggttgacttaagaacattccattcccatggcatctgccaagctgtaactagttaaccactaaaacaactgaagttctcaatccacatattacatactttgaacaaatgaagtaaatttaatgaaactacaaaaaagattgtggctaaaactacaaagtttatccaacagaacctgtacttctttacagatttttaagtacttaaaatcatgaatattgggaatgcatgtattgcagcatagcatttgttaaaatgctaaatcagaattttacacaaaaattgaggtgccatacgtacgtaagaggtaagaatatagaatgagacagaagataaggtctatagtttcgacaaatctagctcctatacgttccttagctgggataaagaaaagaaaggaaaaaggccactagtattacatttcttctcttacgggaacccatataatttacttgtgtactcttcggaataggaaaagaaatactgaaggacattcagtcttgaccaaacaggcaaaatctgcaagagacaacaaaaccccactctgaacacaacattcaatcatttaaagataactcaaacgataatgagaatgtcacaatgtaagactaaaagctaacaaggtaaacaaattgcaatgtgaggatagatgcatatgactcttaaagtgaaacttttgctgagtgtggctggctacataaagggacttgaaagttgtaacagacttaagaacggaaaaaggaaaagaaaaaaagaaaaaaaattaattccacctataagtgtacttaaaacaaaattcacggaaggcaaactaagattaggaaaaacaaacattgcttgaaaacaaaaccgcaccctaaaggcagcaatgctaagtgagcttttctatccaaacctacaatcttgaactagtatcagtcagcaatcaagttaaccaaatcacacaacaaatttaacaccggaaaagatatttaacagccctttcagtctgggaaaaggaagcaaagaacaaaaggtaatagcaagtaactagtaatgttttacaatcagtattgccgtgttcatattatctccaaaatcacttattaattgcttaactaaaattctcctattgcaagcagaaatttacaccaatcatttaaaaatgaataagaaacagtaataatatgaccttcattgaagtcagttagcctgtgtctgaaaccgctgcagcatgtcacaatgcggtgtttcacgaataaagccccactgacgacgctgaatctcaagccgacaattctgattaagaataccaaagtattctctctcaacctggtcttcaaaagaagatcgttcccggctgtccagcggataatcctgctcgaattttgtcgacttaacataataattgacacctttttgggtggtgaacttgtactcgtaaggataagatcgagagagtgaatagattggctcagaagatggcaaaaagttcagaacaagtataagcagaactggcagaatctgaatcagtgcacgaacattgaacccaccggaaccattgtgatcaggttgttgttgcctatgccccattccagttccgaaactaaacccacgaaactgggtcgccggagccattccaccaaagaaaaagttcctgaaaatctcctctgcgtcaacatcagcatcatagaagccattgaatccatgagcagcgtgtcttgtggtgcgtctctcgtaaacgggctcatcagacccaacaaggtcgtactttctcctactctcttcactgctaagacattgaaaagctttagatacagacttgaaagcttcttcagcacctggtgctttattcttatcaggatgaactttcaaagagagctttctataagcctttcgtacgtcctcaacactgcaactcttctctacccccaaaatctcatagtaatccttcttcttcttaatctctctcacaatcgctatctgctccagtgtatgggcccccgtagccgatgagggagacgaagatgaaccagtggatggaaccctttgacgaagagagggttgatcggacggtttagaagaagttgaatcagacggaccattagacgatgcatccgcatcagacggagatcgttcgccaccggattccttctcaaccgccgataagagatcatcaacagataaagttggatcgagacgctgagctttcgtaaagaatttcctggcacgattccgatcgccggcttccatggcttctttaccaattcttaagcatttcaaagcgtcttctttgttcccatccatctcccccctaaaaaccgaaaaaccctagcgatgcagggtaaagagagatgaaaaaccactgtaattcaacagtaaaactaaatcaagattttgatccaataaatcgcaaacaaaaataaattactttctaatttaaaaagaaaacgttggatttatcgattgagaattcgatgataatttggacgaatatatgaacttacggctgagatcgatcagatggagatgactagtggaagatttcgaattgattgatcaaattagggtttcatattctgatggtaatttggggatgaagaaagggttgtgcgggtggcttcagagctctatagtttgagtttgaaacagtttttagtttttagttttttatttttattattatattttctgttttttttattttttttttttatgattttatactttttatttatttatttgaaagaattatgattttgacttgattgattattgttattattttttctttttcttttttgaagaaaatgttgagtgaatttcgcaacac

SEQ ID NO: 297495 - DNA, 2589 bp, Cannabis indica
tttttatatcttttattttcttatcaaattgaatttctgccaaagctttaaaatgtttgaaggctgctaaagcatttcatttatgcttaagagagtaaagcaaagtgtgtcaactaaagttatctagaaagtggatgtaaaccttagagtttgtatgagaaaaaattggttcaagtccccatatgtcagaatggataaattctaagacaatggaggctctacaatttgaattcttaaagggcaaagcatgagccttaccaaattgacatgcatcacataataaaactctttcattcataacaaaccttacattagctatttaaaaacttgattcaaaatagaacttgaaggatgaccaaatctcctatgccagagatctgacatagggacaaacacattggttttatttggctatgactttgtagtagctccagtgaaagaaaagggttaatgagatttgtagagtgaattgtgtggctagatttgggaaaagttgatgtgtttagttggtatagaccatccttaagcactccttgtagaaacaccttctttgtcacctaatctttcacacaacaaacagtaggaaataatttaaatgacacattgttatctgtagtgagtcttgacacacttatataattttagatatttgtggcaagtagtatgtctttgagaacaagagtcttagaactatcagtatttaacaagccagtaccaacatgagaaatgtttagctgattaccatcaccaatggttatcttttccttaccaccataggctgctttggagttcatctgtgtctcttcagcaatgagatggttgctcgcaccactattagcataccaactctcatcaatcaaagtttaaggtgtggctatgagagcattgagctgcttctctttaacctgatctgaggtggtagcaggttgttgtcccacgtaacaatcatcataatggttataggaaatcgtagttgagtgaccatacttgccacacacttggcgagctagttttgagcctcctccaaacctgccacctcgacctcgaccatgatagccacctctaccccttgctctagagtgaggtgattttcctttgccatcatgttggtttgtattagagaaatgaggtgtgttgttgtgtgtaggcttttgagcatagttagcagatagtgctccaagagtgtttttcatcttgtttgagtttgacagacctgtgagcctctccaatctggtgtcaaagctatgtagagtattctacaattcttgccaggaaatatgagatttggctttgatctgaactacaataaagagatattctacatctaaaccaccaagaacatgatactaagtgtttttcaggcaaaggttctcctacaagagcaagagaatcagcgcacatccttttttgtttcaagtaatcagccatagatgccgatcctttcctcacagtttgaagtttagttctgagctcatccatgtgatctctacaatgagctccataaagcttctcaagtgttgaccaaaggccagatgcagattggcaacccatgacctctgaggctataccctcggtcatggatccatagagccaccccatcaataattggtcataaacaaaccaattttcatattctgagttatcagatatttgagactccgtagagttgggaatacctgtggttataaactattatggacatggtcgttggccattgatgaagccttctagcttgtgtccccttattatatgaagactatcgtctttcatagaggaaagttgttcctgtttagtctcaaagaaaacgactgactcagaatactgttgaagggtgcataaatggaagttgtcactgtcgtctgagctgtagcagcaagagaagtacttggtgcggctggattctggcgagatgcttcagagatagttgttcttgcactgttatcacgttgttgagctggagtagtatttggatcttccatggcgttagcctacagttctcagataccaagtttgatattacacaaattggttaatttgaaatctcagcccactatactgagagccattctcctttatttataatcggaggtcaatcattacaatattccatacaaccaatacaaaggccaacacgtgacaaatttgtaaaagcaaaaatgaatataatgaatccttatgctaacaaaaaagattccctaaatgtccctgtgtgatgacaaatagaaggtgactagacaagagagggagagagactaaaataccctcgagatgttcacaattttttaacatgatataaacttttattattattacactatattaatttttaaaacaacaatatattaattacagttgtatatatttaacgatataatatattcatttgttgtagttacattataataatatgtaatatttataagactaattgagatttttgccccttaaactttaacatgtaccaaatcataatccctgaacttttctggtcgttaaaaatttttcctgaactattgagaatgttagatttaaggacttttatctaattttattcaattttgctatttcagtgattatttatgtattaaa

SEQ ID NO: 297496 - DNA, 6055 bp, Cannabis indica
catctttaccagtaatagtatatttgattggtattggaggtgatagtttgttccatcatgctcttcatatctaataactgtgtataaatttatgatccatccagcttgcaatgtaatgaccaggaatcgagaaacttcattagaattcttatttgtttgttatttgagttttttgctgtatcctatcccctgtttgttattgttttcaccttagcaatgaactatgctggtcctttattctgttcacaaatatccttctggtagaattttgacgaggtttctcttctctgatgtcatttttttttgtattgaacaacaatccatttatgaatttaaaacataacaatattccagagtttttgtttgttgcatgatgcgttgataataatgacttattaacacattttagtttttttgttggtcttttgtctgtttttatagagaataccttagccttctataaatgtagtcttatttcaagaaaattctctttcaattttacaatgcgatgggagtagtaactaatcggttgtttggtcataaattattactggacagaactccagttgcttggtcaaaaattctgtcactataaagtcttagtgtgaacatgaaattttttaaagaagcaagttcatttgtatagtgacttttgggcctaatgtcctcagctagtagagtgagtgggaaacttggagaagggataaagaaaagttcactattttgatgttgtcattttctttatgtatgtgtgtgtaatcattattgcttcccagtggtttaagaaatgaattcaaattgaatgattggccagttcaaattatattttttactttcttgagaaagtgtagttttctgcactgatggaattaatttgttctctatatctttataatttatgggttttcttatttgataatgtttctgtaactgcatttccactcagtaaattaaattgtggtttgttacagtacggaaaattttttatgtaacactaacttggtttttttactaagtatcggcatgaataatgacagtgacgagcaatggaatcagtagtgggacctaccgtactcttcattttaataatgattattagttgctagcagtaagatgacgattggatcatgctgtttgctctatgcttctcagtatgtgatattgtttgtttgctcccagatatatgttccaacgaatcctcgtggtgctgaattacttcctccaggaattattgtctcagaatcagatttttatcttcgaagactgtggggcgaacctagtgaggtacggtgtaagctatttgtagcaagtagtagtggtatttctttttattactgatgtgtcaattaggttggcctgaagcctttctatccttattccgaaacgaaagttcattcattgaattgctcaaagcttcccttttttactatgtcagtaacttattagtctgaactcgggtaactttttggctaaagacagctgaatgactttaatatgttaaatacttgtataaactataaaatttgttttttggtggtgttgacttgaaattatttgcttggggaaaaatccagcttgattgacaagtttagaagcaactttatctagtttgtctcatacaagacgcagtgattatctaaatagtattatatcaaattggtctttacttaattttcctgcaacaaacccatttgagctcatatatcaggtcaatttgaaagttgaaggagcaaagccagagtgatgagaatagagtacctctcttaaaaaaaattcccggaatagataatgtaacaaataggaagacactccacaattgaggcatttatagaatatgcattatagttagctctctgtactataatgtgagcctgacgggagcaaattgaaatatgcaggatcttaagaaaaagccaaagtatttgatgacgttcacggtcggccttgaccagaaaaacaatattgatgcggcagctaaaaaggttttaacttgggtcatccagtccttgtattatttatattatccagctaaaactgggcttctctaattttaatgatgcgttgagaccaacatattgatattgcttcttattcttgtcatagctctctgaggattttcagattatgctttttcactatgatgaccgggttactgaatgggatgaatttgaatggtcaaaggatgcaattcatgttagtgtcagaaaacaaacaaaatggtaagattatattgttattttctcctcttcattttctcacctgaattagttcttacagtctgctgttatttttcccttttaaatgtgacactttctacacgtgttgcaggtggtatgcgaaaaggtttttgcatcctgatattgtagcagcttatgaatatatttttatatgggatgaagatctgggagtagagaactttaacggagacaagtaagtttctgtttgaccatttaattttcttcattggctccctttattaaataataagtttctgtttgaccattcatttttcttcattggttccctttattaaataattcttcataaattccaaggtacattgagctggttaagaaacatggtttagagatttctcaacctggtcttgagcccaacaatggattgacatgggagatgacaaagaggagaggagaacaagaagttcacaagtgagtagtcttcccctttcctcccacatcagttttcatgaagtcacactcaaaattttacatatcatctggtacttctcttcagtgccttgtatttaaaagtgattcttgatttttcatgtcagggatgcagtagagagaccaggctggtgtgataatcctcgtcagcctccttgtgcagcgtaattttccttcctcttttcttctcctttatctttcgcagtttaggcttgcacatgtgtacatgatttcaatactatccatttgttgtgatttctcacagcactagcaatgaaattgtgaggaatatcagttaagtaaaatcatgagattttctgaactgataaagggattaatgtttatcagctttttaacagagtcagaggaaatttataatcgtgtcagatgagatattggtctgtacattatttttaatatttgattttcacttgtgaaatgaattaaagctcgtatgaaaatgtttctgttttatggatttgtatgatgtaaagtttaacagtaccttctgaacattcttcaggtttgtggaaattatggctcctgtcttttctcggaaagcttggcggtgtgtatggcacatgattcaggtatggtgtattttttatggctaacaaacttaaaaatccatgcaacaagaaatcttcgagttctcgtgaaatttaaattggaaagaggaagggaaaaaaaacgagtgcccttctcttattactatgattggattttcttgatacacagtattcatttgagtgtttacaaacctttcctatcgttgtcacacattaaatttgattgcagaatgatttggtgcatggatgggggttggattttgctctcagaagatgtgtagaggttagaagttttcttcgtcttctcctttcaattttactttaattaatattctcggtggcttgtcatgagggcaactgacgacttcagatgctcttgaaattttagcaagatgttggtcttttgtaatagctttagcttacccagatgattcaggttcacaactgtcaccaacttttgcactcccagtaattttctttcaaaagaatatatacaatgtttattttcttcacaaaagttcaagaatcacaacatttatacaatgttttaaaagcttttgacaaaaagaaagagggcaaataagcttgttactggctaaatttgtttgtttgttttgactaatcagctcttggactaccaactattgatgtgaatgctttggtttatccttgaagttgaagcaaaactatatttaggttcttccctattctgattttccttttctcttccttgccagcctgcatacgaaaaaattggcgtggttgattcacagtggattgttcatcaaacgataccttctctcgggaaccaggcaagtcattatatttttgttattttcatgacatgccaaatacatccatgcacatgtgtgtacaataagaacttagtgagttatacgagtgttggctgcatcttaataccgtacaacttcaattatagttttcttgagtgaaaaattatcagccatatttgaactctcgtgcacattccccaatgacttgacatgaatgacgaacacagcgttatcttccattaaaacataggaaaaattatttcaagtggttgaatcccttggaatgacaaagacaatcaacaaaattgtttatagaagtgatggaaatgtttcatattatatttagatattatcttttagcaacaataatttggtttctagaagttaggtaggggtgttgacacatgattcttataataaccatggttgagatcttgtcaatgccattgattgattattcattttccttgcttcatctgtcattttcagggtaactctgaggatggtaaagctccatgggaaggggtatgtacagtttacatctaataatataatttcctaacaaaatggcaatgaaaaaagaggacttttctttcttcttcttcttcttctgattcagctatttgcttttctttatgcaggttagagcaaggtgcagaaacgagtggaccgagtttcaatctcgtctcaacaaggccgacgaagaataccttgcccatgttgggaaagggtaaaaatttgaagttccatctctctaattattatcccctgtgtacaggtttcttttgacctcaaggggtgttttatgatcccaattcaattcaattcatttctttatttattcattttctttctttagttcttcctcgcctcgaggttttgagcttgattttcacataggtgtattttacagacattattgtatttattacatgtagaagaaagtcttacatttaccatccataaccaatttgcataaaggcaaataatcaatgaagtgtttgtatggtgatggcttataataccagacagaaataagtggtgtttgttcattatttgagtatgaatatgaacaataaacatagaatagtaacaaattattacctaataaaaagaaccaagaacgccaagtgagaagaattatgaaggtgtgtaattactgacatacatcattggttttcaatgcagttcttccattaaaatataaaatacaagtaaatatttaatgagattgattaaatggggaatctttttattacttgcctacatttgcaaatgttatatatataatattatgcatacgcactctaatttaattttataagatccacataggtttagctagcactttttatattaaagaaaaagtaaatcaaaaatgtgaatggtgaatccattacaaatttagattattgtgctcaataatatatagaacaaaaaaagccaataagagcatctccaatcaatagggttgtccattcgattggaagttttttttttttatttgttagcgtaataatattttacaatcagttaatattttaatggtgttgacacgtatgtaatatagtctaattttttagattaattttatgtaaagtattgctcaatatgaatcatattttattttattttttggttgagaattcaaaaagaaaaattattaatttaatgtgatgtgggattatggtgggtaacttttagagttgttaactattgaagtattttttgaagaaaaaaaatatatcaaatcttatgtggatgagacatgaaataaaaaagtaacattttaagattacttatgtacttttggcaactataaatgttatctttattgaacgaacttgaaaatggaacgaatgtatgctttttttcactttggtttcttattccaaatgtagtacacttgtctatctaatttgtatcatgttttttttttttaactcaatttgtatcatgtatataactcttcatatattatcttgagtaatttgcggcaaaaccc

SEQ ID NO: 297497 - DNA, 3044 bp, Cannabis indica
tttttggcagttcagaacttcgaggcacatcattagcattcaatgctctgtcttttccaaattgtagtgtttccatccgttagatcggacttattttgatctaacagtggtttttaatagggtataaaagacaagaacatcagtctatttcgccatttttgcatttctgagttttaaatttcttctgcaaaccatgaattttttccttttcaacttgcatgccctcattgtcattgacttacttcctgtatttcattagatttcatcttcaacctcagagattctcagaactcactgattcaatcatcacaatctcaatcgcgaagttcttctttgtctagaaatcttcatcaaagtagtgagtggttcatttccttcttctctatgcatttcttctcgatatttgtagtctggtttttgttattgattgtcttctttatctgctttgtttggttatttttaggtaatttttgttttgttagtttggataattttagggttaaggaaaatttctaggttttagattcatagatttctaggttaagttgaatttatctttccagaaattgggattacactcgtccacaagtatgacccaatttatttttgaaactacaaccccggaattcttagaaactatattccctaaaaatttagcccttctatttgaatacaagacttatgtacctaaatccatacttgagataaacgatgtcaaaattagagatcatctaataaaaaccaatcaagatgaaatttcaagtcgctataggcagtttttgtaagaaataatcgagggtaaacgtaattttctgtgagatgcagcttggccttgtttttacctcgagtcactattgcgttttcaccaagtgacttaaattttgaaaatatgaccacttaatctcgaaaataaggacccctcaagatcccacagttacttttgaggcaaaactcattgaatccaaaataagatccataggagcttatgttgttaatatattaaagtctcgtggcatcaaatacgagaaaggattttatgttaggtatgtcgctctaggggagtttagctattttccccctgagagagtgattcgagaagagtgtggtagcactagtactagtggctcgtcttgaataggcgcttggagcctcgaacacattagagctagagcagtactccctctgagagagtattacaaggatttcgataattatctcgaaatttcctcttttcagctaagtccaagttcttacgaaattttggcttatttaaaggttttataccaaattatggggagggagtgcccgaatcccccttgaaattttatatttctaccctgtgaaggttgttcctgcaaggaagagagggtcagacagtttttattatcttgggacccacacaaatgaccgaaggatcatcgtaagattaccaaataaaactgaattcaaagatgacttcttttggacaactggtctctcccccgtcaacacaacaacatttttccttatacgagagtattatcttttaaacttggttttgagtttttgatttatatattgaagacatttatttatttcgcttattctgttgacagcgatcacgaagaggccaattctaattcctgagatggtagaacgacacaaagctctcttaggtcttctgtttggactgcgatcaacagattttctactgaatgagatcaatcttaagacctgtaatcctctcggtagtaaacaatccacctaggactataagaatccatagtattctaagtagcagcaagtcccagtttcagctagcaaggaagatagagactatgtgtctcgcatccacttcctgaataaagtatcccctcggaagctgaagaataagcatctcgaggtaataactgtgtatggtctccaactgtgcttatggctgagtgtacctcgctagttaaatttaaggatagccagtataacttttatacttgggataatttttgtatagatctcataacacatagatttgatagttggtaccctaagtttcatgtccaactaagttgtgatagttcctacttcggaattgccgagcagtatggtactaatttggattgggcgagccatctggattcagattgggatatgtctccaatacatccctatgatatatatatgatcacaggctctagggagtttagtacatattgtagctcatcctcatcctcatctaataattatggtaatttttttttaagtaggagtttattccccacttttttcatagtttattctgaataagtgttgacccattccttttctcgtagatacggaccttgacctggaggatatgcttaatagtcccactctcactaccaagaagtccaagaagcgagcaatttcaacaaatgaagcctcgggatccaccaaggagactttaaaaagcaccaaaactacctgaccaaaccttgcgttattaagtaattacaaagtttcattctttaaaattacttaaggggcatttatgtatgactaaccagaattcatctggaaatacattgtataatgcaaactcgccatttcaaattttttttgaaattcaaaggttctccactaaacctctttgacgaaagtggagtcgaaccattataactacctaaccaaaccttttttacgagaaaggggtcaaatcgttataacaccttgatcaaacctttttgacgaagaagggatcaaacaactataatttttgatttataacctatctgacggaagagaaaaatcaaaagttataactcgcgtataaaattgaatactaacgattctcgcgagctaggaaagtactaaacgaggcatcacgacgccttgataaagtacttaaacctagaaaaacagatagataatattgttggaattatattaccaggatcttagattcactaacaagtatgttgtttaacatcttaaatatgaacttctaaaacgatattaaataaacacatataaagtatgagaaaccttacagtgcttgcagcggaatataatgtctctttccactcaga

SEQ ID NO: 297498 - DNA, 6606 bp, Cannabis indica
tgaattataaaggatactagccaatgagttaaatgtgaaataaagggtcttaacaatttttcttttttatctttagccaaaaagtttcattgccaaagcattcttggagtagacattgattcaagtaagtttttaattgtaattaggcctctttttatgattcttattattgtcattatttatttatttatttattttcttttaattatctttgtatttaggctgaagctttcttcataaaagttgacagaacaagtgttggtcactaatcattaactcttggaactttatctgccagatcgcattgaagatgcatattggcacctgagaaaatttgtaaagatagacagtgctggaaagatacacggaaaggattcaaaatcaaaggattctgaagatgcaaacggtctagggaataacatcacagcatcatcagatgaggagaccaaacagaatttgaagattagtaccactctgccaaaaaatctatctgacatagtatctttccgacaagaaaattttgtccagagtcgtcatcctccggagaagttttatgatgcaattttatggcaagttcgtcttatagtgcatatcaataaacgcgtttgtttctacaaaattatgagaaaaagaaaccttaaaatttggacttgctcaacttttgattgaaaacttcatgcacgttagaattctattattgtagaatatagtaataaggcttagatgctcaagtatttgttgttgcttgaccttattgtgatgcggtacttgttttgtaattagtttgtctcatgcaatacagtttaagtgtttcaaagtggattcatctgaactggggtgatgatggattaattacattattttcaaagatctggaagctgcttaatccggtatcctcttgtcttttcatgctttttgcaataaactgttaattttattctactcaaggatatgaataggaaatagaactttaatatgtgaaatgaatttggagaagcatttatttacttcttattctcgtaagcagggtggaatatttgtactggaaccacagccttggaaatcatacgacaacaatcgtcgtgtatctgaggtgataatacttgtttgttccttatctcatatgagtattcatgtcttatgcaacactgttaggtatgatcataagcagaacctgaaggacaaatcaaaactttgctggacacctcagacacaaaaacttattaaacagcagatttaaagatgtcccttttattcttgttaattagtttttttgttgttgatcagctaaatgccttacaaggtttagaataagcaatttttgtttctgccttcggctctcatacatgtcaaaccctgagtctagttttaatgtgaagttggatttttcactagttgggttagttatttgaatatattaaatttcatttgtttttcttctactacttaatgatgttatcatttaagtagattcacccctagcctaatgctttgttttgttactttgcagacaactgcagaaaattttaagaagattatcttccggccagaatgttttcaagagttacttcttgacaaggtatgtgccacatctgtttatgagtttgtgaaacttctttttttactttactcagctgcacggggccttaagacatctttaataagatggttagttaattgtttagcaagattctgatgtcaaaaggaattgcagattggttttagaacagtggaggatgtaacttctggcttgtctggcagcaaaactggattcgacagaccaatttttgtgttcagaaaatgattgacctttgattattatgtgtcaagtatctcaagcttgacacatatgttgttggggatggttgatttgatcttaagcatgccacaaccaaaccaactattttgcataaaattataaaattttggatgatgagcttgaacttggaagatcttcagtttgtgcattgagctaacaactctcggaaagcctaaactttgtacataagcatattttgtagtactggccagatacccaatatttttgtgagtatatgagcaaaataggatcctatattctgctaaatacatgtatgcagtatgctaagattgctctttgtatcttctaaatataagttacttgtgtacatgtattatttatatataggatcccagccgtcctttatgtccaaccttgatcccaacccaacctggtgtccttgccattcttgtcaattctgtcgcgaagcactttcacaatacccgtcgctcactctgttcatgttgcatgtccactgtctagctgaaagtgtgcacacattaatgctctatgcaacaccaattaagcaattatcttttaaggcagatcttcagctaacatatgagaagcaaagcaatatttgcaaggaatatcattcttagatcaacatatactaaaactagaacttaaaatggtagtttgaataagcgtttccagtaaaaaaaacacacacaaaatagtaacttacttgagctcataaagcttttcaggctaacttgaattatcaaagcagagaggaaattataaaagtaattaaagagaataatcccaatgaatttgacataaataaagcgggaagagagagacctttgccgtgagcatcaagaacactactggaggacccgaacggtgctagtgtagtgttggcttcctcaactgtagagcctagtcgactgagcgtcaacgtcgaggactgtgttgtgcatcaacaacagcatcgatgggctgttgaaatccatccctcaagtgaacaaaggaagtatatttgaacacaagataaaacacatggagttttattgctgctccacccaaaatttgtaaaatgaataacagttccacattattgactgaacagcctttccaatgaaaatcccaagtatggaattgtactgtttttaatctattattatcctttccttttcatggttccaaacaaaatgggtctaaatgtactttatacatccttttggagggaatgggtaggacttgttggatcgccaacatccttcaacattcgaagtccaattcccaaaactggattctttcgcaacgattttctgaacaacaagctcagctccttagaaggcaacacaagtttaagcataacaaggctgcaaaaacgcttagtaaaaaactaaaatagagtaggcaaaacaatgtttctgtaacccaaatgcaactccataaacagatacgcatcatttaataatgaattagttgcaagtagattgaactatgacagacatgaagtatgctaggaccggtcatgcactaaagttagctaaaaggatgaacataaaaaataaaaaatatagagacaaggcaaacaaaaacttaaagcatgaccacttcattatcaatgaaattagtcaagtaactttagttccctcaccttcagggatgctatgggtgtacttgtcttttctcaatgtggtgaaatacttcattcagtgagattgcaatctttgactagatcaggccagcaactcaccaataatccccacaagaacaatctccatctttgaaatgatggaaacgattagtgtctctaacgaaaatttctcttccttaaaagccggatatgaattttataaaagaatgacaatcgccgcagattcttaggttcttgatcacccttaaagaagaccctggaggagtgttgagcagcccaaatgcaactgccaatttctcactgtgtccacataaaatatgttccttctcttgttcctctacatcttgaagcacaaagctcatgttgggaaagtgaccagatttcttcatctccatgctcaattgattcagcttgtcaataatttgctctctttgagggtgtgatttgtctcccgcaagaagcatgtgcaatttatttttaacctcaatccaactacagccagggttctttctaagacccttctgactcatcatatccctaactctatctacttcactccacatgccctttgcagcataaatatttgataaaataacatagttccctggatttcttggttctaactcgaagagcttttcagctgaaatctcacctaatctaacattattgtgcactcgacaagaacttagcaatgctccccaaacacaagcatctggtgtaacgggcatatccattatcatggaatacgcatcttcaagttttcctgcacgactaagaagtgtaaccatgcaagcataatgctccaacctcgcttttataccatgctctttcgacatgttagaaaaataatgccatccttcatctgttaggccattctggctgcatgcagataacacacaagtaaagctgataaaatcaggtttatgtccactcttctgcatcatatggaatagctcgatggtttctttagctttcccatgcattgaatatccactcataatggcattccaacaaaccaaatttctagtgggcaatttatcaaaacaaagccgagataattgtattttcccacaatttgcatacatatcaatcaatgcactaccaacatatacatcattaaagatccctgttctaagggagaaacaatgggctgccttaccgtgcattagcgctgcaatattcccacacgcaggaagcaagcatgggattgtcacggcattaggtttcaacccttcaacttgcatctcccgaaaaagttccaatgcatctatatcctttccattttgagagcaactcgcaatcattgatgtccaagagacaatattcaattctgctccttcacccttatatcttctaaacaccttcagtgcattgtcaactagaccatttcgcgagagccctgtaatataagcatttacagaaccaatgtccctttgatccatttcatcaaaaacttgtgacatctcaagtacagaagaacacttcccatacatattaataagtgcactaaagacacatttatctgacccaaatccttgcttgatcacataatcatgaatctgaactcccatatttaaatcttcaaattctgaaatagcaggaagaatactagaaacactagaagcatcaggaagaaagccttctgaatgcattttctggtacatggccatcgcctcagcatacaagccactacgattgaaacccgagatcattccattccatgacacattattgggttcaagacctgttttcctcatctcataaaaaagctctttggcctcatctacatgcccacagttagagtaaccagaaatcaaagcactccaacacaccaaatcacgttggggcaatccatcaaacagcttgtgggcatcccgaacacgaccacacttaagatacatgtgcagtaatgaggactgaacaaacacatccaaagaaaacccaaacacaaatgcaaagccatgaacctgtttcccaacttccagtgatagtaatccagcacaggacttaacaacactaggaaagagaaaattatctggctcaactccatgaactaacatacgagtaaagatacggagagcatgaactgaatggttgcgttttgcaaaggcatgtattagtgtggagaaggagaacaaatcaggattgggaatggaatcaaggatgaggttggcatcaacaaaacagagattattagcatagagtgataagagcttggtgttgagatgggaattgtaaaagaggccagtcttgagcagggaagcatgagattttcgagtctgtgaaggagaagctgaatcagaattcaaatgtttgagaatgttggaatccaataacagggcatgcccattacctccaaaaggtttttgatgtaataaagtagtgaatagcctgcaaaagttcatatttttttttatatcacgtcacaactccccagaatccaattacttgggagagatgaatcgccattaacaatgagactgagtatgttattgaaagaggaatgttgaggaagagtgggaaatgggcaacatagcagcctgcatcacacaaaatacgttcaaaaaaaaagccaacaagtggcatgtcattcaattatatgaattatataaatgaatttatttaatcaactctattttttttttaatatttgttagctcgtgtatatttgtccattaagttaggttattttctctcattattagattaattttttaaacttttaattagtgtgattttaattttttagaattttataatcatgtatttagaatattttagaatgatttgagcgtactttggtaaaaaaaaataattttagagagctcagttttacaaaacagaacttaattgtaaattttgaagaccttggactggacttggagctgaacataaaagttgtagatctcgttctcagcttttcagaacatcttaaatcgtccaatttcgagttttattgaaggagttatggttaaaatactaatctgaacatgcaatagaaatttttcagcagaggttctcgccacagcgagcctaaagctttcgccatagtgagcgtgcgattggaaatttaggtttttctccaggaggctcttgccgcaacgagcataaacctttgccccggcgagagcggcaatttatgaaatttttaaattttatttttaatttaaatcaa

SEQ ID NO: 297499 - DNA, 3435 bp, Cannabis indica
ttaatttttttttaaatattttattatcttgcattgaaatgatttttctttccaattcaaaatagtatagtcattccactaaaataatggaaaagtcattttattggaatgatattttaatactttaaaatgcaaccaaacaatagaataaaacaaaaacgatttttttctatttcattccatttcattatttctaacccaaattccatattttaaagattgaattgccaaccatacaatctgaatgtatgggaaatgaagctctgcttctaagccatacacgccctttcctctcacagtatgaaagctccaatatgaacttaaattttgaagggaaaatgtcgccaccaccaaatggccttatttaaatgatccacccaccaacattagagaaaaagttgaaattatcaaatccaactataaactgtcacaactaacttacagtacaagaacttaaaatatctcaggcccaaaggcttgcctcaccaaactctcaaatagacactattacaaaaatgtcctatcatggagatcaaatttggatggaaaaactattttttgtcacttagttgtttgacatgatatctagcaccataaaatgggtatttttatgttcaacaatgttgaacatgaaaaaaaacatcatgttcaatattattggacctgataatgggatccacaacaatgctcatttcatgtccaataaagttggatatgaaatgtgataatttatattattatatttcacgtcaggcaaagttggacagacatgaatctttgtttttttaaaaaaataaaataataattaataaatagttcaaagaactaaccatgacaaacaccaactcccgcaagaaaccccaaccctagcaagacaccaccctcagaaacatcaaataaaaaaaatagtagcaaacttaataaaaaatctactaacaatagtagtactatcaaacttaatcaactagaaaatacaaatatcccttacaaaataatcaataacaaaaattagacaaagagaaaaaataaaattagtaacaaaatccctaaacaccctaatcactatacaaaattgaatcctcaaaaacttctaataataatatatatgtgttcgatgaaatgaaagagagaacaggaaacctacacgatcggtgccaccaatggttaacttaaaaaaaattatgagcacaatcttagcaaaagagaatgagatgagagagagagagaagagaaatgagatagtgagattgggggagggactttccattttacgagtaatctctagtaactagttatcggggttgggctaccaggatcggtgctgcattctcgaagttgggcttccacgatcggaaaatggttattgggttgagtggggctttgtcatgagagagaatgagcaggtgagagggggtttcaccggttatggctccaatggaggttgtttagggttaaagagagatgaagataatgaaaagaaatgagagagaaagagagaccatgttcagacattagaggcaatttaattttcttttacgggtttttgactttccaatgaataccccattttattatgtgatatattttatataagataatttatttactaatgttaatgatcattaagaacttgtcaacaaagttaaggctagaaatttaaactaaagaactgaatatgataattcataagaatttagaaaaacataagaaaatgaagaaatatttaatggagagtatgaaaattgtattacattgagtgttcttcataccaataattttctaatcacattacaagtgttagagtggtgctatttatatttgagctctattggctctaggttacatgttgtctaaaaggaatcgaacacactctaactatacatccaaggtcaacatgggtaatgaaggtagcgttggtaaggtatcagtttgtactgacacctgcgtatttcgtctccaccactatttgtacaatcactattgttttaggttttttagaggcgcaagctcacccaggtggcatttcggtcgtaccccctttgtaccttgtaccctgtaaattgtacttcaggcctttatgccttggagtataaggaccgcttagttttaatttagaattaggagataattagggtttaattatgatttatctttttatggagatttatttcagggtgtatcatttatgccatatatgaaattttacattttttcatattttgtgcccgacaatattagaacgcgtcatttggccaatagaatcacattttagtattttagttatagcggagtaatttagttagacattaagaatttagggaatgatattcaagttttagttgattaattatgttagaaatgcatttcttttattcattatgtaaggactcggttgaccaatcaagaagtgaatatatatgtaatgaataaataaataataataaaataatatgatatatatgtataaaaaaatttcaaataagatccccctctctctcttccaaccataaccaaagaaaaaccacaaaccccatcaccggcggacgccggcgaccaatctccggccatcgtccggccccacacaccaaacacttcgaaaccccaggtgccggcaacctcacacccaaccggtgctgcttctttcaccgccgttagctcgagatcgtaagtcaaagtttggctgttcaaactttgaacggattttctggccaccttcggtgtccgtttgacgagctgtcttcaccactagactcaactcgtcgagaaaaacaacctacactaagctatttttgttgggttttatgctctaaataaaactctatttcaatgtaatatttattagttaaatatcaataaagaaatagaagtattttcatcacttattgtgtcatttggttcatgttataatttatttgtttattttatttataaattcatccaaatccttatcatatgtatgttcatgtttattgtgtcatcaacacactggaatgtaataaagattgtgagattaaatatatattcctagatttatcagaacacagggtttaagtgatatgacaatctacaacatagtttacttgcacattggataagtgttatgtcctttccagggcattggttaaagtaatgcttgggttggatgcatggagtatgcatcggaagggaccgatattgaactttgaatcagatatgataatcttaccgtaatatctattcaatttaatatcacctagttgatcctagatcaaatgatcttaatcccgatatggttaggttcgatctcaagagtattatacatgttctttgatttgttagttaagcctacttttttgccagggtgatacgtacattttgggattatggtagtgcaattgagttggagcgctaaacataaatatggaatctatagcttctatctagcacatgaaagtg

SEQ ID NO: 297500 - DNA, 5821 bp, Cannabis indica
tcaaaattttacaattgtacattagaacacaaaattaaaatttaatgtaaatttacaataaaactattttttatgctaaatataagcacaatttttttaatttttccaccaaatttgcaatattgggcccacaaaatccattaatatatgaaaagaaatattattaaatggaaaagaaaatgtagcacttatttacttacttggctccatttctctctcttttgaggacccaaacacagacacgttttaacacacaaatacaatgcggttcttcacttctcgggtcattcccgacccgacccgaaacccatccaccgctcgccaccactgcagatccatcgtcaccgcatgcagagccgttcttctcccccgcttcggcggccccgatgtcctccagctccgtcccaatgtagaagttcctgatctcaacccaaaccaggttcttgttcgtgctcgtgcagtttccattaacccgctcgatacccgagtcagttctctttctctttctattgtttctgtttggttcttgggaaaattgttgataaaaacttagtcttttcagtcacttgttagtaggagtagctctacttcgtttacggggtttggtagaatatttgttgggactgagaaagtaaggttttttctttgataattgttttaacatttcatttgaattgttccaatcttgtatttttggtttgtgtaattaaaagaaatgggttcaaatgaaaattcttgaacctcatttctctagagttgaacattgcctaatctttatttaggaagttttgatgcttcacttatcaattttgtatgttggtaatttagttgttcatggaggttgattcaatgatgaattaagttattgataattagtatttctccacccgaacttggacatgtaccaaattgtacctcctaaactttttaattcattagaaatttttcgaactattgagattgttagatttaagaactttaagcaattccgttttactaacgaactattgatatggacaattaccacattacacgtctgttagtaaaattaaacgaaattgggtggaagtacttgaatcaatcttgttgagatgagggattggtttaataaccagcaattgtgattattcctttcttattgtattaattaacataatgctttcacattgtgctatagatttttcttgctgtgcttgattattaactttatttcaattttcaacttatcaagaatgaaaatttgtaaatgtttatcttttgcagatgagatcaggctatggtcgttcattatttggacctcttttacctctcatactgggtcgggatattagtggcgaagttgcggctgttggagcttcggtcaagacactgaatttaggacaagaagtttttggtgctttgcatccaactgctgtgaggggtacttacactgactatgcaatcctttccgaagacgaacttactcccaaaccagtttctgttacacacgtggtaaatattataaccttgtctgataatatgctatcatattatgaattggatagttattttatgtttcatttcagctaatatagttagaaatttctcttatgaggcctcattgaacttttgtgatctgttaacttattaaaagtacttttgatgggataattctatgcaatgatcatccgaatttttatcaagttttgaagtgctgacgtctagttaagagcttgaatagtacttactccttgtaaagtaagctcgacataggagtctcgacactttttagttgctttggagataagtagtgccgaaactacttgatatggttctcggccgaagtagatggatacttaacgatatatatactgtatgatttagatgtaaggggatattaaaaaggtgtttgaggctaatgaagctgaagaaaaatttctggaatgtagaggctgcaagaagctctgtcgtagcttataaaaccatttggctactttgtaggatttcgtttcttattcaacgtgatgggtagtttacataagtttatttcaaattcactttctttttactttcatctaagtggggagctccttcctcatttctttgcttgttcatatacatatatgtgagtgtgtatgtgtgtgtgttacctttataagaatctgagtggagaaatttatcatttatgttttctatgcttataggaagcaagtgccataccttttgctgcattgactgcatggcgtgctctaaaaagtactgctaggataactgaggggtatgttctaatgttcttattggttgtcatcttgtatacatttcttgatttcaaacttcgttttgtattctcttcgatacctttatgcatgttttaggagactatgaaatgaccgtaatgaaaactattctagatacatcgtgtgcaattgtattaccgacttgaggttttctttacccttcttgtaatgaaatggaatacctatgtgatagaattgtttatactaagctgataagagggggaaagtaagattatatgttattgaataacctcatttatatgttctcttactatttggttattaaatttgactccacaggcaaaggatattggttgtgggtggtggaggagcagtaggatttgctgcaattcagcttgcagtagcttcggggtgcaatgtggcaactacgtgtggaagtcaaagtgtagaccgagcaatggcagctggtgctgagcaagctgttgactatacagctgaggtgtgatgttggattcaaatattgctaaaattgatttcttattagtttctatagctaacggtatttagttaacacttaacaggaccctgaatcagtaataaagggaaaatttgacgctgtcttggacaccattggcgttccagagacggaaagaattggggtaaattttttgaagagaggtggatactacatgacacttcaggtacggtttcatatgtttgttttcttatcttttgcatggaagaaatttaggtgaaagttttctaacttcgccgttctttatgtcaattctcttgtgtagggtgaggctgcatcacttactgatagctatggacttgttattgggcttccacttgcatcatcaactctactgaagaaacaattgcgatatcaatacactcatggaataggtaaaccgatcttctcctccccccgtttaaacatgttttattatgcagtatgtgctagaggaagggaactaagataatgacagaaacaaaaactcaaagaagtcaaagggaagtaattattaaggtctaaattggctttatagtcaaaggaataatacaccgaaagagatagtataggtccctaacccccacaattcttctcgctaattttccataccttccactatgctaaccaactttcctatcattgcttcataattgggagagaaaactgagtttaaaataatggcgctgaaccgtagaatttagatgttaatgatctttttctagctaaaagatttatggtgtttgttgtccttaagacatattcttgaggataatttatgaaattggataaaaaaatctgaatgttagattgttttatgttaatttctgaaagataatttgcatcatttatatcaaagtttttttatgatgatcccgttttcatggggtacaaagctttgtaacaaacctgaaaagattaaggactgaacaatgctattgttttgtgtatgaaattattgaagttacagatatagataacaaaattataacaacagaaatccgggtttgcaagatatatattctccgttatcttttcagttgtatcttttgagtagttttatcgtctttcaaaatgcttcggtttctttctccttctgtagtcgagactagctctaagttttcgggtgcatgtttattatgtaactgatggctgagtacgtcttgttttgaattcgattatgtagaatactcgtggacttttatgagagcggatgcagaagggttaaacgagattcgaaggcttactgaagccgggaagctgaaaataccagtggagaaaacatttcctatcacacaagtgatagaagctcatgaggctaaagataaaaaacatataccgggtaaagttgtgctcgaattcgactaaagcttagatttttacactttcaagttgtgttgtgttgaaaactttgtgaaacttttagtattgaaggtttggatatgaatgaaaattgaaatgaaatcttaggcttgttctgtacagtgtgtctttcttcaatagcatttttgtaataatgagagctttgtttcatgggggaaattttgcaattttcttacactttgacaatatgtaaatttctatagttgagcatagactataaggcatcacttttgccactatggactttttattttgatacttagataaattatagtttatagttctttttacatcatctctagtaatcgagaaattttgcataatttttagggtttatgaacttcaaacacagttgtttgcattttaattaaaaatttattgatatatagtttaggaaatttttgtagtacaccccttaaaagggtgctttggtagacccatgcttgtttcggaatttagaacttttttttagtataattattttacataattgtctacattgtagctattttaggactatctgtaaatttttaaacttttttgaataatttttagtgttgaaaataaggttcaaacaattatttaccacatgtataagaaatattggtgttacgtgcaacaaaatttttaaacttttaaactttattttcaacatggtaattgtttaaatttttttgaaattttataagtagtcttaattaagtataatgtacatgaccataaaaaaaatagattaaaattttctttttgatgttaaaataaattggggtctaccgaaatacttataaaagtgtactatagactcatcttataatttaatcaacttatctacaattggcaaatatgttaaaaataaattataatgagggaagaatataacaacaagaaagtttaaccaatgtttatttattataaataatgtaatttatttgttaatagactatagttttttattcttaataatatattatgatagtttaaaccaattgtatgacctctaatcttatataagaaaaagatgtataaatattttcaaatatatataacatgttttgtcaaaattagacatgaaaatgaaaattttgtaccttcattttttctaataaaagtttgtcatatttttttagcctattatttttatcatactccactaaatttatgtgattattaataacttttttctttcttatgatagaagataaagatttttgtgaatatcctatttattttagttcttttcttttttccccactagtatagtagtccatgactcagtgaatagtcctagccttaactcttctctgatttttgtttattactattattatttggtttggatgtagtaagttatgtacacacatgattgaattgaatttgattggttcattgaaatttgaaaaattgaaaattgaatgggaaagttggacatgaaagggacttaagggagtatggtggcttctatggacctcttcttcttcttcttcaagactttaccaaattgacttctaattataacagtctcaaactattaattttgacccatttgacagttttatgacttaatttttcttttctgttttggattcatattagttggtgtctttattaatgtaactcaaaactatttttttttgttacatgcgtactctatttttataggtgattctacaatgcacacctttaaaag

SEQ ID NO: 297501 - DNA, 3225 bp, Cannabis indica
gataggtggcattatattgaagtttcaaaggcattaattttatttaaatacgcgtgaaaacaatttattctctccaattttaatatattgactatttgaggatattttttctttcttttgctcaaattttctcataaacacaacaacagaccatcctaacatctccactagtccactttcagacccagaggaccactctcctcgttgaaacccatacatcggggcagaggaggagcaattgaggccattaatgaatgaatgaagctctgttttttttttttcagttggaaagtcgttggtgcctggtttgaccaagatgatgaagagaaaatttgagcaaaaaaagggaaatattttgaggtgggtttcaaaatttcgcaaggattttgggaaaattaataaaaaaaactaagtcaatatgatatattgaaacaggagaggatacttttcaaaaaaaaaacgaaacaggagaggataaattttgttcacgcgtattttaaaattaatgaattgaggcctaaaataatgacacgtaatctaaaaaaaccagactcgcattagccaatggttttacttgaatatggtggatttaagttgggaaggataactattgactagacataacatatatcccagtacaattatttaatatctttttttttgaagaaatactaatacaattattgagtctgcatacagatgtatggctatattaaaccaatagaaaacagttcccataactcctatggtttaaaaaaagagaaataatgtataatgtatagtgtctaatattttttatctgtctatagttatttgtttagttaagtatcgggtctcatataatttaatataataattttaaaaaaaatatctttaattaatcataacgcgacacatttaaaaagtattagatactactagtatcgaataacaatgctctttatatttaaaaagtattagataatactaacatctaatactcctaaactagccttctctgtatcttcaaagacagaagtacacatcacaggaaaaacaaacccaaaaacagaagcagaagaggaaatactggtagatggctagcagattagcagcaaagtaagcaactagttccttttggcacaacagggtaacagggtaagtggtcaactctatctcattgagcattacaaaattagtcactttaattagatagcataaatcaacaaatcattcttttcggtgttactgctatatatacaactatcttagaatgagacggtaaagctctaatatttttgtatatacatgtaataattttaaagaagtatcgctaatcaatcacaaaacaacacatctaaacaacgttagacatctctagtacttaatagcaatactattttttccctcaacaaaaaaacaaatactactaataaattactcataaaatatgtatttttttattttagaatagagtaaatcatattaaatttatttagttggcactaaactaacctaaatttccaaacaattaataatcgcttgagtccagaaaattgcatacctacgcaaccatctgggatgtacgggttcccttcgtagccatcagagcaccgacaaagatagccttgcctagaactggaatttacacacacactattctccttgcaaccgtaagtcgccttgttcttctccgcaacttggcaggaatcgaacccaacagcccaatcaaaaataaccggaaccgcagagacattggtgaattcttctaaccttgaaaatttgaactcagtttcttgcataacaaaagcatagctacacgggttgaaactccaaacgctcctatgattatcgttgcttcccaacatcataccgtacttagtaagttgactggggatggaagtttggcaacagcctacgccagagcaagacttgaggtccacttcgtgggcgtaactacacgaggatatgcagcccgttgtgtagttattatcgcctctaaagccattgatggttgccaaattatcgcaacctatggagtaaaacttgttcctgagaaaggaaacgctgaaaaattcattcaagccttgcgtgaagtccgagacatcaggagtcaactgtttgccatccttgctgtaacaatctttagcaacagccagcatgatagttacctcgccatctacaacggttattttactgacgttgaaagcggagctaaacaagtagggtgttgaatccgtacaagagatctggaacaggtatggaggatccatgaaacagcctttgtcaaggccaaatgggtatggaatttcgaaatccccgcataactgttttttgcagccacttaggtgggttggtatggaattgttgttgctgcaaaatgctacttctattatgagtatcatcaagaataagatcggacataatatagttaatgatgaggtgttggccatgttcatgatctaattctaattgatttgtttctttttcttgaacagaacaaactctatatattggttatacatgcctcataatatacaagtgggaagatatttggtctgtgtagacactagtagacattatgtctctagtctactcttctcctctcttccctttctaaccaattataaaatgtctaattatacatttattgaagtttgtactatacaatgaccaagtcatcaatttattaaactttctattcacacctttcgttattcttacctccgtgtcaattccatttccttttattttttttaaaaaagtagctgcctttttattattttaataattgtccattactccttacaaaataataataataataataataataataataataataataaaggattgactataaagttatggattggaatattattttcttaaatgataaattaaatttaaatttttaaaaatagtaatagtactacaatttttaatatatatatatatatatgtatatatatatggtaggtacacatatttatttttataacatagagacctttttttttaccatggatgattacttttgaaaattttagataactaccctataactcaatgcattaaattaagggatattggcggctaaaccacctgaactttacggtttgtaacacttaaccacataaactgaatttttggcggctaaactacctaaactctggttccgttttgttctgcacacttccgtccaaaagtcacagttaagtgtcatggtggactgtctacgtg

SEQ ID NO: 297502 - DNA, 6369 bp, Cannabis indica
taaagtattttaaaaagtaaaatttgataatatattttaaaaattaaggaaaaatattgatgattacactaagacagtgccaaacaacaccacatcatgactgctgtaattaaatagctaatatcttcagactatttagccaaaattattaattttcttcgaaaatccacatagggtcttaaaacttgttaatttcatctttttattaaagcagctacttcatgttttgctgtcatttatgaccatttcgattcttgaaagacaatgaagatcagcaaagcaagaaaggcatcatcttttttagggggaaaattagcattttattttatttatgtaatattcacatgttttacgcagatgggattctcatttctcaaccacattattaatttcattacctaaaatgcaaacaaaattgaactggaccaatataaataataataataacccgagacaaaggaaacaaaaaaaacaaagggtggctggccaattatgcctcagcataaaactcggggtgatatttgatcaccctcggctactttttgcttttttgcttcatgtgatgaccgttggcttctcccttcctgtgaagtccttcagctttgatacagacagagccaaatctatagaccataaacaaagaaaatatgaagaataatacaagcaatttacatgagatatttactgtagaagtgacaatgaactaacctatcaacggtttcaaagctatttgggcatccacgtcatgcttagaggcatcaggctcaaactgttcgatgtaaactcggacagttgcaccagctgaaccagtcccctgtacaaataagccatgaaactaatgaacatggaaacattgtgaaagggagtgtaattaggaagggaaaggatcgacacatactgataaacgatatatgattcttgatccatcagtaaaaacaaatcgaacaccttgctttgatgctacactaccatcaacctgataattattaataaatatatcagttaaaagaaacatagcatgcaaaaagtcccaaaagtctcttttgggtttaacttgctagtaggtaaagatggcaagcatgcagcatcactttaaacttacgggatcagtgtacgtaaagtcatcagcaaattggagcgtgtagtttcctgagacaataaattcttaattagtacccgaattgggtctggaggctgtgcccgtatcaaagaaacatagtaaaacttaccgtacttgtcaccagccttgcttttagagatcaaatctctgaggtagtctaccattttgttagcaccctctgattcacattcctggaaaaagattcaaaatgagaaaaattctttacttcggctccaaaagcacaatttaatgtggctcacaacacagtaagttgtaaatcaaaaactaggagtttgtactagtgtagaaaaatagtcaacttattcaagtcatggacataattacttcatagtcatatcgagaaaagaaatttcttccatagattgcccagtgttcctttgcaacatcagcgacagagaccaacttttccccagattttttgtctttgttttgataagcaataattgatagccaagctaacactgccctgcaattcaaaatatttatgttaaagaaggaaaatggaaaattgctttatcagaaagaacggtaaaaggggatttttccccctctatttcatgtttcaatttttggcaaaaccaatgaaaactgttgtaagaacaaatcaaaataccaaattgtttgaagatgttagtcattatgctggagcagctaactatacaaatgttaaaggttaattattatccggtactccatgaaatcactcgtaaattgaagtaattaaagcaaagggaggaagatcacaaaatcatccgtagctaaatggagaaaaagcaagatacaataattccaaagtaaaattcaagagacaagtgtaaaaaataaagataattaccaaattccatccttctcacgaatgtggtcagaacctgttccaaaactctcctctccacaaatcgataatttccctgcatccataagattcccgaagaacttccaaccagtgggaacctggcccaatacagtttttggtttgaaaaagaactgtgtaagtaataaaacccataggcgaaggaaatgatggaatggaaaagattttatttctttgtttggttagtatatattccttttccttttcattcttctattttcattactcctagtccagttgagcatacatatattttgattactcccactccaatggaggatacatatatttccattactacttttagaatgttataaaaatgttaaagatagccaaactgctgggcctcaaatagtcaaatatgttacatgccaaacatatccagctccaagaataggtagcaagttagttagagagttattgttgaactgtataacttatgttactttagggctggctgtattactagttaacttgagtgcatttattacttttaattagaggttgtttaaagaccagtactatcttcttagagggggtctgatttttcgtatagtgtaagaaagtgaaaatactttgcggactgtccacactgactcgaatagtttgggttttcactgaacttgtcattcttgaatagcaataaagattcagcaaccttcttcacactaattccagatctagatcctatcacaaacctcaaaaaatggaagacccaatttttcagcaactcgatcaagtgctccgctcgtcggcatagatcgggccaaaccctaggaaaattggaaaacagaaaagaaaatcactttcttctagttctatgaataaaatgttagatgagtgaatacataatgtaaagagggcacgatttcatacctttgggccattttggaaatatggaattgccttttgtgcattggctgcaataattgcgacagaatccgagggtgtgataaaaaaacctttgcccagaatcatgtttctatcaccatcacctgattaaagacggaagtgtcaggtttcataaataaaaattaaaaacccatgttctagattgccaaaacaagttcaataaagagtacgaatgagatcagtttattgcaatttctaatatatatttatgaaattttacataccatcacttgctgctccaaaatcaggtccattatcaccatacataatgttgactaaatccttagcatagctgtttgacgattaacagtaaaaattaactaatgtcatctaaataacaaactagaaatttcacaattcaaggcttacgtcagattagggtctggatgaccatgtccaaagtcctccaaaggcactccattcaaaattgaatcctacaagacatacctaacatctaacatcaggaactcaaattccagctagctagctcataaaaagttaatttaatccaccaaaccaattactgaccagtctagctccgagcttatcaacaaaaatgggctgtgcatatgcaccggtaacagcatgcatggcatcaaatataaacctgaaaatgaggcagtattaaacaatgacacctaagagcaacacccaatcttacacattgactcaagcaacacagctaaattcaaacacgcaaacataaaggcctaaaaaatttctgcatgatgagttataagtaatacctgtaatcagaccttgatacaagacttttaataagctggaaatcaaatacatcctgcagaaaatcacataagatacttgatcaaattataattttcaggtaacataagtcaaaattctaaagatgcatgtattttgcttcacacctccataagctccaagtaatccgaaactgggtctatcacttcaactgcaaagtctccaaacttagtaaccccaagagaagacagatctacatcagcaatgtcagcaacttttatttcagagatctgcaataaacttagtcagcttagacaatataaaataaattgaagttaaaagtgaacatataggaaggtaaaacagaaaagaagagattagaagaaatgcattgtattgctttatgttacacaagcaatgcataaatggtcaaaggagttcatgtaaaaccagatactcacagaaagcgtgtttccataaattttgtcagtgatggattcaggtgcaggttgaccactactgtagttgaactggaaagaaaacataatatttaggagactgcagcaacagggtagagttgccctgtatgattttcttgaaatttaaatttaaataaaatcaaaatcccttctctaaatatacaacactagatattttgtagttggtagaaaaaaaattctatgactatcacctcaatacaaatctataactatatcatgaagatgtttaaaaatgaaatgaaatgaaataaacttaccttaattccccagtcatattcaggtccaccaggattgtggcttgcactcattataaagccaccattagcctgtgcaataaaaacaagtgataacttcctatgatgtgagaagatgctgaaataaaaagagaattaaagtgctggagtcgacaaaatacctttctcttccggattacggcagacactgctggagtcgacaaaataccttccctacgttcataataaatcctcgttaattcattgagatccaaaagattgatattgaaattggataaaaattgggcagagagtccaaatgatgactttgcaacttcataaagacacttgtactgtcttatgagttctcatccacctgtatcacttacttgccaaccaaaatttttccaacaccattcccagctgcaattttaataataatctgcatttaagtccacataattactcagatgaaacatatacagcttaaacataaagatacatattaaaatcatacagcttaaactaaaattaaagcatttaataaacgagtaaaacaaacctgcgcagcttcacgattaaagtatcggccatcgccacctaacaccaatatcccatttttgtaatcttccaggggcaatgaattaaacaatgcctataaattacagaagacaagattatttttgaaacccaaacgccataattatctaaggataaatttatgacagccacagaatgaaataaatgtgagaagaattcatacctgaatccaattggcaaggtaattttcttgcataaaaactttcacctgcataacatgtggatcattaaatcaagtcccaaaagagtaacaaaataaaaaatccgacatagtgattgattagtgatgaagagaaaaaaaaaaaaaatctcaatatggctttgcttatatgcaacattcctttcaatcttgtctatcaaacccagaatcagaatcatatttcactttgtaaccaaacaaacaagaaaaagaaacagtacaaagacaataagaaatctttcttttttaaggaagaaattaagaaatcctatatatgaaaaagataaaatgaaaaagaaccctactttctttcggagaccactggttccggttttctgaccttcaatcggtttagtgggtacagaattaatctgaaataatatcaaatcccatatcaacaataaaaaaaaatgttcaaataaaactttataagaaaaaacaaataaatacaatgtaagaaaatcaaccttgatgccctttggttcaacaatggtggcaggagacgaagaagaagatggagacgaagatgctttgattgctacacacgctgatgtgctgagattgagtggacgagcagtgaggagtgaagacagagtgacatacgacgaagatgatgaaaacgacaatgaaagttgtggcctttccagagtcaagtttgaagagagaagattgtgcagcctcgacgagagagccattattgattgatgagcgagagagagagagtgagacagaatcagtgagaaattggagaagatgttaagagagttgaagccgaaggagtgatcgccacatgtactttataccttgtgtaaaacaaaaaacactatcttgcacctgtgaaccaactgctttttccctttaatttttttttctttttttttttaagtaaatagcaatagggaaattaccttctttatgataattttatatattctttattaaatttacggtttttatttttctttcctttttaataatttctcttttttaatgtttacattaaaactattcttccttaaccattttttagggtaactgctcatttatttttctcttgtttatttaatgggaaatttacacgttatattaatttttgccatgttatacagaaattactacatttttactgtatataattatttttaaaaaaattttgagcaagcttatttaatttaacttaataatatata

SEQ ID NO: 297503 - DNA, 2109 bp, Cannabis indica
aataagttttatttagggcacaaaacccaacaagatcttgatcatactctgcgacagaaaggatcaagggttagagatctgaattgaaagagacaatttattctactacaataattgtaaagatttcttaatctatttatatgtttaattcattgttttagaaaatttcatattaggatgttagattagttataatccaacatacatgagtagtaaattaagatcctagtaaaagatttcctacagtttccttcttgtcatgtgtaaaagtgttatccatgtcatctggtcaaattttcaggtacctactcgcctaaatatgcaacctcaacttaatcttttttacaatgagaattgctaaaaggcacgactagtgcctagcaccctcctcggtgtcataccactactagtgtaattaagtatcgagtctcatataatgtaagaaaataacttttaaggaatatcaataaccaatcatgggacgccacctatagaaggcacaactggtgcccaatagcaatgctcttttacaattgcaccacaatcctctttcctccacatacttaagagggaaggtcccttcttagagctgcaaggtttgagatatttcaactttgtccaaatcataaaccccgtgaaagaaaatttgagatttatcaatattataggccttaagttgcactaaactcatcttaaagctgctttaaccgctctcacagacttacaatttcccttcagaaaagaatgagatcatcatcaaagcacaaaccaataatctttaaacttttgcacataggatgtaatctgaaatcggcttcgacaaaaccatgtgaagtgttcaagttaagtattccattaccagaacaaaaagcaggggcaaaatagaatcaccttgacaaaatcctcttacccttaaagcttctttgaattatgccattcatcataagatagtattgagtattcttcaagcatactataatccacccaataaatttagctagaaagcacaaagcacacaacaaatcttcaagagctaagactgtctggaagcactcttctcttaaacagttctatattactaatcaacattgtgacatcaaggagtttttaccttcaaggcttaaatgatcctagcaaagacagacttacactacttgttagcattctctggcagatatggaatacaaggaacaatactctcttcaatagtgatcaatttacaaatactgatgtgaaagaatttgttattagatttttgcaggattaccagaaagctccacagtttaatacttgtactagagagcaaggacccaacaaaagctataccatctcccctgaaagctttattttatttgtagttgcagccttcaattctcaatcttgaacaacaggtctcggagcttcgattaaacatggcagtgaccatgaaattgcgggtttctcaattccaaaaccaggtgcatcgtcaccgatttatgttaaagcttaaaccctcctggaaggtttaaattggtgcctgacaattcatttgcaaccaagtcttgttgcatctgattgttcttagttacttctcaaagtcaaaagcagttggaaagataattatgctctttcaagccttgaggaattgattagacagtccttatcctatctctctaatgcctccctgcaacacatccccgggtctgaaaataggaaagctcaccattatgttagggaagcatttcagcgtgataaagactatatctggagagtttattttttttcctctttgtgtgtagctgcagcttgtgcttagttctctttctcttctcgccgcagttccctaaaaaaaaatcttcaaaacacggctaaggtcatccaaaattatatgcacacatctgttggaaattattttaccaggatcttagatctactcacaagtatgttgattaacaccctaaatatgaactttctaaaacgatgaaataaacacatataaagtttaggaaaccttacattgggtgcagcggaattaaatgactccttccgttcagatatctagcccttgattcctttctgtagcagagcattatcaatatttgaacctggatctctttctctgaatctttg

SEQ ID NO: 297504 - DNA, 1801 bp, Cannabis indica
aaaaaaaaaaaatattaataattatataaaaaaaaattgacttaaacttttttagatgtatcacaaataaaaataacaactataaaattacttatatatatttatagataaatataaaaattctaacctggtccactatgatgatgcttacataagatcttattccttacttgaatattccatactactttgaagattgatagtgtggccatcttcaccactatacaatatcaagaaagattagaaagtaaccttgtttgaaattctctacttttccctatttttatgctaatgctaaattaaatgctgacataaaagaaaaagtgaatttgataaattatcttatgggaattgcaatctaatgaaattattctaaattcattcccattagatataattctacaaaactaatgaattcagtactcattttatatcataattgttaggaaaattaaattattcctattcacaatgtaatgatgaataagaacttaaactagccaagtaaaataatgttgttgaaataaataatgctattgataagaacattagaaatttacaaggtttggtacgcaaaaattacctacattctcaagtagcgctcataacttaactatcaaattgaatgaacttcaaaataactacagagcaaggctgagtaaacaaccaccctgaaaaatataaattttgggattataataaatattaaaaggggacatatttataggcttcagtatgggttaaattatcatttacaatcaatgtgggattttttacacagttactcacaaaagagccaaaatccaacaaatctccaccttaccgactttacaaacaaattcctttaatttctaaaatttgcgacaccatagccaaatcaaacttgtaagttattaaacattgtttgaacttgccttttgtctcaacctgtcatcatatccgttggattatcaattattttcatcttcaaaaagagaattttacattcttcaacaatcttcctcggaatatctatatgttttgttcttgcatgaacgacttgattctttgctaaatgaattgcaatttgactatcacaatacaccttgatgggttttttccctaaaacctaatcatcaaataaactttgtagccaaatagcttccttcatagcttctataactggccatactgcctttatggtagaaaatgcaactgttgtctacaaagtagactttcaactcacatgtgcttttgcaagagtaaaaacatagacagtggttgattaatgcttgcctaaataagctaccaatcacattagcatacataactttttccatgtattctcattcttcatcaatcttggagatactaagcattgagcttgaaatgaggaataagtggagtacttacaggttttatttgttcatttgtaccaaaacgctacagtattttttttttcttttcaaatattgacttttagtcaaacaaagctttcctttctttctatttttacttatatccatgttgagaatttagaaaaagacaaggtttacttagaaaaatgggcatgtaaagaaaagcgtgtgaacagagaagcgatctgggaaccttaccctaaaagcctggtggcgaagagcttgagtcaagaacatggcattctcgctagtaattatggctaacctttttggcctaagtttccccgtaatcgtcctgatttgatcgagaaggtcaacaaaaaaaggggtaatatcgctctcgaatggctcggtgaatctggatgtggctacaaaccgatccacttgttggaatatgttttacc

SEQ ID NO: 297505 - DNA, 11561 bp, Cannabis indica
tttgttctcatttctaaaaacaagttttttaaaacaaaaaacagaaaacaataccaaacacgctataatatttcacattacctttcccttgttagcattaatccattccaaacaccccctaagtattaagtagcagtagttttgtagtaacagccacagtggcataatacgtaaataagttaaaaaagtagtggcaaaagtaataaccaccctcaactcccatatttccacttcatcttctttctccttcactctctccaaaaacaacacaacactttctctctctattttgctttactccctttctttctctctctactgtgttgaagaagaaagaagaagaagaagaagccgaagcttttttgaactgaatcgattttcagattcttcgcttttttctctctctgcatttctctatcagtctctttctctcacttaccgaaaccaccaccaacattgacgccatcattctccgctaaattttagcggagtttgtagggtttcacatcacattctcttacttatgccctaaattgagtcctagattggctaatctgagccagatctgagcctcgaatcatcagatcaaacactcgtcgtctgtcgtcgggaaaccctagtccgtttgctccgatggaggaagctctcgaactcgcgcgagccaaagatacgaaggagcgaatggctggtgtagagcgactccatcaactacttgaagcttctaggaagagtcttagttcgtcggaagtgactgcgcttgttgattgttgtttggatcttcttaaggataataattttagagtttctcagggtgctctgcaagctcttgcttctgctgctgtgctctctggtgagcacttgaaattgcacttcaatgctcttgttccttctgttgttgaacgattgggggatgctaaacagccagttcgtgatgctgctcggagactcttgctcactctcatggaggtaggtttttgtcctttacgctatttctgcttactagtgttgcatgtaacttgagtatttttaattgtaattgcattcaagagagcgtaaaatttgatttgagttttgttttcttcttctttgtttttggtttgttaacgttgaatttgatgtggaacgaagattttttactttataggtggactggcattacaatttacatttaccattgttattttcttaatttagtaatagtttcgatactatggtttcttcaggtttcttctccgaccatcatagtagaacgagcaggatcatatgcctgggcgcacaaaagttggagagttagagaagaattcgcgcggactgtcacttcagcaattggtcttttttcagctacggagctccctcttcagcgtgctatacttcctccagtatgttcattgactatcattggacaatacatttcctcttttagtaatttttatggagcttgtgtgggacaaaaaccaacctatttttttttcttatcagattttgcagatgttgaatgatccaaatcctggtgtcagggaagcagctatattatgtatcgaggttagtggtagtgaatgataatgatattcaatattcagatcccacttatcctgattcctgaaaatacaacttcattttcgtttttcaatgttgaagaattcaacacatgtatctggagaattgattttagtttactttatttttgagaatttctttctttcaaattaagatttttctgttaaaaaaatttctaagatgctaatattcctggtttttattttatttaattttttatattaaaaaaacatattatatcaccttttcataccatcttatgtatcaaataaattgtcatgtctcaaatctcaattgatgaattaaatcttatcacaaatatttaattgacattcacaacttacatgccatgccacataaggtattaaaaaggtttaagaagaggtgggttccttagcataatccattctcaaagggtttttatgctgaataatacttgaagaacaggaaaggctcaaatgggattcatgtaaataactcctgtttatatatgtttcacttctaccttcccatgcagccatgctgtggtgtttggttagtgaaatcaacttttgaaagcactcaaaactgattactgaagagcaatgtatatgagtgtctggtggatggatttcgtaaagtatttaatgcttatttaatgtctcaggagatgtatacccaagctggcacccaattccgtgatgaactgcatcgccaccatcttccatcatctatggtaaatttctcttttcagatttttcgtgttgtgaaactgacaatatgtttctttctgcaataattcagattaaagtggcacatgcagtttacagtttcaattgaggattagtttttgcaagttcatagtgcactgttgataaagtattaaattgcaggtaaaagacattaatgccaggttggagagaattgaacctaaagttcgttcttcagatggacatggtaacttccctacaggagaaaataaaaatatgagtcacaaccacaagaaaagtagtccaaaggcaaagagcacggcaagagaagtgtcactttttggaggtcagtatctatttattgatcatttaatggatgcctgcattacttacgcaatatggtccgcaaaattcgatcactttataaattgaagtgatttgccacataagtgtgtgtacatatcattactctttaggatttattgtaaagtgtattccccttcgatgcaaatttctattgtgtaatgagtaaggcttgcggcatctaatagtacccagcctaacctgaattacaaatggggcattgtacttgacacctgtcaagatttgaatatagtcagtttgaaccaacttaatctggaaatgcttgggttagatttggtttgaataaacttggggaagcctggatttgaaaacataacgagcaggcaacacataacatgaactttacgattgtatttgctattagagttgtgtttaatcatacacaatcctggaaataaaattcatttgtctgtactagttttattcgaaaccatgttttcatgtcgtgatatttaaatgcagatgaaagtatcacaagctatgcacgatatatgctttgttgtaaagttgttggttttattaagtgctacattgattatcattcaattgatagcaccgactctttgttgcaggagacgatgttactgagaaacctgtagaacctattaaagtttattcggagaaggaattgataagagaaatggagaagattgcttctactcttgtgccagaaaaagattggtccgtccgtataactgctatgcaaagagttgaagcccttgtttatggaggtttgtgttgccttttttttttctcttctttttaatctctgtctctctttgctattagtgtcattacatataactttattagtggggttggggtgagggattgaacccaaaacctcctctataagaggagatgtattgtaacgcgtaggctaaataaatcctctcaactttcttcccttcttccatacagtcgagttggcaacacctataggaaaggggggaaatacaaaattaccaaggggaaggaagatattattattatattcttttttgttggccccattattatcttttgttgaatatgaaagtaattagtatttggcttttttttttgttgggggggggggggcgaagtaatttttattaggttgctctatattgtttttgttatttaaaagcattatattttgttatggttaacagttaaattttatttcagatttcttaaatactcttttgcttaaaatgtaacaagtctagtttcttaggttctcactttattttcttaggaacatgtcatttaatatagaggttttgtctatttttattattattttatgccatcatggacatgttgctaaaaagttagcttcctgttaaggtccaaataatatgttgcatctttgtgtaaaatgtaaatgatgctgattactgacatcactatattcttccttgattttctgcataccatgtttttgggtctgtccacctgtgaactagcatggggcttgaaagagtttgatatgtttcaattaagttatttccttatttgcttatatgttattatttttcattaggtgctgttgactatccatgctttcgtggactattgaagcaacttgttggccctctgagcgtacaattatctgatcggaggtctaccatagtgaagcaggtctgctaaaccgttttagtttccaggactttgcttattggtttcttcctgtgcctcaagccatttttgagtgatcctgaattgttccaacttccaagtattgcttgaacaactttttcttactgtccaaatatagatgtctttttcctgtgaacctcttgtgctatattataaaaacaagctcactttactttgctgtataatatttttaacttgttaatttttcccttcattactttatgtgggtaaatgtgtgcaacttccttttgacagaacaatctaggattgggctgtccttttttgtgccttttttcttgcacagtaacaggggaaagtgtggaaatttaataaacagtgatatgcaaatccaaagcaattgtctatgtttgttccttctcttagtattttgtcagttcattcagtttcatcctatctgatattttcgtttacatgctattttgtccctgttaattgaaattttcttgtattccttcataggcttgccatctgctatgctttttgtcgaaggagctcttgggagattttgaggcatgtgcagaggtgtttattccggtaagtttcgatgttttcttgctgaatatggaagtttcttacatgttagaaatatattattaatgatatcatatggtaatcaggttcttttcaagctggttgtgatcactgtacttgtaattgcagagtctgcagataactgcataaaaacggtaatttcagttcatcaattttatatttacatgctgtatgttctctgcatttatttttctgctacatacttctttgcaccttatcttccttgattttcagatgttgcgtaactgcaaagttgcacgtgtgctttcacgtatagcagattctgctaagaatgaccgtaatgcagtgctccgtgcaaggtgtgaatgtaaacaaacttttttgagcaaatcgatttatgattgtatagtttcattaactttatcttccctattgcattaggtgttgtgaatatgcactattggtgttagaacactggcctgatgcccctgaaatacaacggtcagctgatctttatgaagatcttataagatgttgtgttgcagatgcaatgagtgaggtatattatatcttatactttataatttgctaatttatttggatttcatttggggtcatgtatgcttttgttaacgttgaggggattgtttagcagtcaagtttgtaaattatatgttcaacagtcatgtgtagtgtgcgggttcaattgttgaggccgcgtaactggtgaataaccacgagttgcatgccttttcaaattgtgtggggtttcaatttttattttttttcttagcttgcctggggtatttgaggatcttgtggaaagtaaatgacattatttcaaatatattatatttcaaatgctatgcatgcttttttgcagtgtgcttttcatttatttttaaagaggattcattcatagtttaatcatcttgcttgatcatgtaaggtcaatgtgtttgtgtatgtatatatcttctatcatatatggactagggattattttcttatcatgttctgtcaagttatatttttcactctgtcaattaagctgtacttttttcttttctttttcaactggtggatgtgttctttatatagggctcatatattttgcagcttggttcctggttagtatactgagcaaatagtagccttaaataaccttctcacggttagcttcttgaaagttttttttttcctttttggttgaattcgataggtacgctcatctgcaagaatgtgctacagattattttcaaagacctggcccgagcgttcacggcgcttgttttcatcttttgatcctgtcattcaaagggtatttttgtgatttgttatggatgcttctacattctcggcatacgctttgttgtctaatatgattttttttttctttttccttttcagttaatcaatgaagaggatgggggtatacataggcggcacgcttctccttctgttcgtgaaagattcacccagccatctgctccatcaagtttacctggttatggaacttctgcaattgttgctatggacagaagttctactttatcttcaggaacatccctctcttctggactgtcacaagcaaagtctttgggcaaaggcactgagcgcagtttggaaagtgtgttgcactcaagcaaacagaaggtcagcgctattgaaagcatgcttagaggtttggatttgtcagacaaacataattcttcaacactccgatcatctagtctggatctaggtaccttataactttgcctacctattagtgctgtttcatctagatgtcaattgtaattcggttaaatgtagtcatgtggggacattgccatattttggttgattgggttcataggtgagcggctaaatttctctctttttgcccctagtgcaggagttgaacctccatcagctcgtgatccaccattccctgctgctcgctcagcttctaataatctctcaaactctttaatgacagattcaactgcatatgctaccagtaaaagtagtaaccgcaatggtgggctggttttgtctgatattatcactcaaattcaagcttccaaagattcaggtaaattggcgtatcgaagcaatgcctcaaatgaaactctgcctggattttcatcatatacagcaaagagggctcctgagagataccaagagcggagttctgctgaagaacatgagtttagggaggctagaagacatatgcatgagaggcagtattcacctcacagagatggaaacttcagagattcacataacagtaatgttcctaatttccagaggccactcctgagaaagcatgttgctggacggatgtctgcaagcaggcggagaagttttgatgagagccagctgtctgttggggaaatgtcaaattatgtagagggtcctgcttctctcagtgatgccctaagtgagggcctgagttcatcttctgactggtgtgctagggttgctgcattcaattatctccggtctttactgcagcaaggcccaaggggggttcaagaagtggtccaaaattttgagaaggtaatgaagttatttttccaacatctggatgatccccaccataaagttgcgcaggcagctctttcaactcttgcagatattattccatcttgccggaagccctttgagagttacatggaaagaattttgccccatgttttctcacgattaattgatcccaaggagttagttaggcaaccttgttcaacaactctggatattgtaagcaagacgtactgtacagattctctgttaccagctttgcttcggtctttagatgaacagcggtcacctaaggccaaactcgctgttatcgagtttgctattggctcctttaacaggtattcagctaattctgaaggctatctcaacagcggcatcttaaaattgtggctttccaagttaacaccactggtccatgataaaaacactaaacttaaggaggctgccataacctgctttatatctgtttactcccactttgattcaacagccgtcctgaatttcattctaagcttatcagttgaagaacaaaattccttaagacgggctctaaaacagtatactcctcgcatagaagtagacttgatgaactttttgcagagcaagaaagagcgccagcggcctaagtcctcgtatgatgcatctgatgctgttggaacatcttcagatgaaggatatggtagtgtctcaaagaagagtcatttctatggaagatactcttctggttccgttgatagcgaaaatggtaggaaatggagttctacccaagaatcatcagccttggtacctagcaactatggccaagtagcttccgatgaatttcatgagaacttgtatcagaattttgacgctggctctaacactgatcttaattttaaatctaaggattcaacttacaacagtaattctagtgggcagaacctggcctccaggaccaatgtgttggaaagttttgacaataatgtaaatttagagcgttcttcaactcctcgacgggatggtcaggatctgataggcttggatcatacgggactttctgaaagcattggacatgataatgaagctgcctctgggttggacgttcatgatcttaaacttaaatctgcaaaggctagctcagtgccggaatcaggtcccagcattcctcaaattcttcacttggtgagtgctgatacaagatatttcctcataattctagcagtgtaatttttttaacacaaccgagaatttctcaagttctttgcttcattcaagtttatctggctcagaataccatgctgacaggctatcataagttgtaagatgacatttaaaataaaaaaataaaataatgatgtatatgattattcatagatttccaatggagccgaggaaaacgatggtgcaagtaagcatggggcacttcagcaattaattgaagcttctgtggcaaatgattactctatatggactaaggtttgtataatgatgatgtgtggcactcttccatatctgtctattatgctgttgtactcttcctcttagtttttctctatcattaaataatatggctctttttatttataacaaaagagggctatcctccattaatttatattatgacttaaatagatttaaaaagaaaaagggcttctttgatagtttattttagattcttttccatatattatatcagactctctttcatataagttttatcatgtatatgtgtgcactcttcatatcactaaattctcttgaatttggtttgagtataggtttgtacttgtaggatctactagcctcttctgtcttatttctataatcaaataatatcaatatttggaaggtgtattcaatatcatatttcagtagttcattcctttaatcttaactaattatttgtgatagacaagtaattacttgaatttattgattattttgtaagttcttatttatttttgttgatgttggaattttagtttgtttttggtgaagaaaatgtaacttgcccgcactgatagtttcatgttatttctgcagtattttaatcagattttgaccgttgtccttgaggtgttggatgattctgattccacaattcgggaactttctctttcattgattgttgaaatgcttaaaaaccaggtttgttttactttctgtagtaatggccaattgtatgtttagcattttattccgaagtattgtgaaattttaacttataaaactctcatggactacagaaagatgcaatggaagactctgttgagatcgtaattgagaagctgcttcatgttacaaaagatacagtttctaaggtaattactttgcttatatgtaactgtaatgatgtgtgtgcttctataaatgtttcatattttaaaactaatccgtttttgaacaggtgtcaaatgaagcagagcactgcctgactattgttttgtctcagtacgatgcattcagatgtttaagtgtatgtatcctttactatatttgatttcaaccttagcgtttaagttgagtgttttactaacaatcacaaataattgatttaagttctcattttcttgtctttttttatggtgcaggtgattgtgcctttgctggtaactgaagatgagaaaactcttgttactagcataaattgtcttacaaaggtatcccttgtcttataaagtaccgaaaatgtgtttttaattatcaaattaaaatttccatcttttaaattatgtactggcttttctattataaaaaattgtcttgctaatcccaatttgtttttacagcttgtgggacggttatcacaggacgaactaatgactcaattaccgtcatttttgcctgctctctttgaagcttttggaaaccagagtgcagatgttcgtaaggtaaataagttaataatatatctcaaatgttgacaatttcttgctagaactagttccagacaagtgttagctgccgtcattttgattttgatttatgcgattgagttatctgattattgacctttggtgatgcggtacagacggttgttttctgccttgtggatatatatatcatgctcgggaaagctttcttaccgtacttggaggggctgaacagcacacaattgaggttggtgactatttatgctaatcgaatctcacaggcccgaacaggttcagccatagacgccaaccatgcttagatggtttgctttccgaaaaaaagagggagaagaaattgtgggtttgaggttttgatctattctattgtgtatttttgtatatggtgtgaatgcattttgaaggtgggtttgtcactttgtctttttactattctttaccaaatatttttgtaattcttttttttttctttctcttttaatttcccatggtttgttttgcttggtggcagagagtgcttttattgggacaaaatatattgtttgttgtaatcgacgatacaatttgcccaacattatttataacatagatgaagaaaggaggttttggaatgtccttttttgaatcttaattttttttaatttatagttttatttgtacaactgcaatgtttttgttatattcctatggtaagattttgtgtattcaaaaacgaaaatggctgctgttacattctcagtgagggagcttggtttgctactcagaacagcctaaatagttgaggaaatgtttattttgtacaaaggaacaagtagtaaaattaatctatctctgaacacatctacagaaaagttactaatattatgtttgaaagctcttggttttcattcaaaacttatttcgtaagaaaaattctatagttaaataaaatacaacctatggaaaacagttaaagttaatgttaactgtttcctataaagtaacatttttgtaaaaaaaaaaaatcacattttttaaaatttgtatcttaaaaactataaaataaaaatttctcaaataagcacacaggaaggtgagcggacacacctctataaatttataaataatattttttagttctttttttttttataatataaatttatttttaatttttcgtcaaaacggaaacatatttgatattttatgaaggctaattaagatttttattccttgaactttgacatgtaccaaattatgtcatgtgaatttttaaggtcgttaaaaatatctgagaactattaaaattgttggatttaaggatttttgtctaattttagtaaaaaaagtctaacatggatgaaagttcaaggagcat

SEQ ID NO: 297506 - DNA, 7304 bp, Cannabis indica
tagccaaaggcattgagctattcgtctttgctttacctctatcctcttccaccgctttaactatcccataaccccatttctttttctctctctctctagatatatatatatactaaattccctttccatttctggttctgtaattatcagattataaaccctcattctgagaaggataggattagtcaaaggagagattaatctctatttaattttttaatatattataaattatatttttgttgctttgttttgattctatggctgcgggtgctgagatttccggtgaggtagctgcggcagcggctgccaagaacacaaagcttgaatcggaatcggagtcgtcgaaatcggaatcggaatcggaattcaatgtccagaaactggttgatatgttcaccaagctgaaccctttagccaaagagtttattccatcgtcttacgctaagcaacagagcttcaacaacctcaacgcaattaccaccgatgagtctctcttccccaacaataagcttttcccagatgataataactcaattaacagaagggtactcattattcttaattcattttttttaataaccgaaaaaaaaaatgaagggatgggatctctcccttgtgttttcgaggaattttggttttgatatttcgtaatttggacctttttcgctgttgatttctgttgaaatgttgatcgaattgatgatcgatttgcgcttggctaatatttgactttttcgtttgttagttactgatatgattggttaattgattctgtatgagagctgttgtacaatattatgatttgaataaaaacgggctgagttatctataactgaatgtgtcgcgaaatgtgtcggttatgggttttccttggtttttatttatttattattttttttggaataaaaaagtgagattttgaatgctgtaaattttgattatcactggtacagctcaagaaatgtgcttgaaaaatttgaacttgtatccagttgatgacgagttttgaagaagtttcttatgctaggaaaacttagttagtagtgtgctgattaaaagtttgatagggtattgctcggtattgacattgactacttataatttacgtttttcattgttccaaatgatagtgctccaggtcttgtaagctttcacatttaatgcttttgtgttttctttcttcttgatgtatatgctgacccatttatttggtttccagagaagaaataacttcaatcaggggaggcgaaggttaaatggaagaagtttcagagctcagagagacaacagtattagacgaacagtatacgtttcagatattgatcagctggtaataattttatttaggcttgggttctttaatcttcacaacctagaagtatgtatgcacattcatacccacatacaattctatgcactgattttttatatacatatatgtgtcaatatattattaagtactcttacttgtgtctgcattttcgtttcttatttgaaacaaacagaccctaagaagaattgttttcttgaatataggtcactgaagagaggcttgctgcattatttagtacatgtggacaagtaagtgatattgcttatcagcttttgatctccatgcttttttttttttcttctgtggggattttttgggacgcgtttaaatcactgagtaagtgctaccaaaataccagttttctgtgctagatttgatatgcagcatatgctgatttggctttgtgctggttttgtgctttccaaacagtttgataatttagactagacttgttctcttttatatgcctgaatgccagcggagactgttatacttgtcattgaatgtttgtatttgaaagatttttcccatttgggtatttctgaacttatattcttcagagtgtaacaccctggcattgtctatttgtcttcaaaatcttttgtttaattttgttcctagtgcattttgattgtggtaggcctatgttgtcacccttctagtttctcatagtacatatattaattcctgattctgaggttgatacttgatacttaatagtacttgtcaacttgctatttataatttcataagacgatttaccataaaactactacttgtaaatacttataaattatcatgatggttgtttttagagatattagcatttctatcttaatgtgtaatatgactgagcatttgttccttatagttgattatcaattttagtatgtatttgtaatttcctcttttctctgatgtatggtacaacactagctcaaatgatcacaattttctcttgatcacattggtgtgctatgttctttttgaatctttgatggtgatatattcctcagtactgttatataatttcccattggaagtgaaataattggtactaatggcgacatatgcaaccactttcagtattattgggaagcaccccaactatccaaagataatgcttttcttttggatgcatgaacctctgaaatgagacatagtgcatggctcctaccacaaacatactattcatatcggaggagaaattacttttcaaagttgttatggaacgtgctaaaattgctcaatgttagttgaatatgattgttctgatattatgagataatttaagtctagggattgtttggtgggcatgattctaccaagaggatagactagtccagtcttttggtaggtggtgagaataggtgggacaatctgaaggcttccaccctctccttttccatttcccaataaatgtgggtccctatttttttgtgtgtaaattctcccataaaatgtaggctccatatttatatttatactatacattttcatgtggatcccgtgaatttgatttacatattcaccttaacagtctagtgctaacaaaatcctaaacaataatcctttcccatccctaccaaatgagcccttggaggctaccttggctaggtggccatgaatgcctttatgttatgaaaatttggtcttgattatagttctggtataattgttatttctattcaattaatcaatgcacctcagtttaatttatgatgcatcttttactaatggcttccctggagaattgttggtggcaccttgagtaatttgtgttttcttgttctttgtgctggatatgcttgtgtgtttgccttatattatttggattcgctctatggttttctttcctagttatttgtttaataacattttctgtatttcttcctttatgattttttattggaataaaatttattttttaaatctaggtttagtaattattttggcttttactggagttttatttgatacagtacatggtttcatgtttgtacttatgttgtaattcacatatatgaaggttgttgattgccgagtctgtggtgacccacattcagttcttcgttttgcatttgtggagtttgctgatgagcgtaagttcatcacaatttattaatttatttacctcatttttttttatatatttcactcaaagaaatatattatgggtgttgatttacaattgtttatgttacctttaatatgcacaaacagatggcgcaagagttgctcttaatcttggtggaactgtgctaggatattatccagttcgggtcttaccttcaaaaactgctatccttcctgtgaatcctacattcctccctagggtatgtatcaagtgattttgcataattgttcttgttttaaccagcaggggaacttgaacgcactttctgaaaattgtgtaatgatttttctttttaattatttttttttgtagtcagaggatgaacgggaaatgtgttcgaggactgtttattgcaccaatattgataagaaggtagacgatgagagctgttgtacttgttatattcattatgtattcatgcatgtctatcatatcccacaaatctacctacttaataaagtaatttgttaatgcaggtttcacaatctgaagtcaagagtttctttgagacagcttgtggcgaagtagggtcattttaaaagcattacatagttatagatggatttatttattggtcttttttgagttccatatattagtaaaaatttatattatcatgactcactgccaggttactcgtttaaggcttttgggggatcatgtgcactcaactcgcatagcttttgttgaatttgtcatggtaagtttgagacttcactatggtccatgtggctaaatattatgttatgctgtatttatgatgcacgaaagacagtgatcttatcatttgacttatttttggaatacactttaattcttttaactgtttgaattgtatggcccatattcgtgggtaaatcctgttcatgtcaacagttgctttcgatggatgagacatggatgttccacttttaggaggagatgaaacattatacaataggctaacagtttgatggatcatgacaactacgtgtgtttagacagattatgcttccaatccccttcaagagtaaaagaacctttcaataccttgcattcattcatttcccctcccttctgccccattcccaaccaaaagaacagacaagaacaaaaaagaagataggactctttccatctgttttcactcatctaggttccaatgtagtttatccttgcaaagttcatctcttggggaaaactgtcataaaaccactgcattttctctatttgggcacgatccattgggtttttggaaacataaaaaagtcagttatacgttagccttttttttttcttatgtcgttagtataaaagtttatccttctttccttgttcaatatgccttaggtttcaatgttaaattcagcacttctgtaggttctcatttaatttgatggacttaaaaagtgtcacttcacatcaagattcaatgaaaaaaatcttaattgtgcccctgaacacattgtaattcatcacattcttctcaattttcagtgtattattgttgtgctcatatttcggtcattttctttttccaaacagattcagagaatgcattctttttcttggccaaactaaaccataatagaaaatcaaacttctttaaaatgcattaccattttgaaatatttattttttgttcacccttgggacttactggttgatatgtttcaatgagcaggcagaaagcgcaatacttgctctgaattgtagtggaatggtcttaggaacccaaccgataaggtgcgaacaagtcaagctttattagctagaccttcaatttaaagtcatttgtctcttatctgtatttattttattcagggtaagtccttcgaagacaccagttcgatcgcgagttgttcgtcaataaccagtcttactaattaaggatcagtagatggaattcaacatagcttctcagctaaggaaatttgatgccttttactggttggtgaaacatttgtttctttccgtttatcagtcttttatgtagcaacagttgttgttctgttactctttacacatcggggcctgcttcaagtttgaagtttttacgggatggtttcgatcttgagaatatcacctgtttcgaatctgaatgcgcttggaaacttctctcggtatagcgatcatacttgtgctcctttacttagaaaaagcttttaattatcatccttcctcttggatagaaggtgtggtgttgttgccaccaagttccaagaacctaggtaccttttgtgccaatgcgcccttctatatttacgttttgtatttccttatgcatattgaacgaacaacttgcctgttatcaagtaaatttcgtttgacagcagttcatttaggttccttttgggtcataagacactggatatatgttgtatgtattgtgaacctttttaaagctctgaatgcccaaggtttcctcttaccatattttggtcagaataggtcgtagggaagttggctcagggaaaacgcatcctcgttttcttctgttatctttattttttacatccctaattttaaaacatggagatatggttagctcactcacatcatgaatagatgtcacagtaatggccattgtattgtatatgtgtatctcatctctttcataagaaattgaaacgttgtcagaagtgttaagttttcccaacgtcatccaacctgtgaatgtgaagttctctgggtcctgtttaatttttctttacttgcccttcaatgccgtcccctgacctctttcctttcttaattgtcgtttacaagttttcattcacccttttagaccttaatttttattttttattttcttcacgttattgtcttccagttttaaaatatataagagaattttctaaatatatatatgaaaatccttgtttgacgtttgtccttgctgtgctatattgcacgcttgtttctttttattttgttttgaataatgaaccttcattgtttttctcttttatacacaaaaaaaataattattttaaattttgtttttttttatactttaaattcttttaaaaattcaaaacaagttgtctctacctacagtgtacaatgtaaaattagatgttataatttctctctaaaattgaaatcagaaaatgttgttaaaggcccaatctaagaagtgtttcatttttccaaaactgtgcttggttattattattattattttttttttgtttgaaatgatttaacaatagaattggaagcaaagttttttttatttactttaattaatgtgtgtgttttccagggttcgaaaatataataacagaagacgtaccgaatttggtagcttaagctttgatatataaagaaaaaaaaatgagacatgaaaatagagaagaaaagtataactagagagatattccaacaaagaatataaagtagtggtggttaagcagtttgatgatgagacggggaacggtgcagaacaaattgaatatagcatgtattgtagatcatgatcactctcttaattttgtcttctcctttaatttttattttattttattttatgatgtatgtaaataagagagattttttgagggagatgctatgcaaatgtaaaatataactctacaaaaatttactcaagtagtgtgacaatatattaaattgtaattaaatgtcaataacaaaaaataatctaaattttaatcacaatatatgatgatgtaaaatttatatcataataaatattatgtttttatatttattattatgccatttttaatgagatttttttttataataaactaaaaatggatcaaatttacatttatgactccaaaaaaggaaataaacaaaaatagaaattaaaagttgttaattaca

SEQ ID NO: 297507 - DNA, 4901 bp, Cannabis indica
gcgtaggtcaaatgattgagaaaagctttgcactttgaaggaaattcttgcacaatatggccaaaactatatcgaaaaatgcaagtaaaatcaaaaaattttgctaagaaatcaaagaagaaaggacctaattctgcctcagatgtaatacgaacaaaaccaattgatgttgtgattggtatagctccattggaactgtcagaggaagaatatgaaccagatgcagctcagactgggaaaaggggctctggatagcaacctgagcttcagcaacttgtttaaacctccattgtctcctactgcttctctgaatgagatcaagagagttgatgatgctcgataggagtttctacagttcattcgagccaacgagcaatgtaacattacacttgctaaaggtaagtccccaattcctcatgttctcaaatttggatccattgtgaggaacttagaacaaccgtttaagcaatcagcaaagcctagtaaggttaagatcaccttggatgatattgaagatgaaatcaactattggaaaccttccattatgtggtacgtattgtgttcaaaccctccccttcacatattggaaggttttggaaacagggtatggaaagataaaattcacaaggtgaaaatgctaacttatggtatctttatcataagattcaactccattgaaaacagagaccgagttctaaatgggggatacattttcttcaatagacggcctgtgattatcaaaccttgggatccaaacacgattttcagaaagaagatattaagctcgctcctatctggatataacttgaggatcttgaccttaagtattggggtcaaaaatcctttttcaagattgtaagtcagttagggaatacactataatggttgataatgttactaaggagagggaacgattgaattttccaagggtactgatcaaaataatgatgaaccaggagtttcttgatttattcgagtttgaagatgaattcggtatgaacacacatgttggtgtcaagaaatgaatggaagcatgtagtttgctctcactactctggtatcgggcatataatagtcgactgtaagaagatttcaaaaggcaagcaggaatgggtggtcaaagaagataagaggaaagtgaagcctatagttgatgatgagggcttttaagtagtcagcaaggggaaaaagattaaagaatagggccagacatctaaaactaaaattgataatggatttcaggtgctaactgaaatagatgaagaatttaaggatgatgtaatgcagactatggtggggaacatgataacacaagagaggggggaggaccctctgttggttatggataaattcctagtctggaatgtccgaagagccaacaacaagaaaaaatagcaactcattagacaatttatcagatcacatgatgctggttttgttgggcttctcgagactagggtcaaggttcagaaacttgcaaccttgtacttcaatgtgttcaatgggtggtgcttctcgacaaatatagcctgggaccaagaaggaaagattgtcatagcttggaatcctttaagatttattttagatattataatatgcactagtcaattaatgcacttgaaaatatctgcaatagatggaaattatagcaactttctcacattagttgatggagctaatgatagtaatagcagaatggtgctatgggaagatctatgttcattggcaacaaatgaaaagtggctaatcatgggtgactttaaagccatattagctaaagaagagagagttggccattgggtgaattatcaaatggattctgatttcataagatgtatgcaacaatgtcaacttgaagatgtaaaggcaactgattgtttttatacttgctccgataaacaacaagggaaggataggatcttttcaaaaagaaataggatcttggcaaatcaacatttgtttgaccactatcctaatgctaaggaacttttcataaatgaaggtatctttgatcatacccctggcattctatccttatatcctaggtggactagtgggaaaaagcctttcaaatacttcaggatgtggaatacacatcctgaatattctacaaaggttttgaagtttagaatcaagaattcagaggatcaagaatgtatcaactagtcaacaagttaaaggccctaaaataagttctgaaagcgattaacaggtagggtttttttgatatacaagttgtgttttcataggccaaagtagagctagatgaaatccaagacaagattcaacttgaccccaataatcctgatctgcatagtgcagaagtggctgcaagggaaaagctgattgctgctcacaaaaactacaactttttccttcaacaaaggctaaagctttatggattcaaaatggtgattgtaattctgccctcttccatgccagcaacaagcagagaacaagacaaaatcaaatcttttcaattgaaagatggaataagagtgaatgaacttgcacaggcaacaaatgatttcatttcatattataaatctctgcttggatccaggatggcagataggaggaaggtttctagcaaggtgattatgagggcacatgttctgaatgagtcacaggctacattattgacaaaggaattctccatggaagatgtgaagaaggctttacttgagatccctgggaacaaagccccaagtccagatgggtattctagtttcttttttcaagacaacatggatctagtaggggaagatttattcagagcggtgactttttttctggaatcagggaagatactcaaggaaatcaacacagatgtgctgacaatggtgcccaatatcaaattccctaacactgtcaaggattttagaccaatagcctgttgcaatgttgtgtacaagattgcaactaaccttttgtgttctatgatcaagctaatattacctgatctggtctctacaaaccaaggggatttcattgaaggggggtttattgggcataatattatgatttgccaggatctagtgaagcactacgtaaggaagtcaaacaaagctaattgtatgacaaagcttgacctgaagaaagcctataataccattgaatgggattttgtggaggaaatgctacaggctcttaaattgccagaatcattcataaagttcgttatgaactatgtaagaactcctagattcgcaatcatgtttaatggctctatacatggtttctttaaagcaagctagtgtctcaaacagggggatccaatgtcccctttgttgtttgtgcttggaatggagtacttttcaaggattttgggagaaataggcaataagaaggacttttacttccatgagagatgctcaaaactcaagattaattatctggcatttgcagatgatatgcttttattttgtaaagggcagtttagaagtgtatattatctcttgcaaggattaaagcttttctcattgacatcaggtctgtagcgaaatcctcaaaaatctgctgtataatacagcaatatgccaaactatgaaattaataggatccctgcagcatctggtttttcttagaagatgacaaaaagatatctaggaatgattgctctgctcttgctgagaagatgacaacaagaatttgaacatagagttccaggaatctatcatttctagcaagagtagttttgataaacttagttcttgtggcaatacatgcataatggtcccaagttattattttacctaagaaggttgtgaggaatctagaatcaatcagtagggcgttcctgtagaagggccatcttgtgtctacagggcctggacttgatgcatgggaaactatgagccagtcaaaggcagcagggggattggattaaggaaaatacatgagttgaacaaggcaactatgggaaagtatatctgggccatttcaaataaagaggatagcctgtggatgaaatgtatacactgtgtttatatcaaggatagtgattggtggagttacaaggcttctgacaaagaaagttggtattggaggagccttgtagctttaaaagaccaattcaaagatttattagcaggccagcaagcaatgatgcagccatatagtgtgtccaagggattaaaacttttatggccaaactagaggaaagtgctctggagtcagcaggcctgggggagattgaacacaccaaaacacaactttattatattgatagaaattcaataagaactcaagacaagagataggttgttgaagatggggatagaagttgaagaccaatgtgtgctatgctctcagcataagaatccaactctcatttgttattcgattgtcctattgcagacatgcctacaggatgtcaagaattggctacaccagtatgctacaacaacttcattaccaaggcacacaggtggatagacaggtctaagatgagtaaatttaggaaacaagtgtatgcaacaactctatcttgccttgtgtatactttatggagagctcgaaacactagaatttgggaagagtcaagaatagatgcaggggcattaattagagaacttaagaagaatgtcatacagagaattagtctatgttggccgaagaaagttaaggaagatgatagtaggtggtttcaaagtttgtaaataggaagcaaattatgtatgtaaggagttgatttggtatagtttatacctgtacagtttatgattgtattaggccctaaacgggtgctacttgtttgtaaaaattggtcttcagcatcacaaatttctgattattttttgttgttctaaagttgtaaacacgttatttgattttgttgcttttttaaacacgtttttttcatgttatttgtatgttgaactttagtggttaaaatttgt

SEQ ID NO: 297508 - DNA, 1819 bp, Cannabis indica
aaaaattatttatattttttaaaggaaaaataattttagacaattaatcttaatatttaatctctaaatagtgttttagtgtgtgaaattaatatgtaaataatgataaacacttgttttaaaaaaaatgtgaaacactataatattaattagaattcataatcactataggtataagtaaaaggccgccattaattaatattatatttgactaattaattaactcaattacgtgaccacgtacgttcaaataaaataaatcaaaaagagtccagattcttgtaattctattgtgtaaaatatttttattataattcaagagaatataattaaaatatataaaattcaataattttctttatatatatagtgtagaattcatactaattaattacaatgacatctttatattattattaattaagaaaactattaattattgaactagtatatcactctaagatcaacaagggtcctatactccaactaaatgaaacccaaaattaataataataagtattaattaattattaattatagagataatcgtcaatagaaatgctcaaggactcttcataggtgggtcccactgccacctcacaaccttcccacgttccagaacttgctcccacgtcgcctcccccaaaacagagtctcataattatccgaactataacaaaacgcaccgttttgaactccactagtacacgtcatcatcacattctgttctgttcccgccgccggcgaattattattattattattccgcgccgccggcactgaacctgtgcatcgatcgccattccggcatcggaagctgccttctgcactgacctcggcgacatgttgtccggaagaccagccgccggcaacatcattggaaagtttagaccgttcgatgaggttaagggtcttcgaagacagtaaaatgcaacatcgtgagccactgcggctgcttcggcggtggcgtaagaacctaaccagagtcgactttgggtcccccggaactctgatttccgataccccatttacccccactttcttcttcgtatacccttgtactttggaaccgagttgggactcgtagtactgctatcttccgagtcatgatcataactcatttttctataaacaaaaaagaacttcttttttattggactaaaaaataagattagttatttttttttgttaaactaataaaaatatcacagagttgaagaagtagggaataatgaaggttatatatatatagttttgaagaaagtcagcggtggaaactatagatgtttattagactctttataaagtcaaaataaattaataaataaaaaaagtgaaatttgttttttttttctttctccttttggagattgactttttaataataataaattgagtgtggcttaaaattatttatttatttgaaggctagagttggagatggtcaagattttcaagtcaaagttaataagaggagattaattcatcattcaatttagaaatactaataatataataataattcattaatcatattcattaatgtatataataataataataagttgagtaatggacggtgggttttacaaagacattatgtaggcaagttgagggaatattatttttttctaatattattaatattaatcagttaaaataataacatacaataaaatcaagatattttatctatcaaagatacaaattgaaattaaaattaaaaagaaaaacgagttaaataatcaactgctaattttcagatcatttgacaaaaaaattaaaaataaaataaaatgaaaaaaattacagcatcaca

SEQ ID NO: 297509 - DNA, 4607 bp, Cannabis indica
tttttttttattttattttgttaacaaagatttctggggtcatggtttttggttttctgtgacttttaatggagcgttgctaacatccttgactgtttttatttgatgagctattttatgtatgtttttttttttgaatatggttgttccattatggtctttgagacatgtaacagagttccctttttcctcatccattatttgttgacattgttcggattgtacaaatttcatggttcttttagttatctttttctttggaattgttttgtcatagatgaattttctttacttgttaatgatcaaaagctggatacccttcttatgttgaagtatttattctttcatggtcgttgcataatttgtttgtggaattgttttttattatgcattgttgtggaaccatttgtcatacttatatattatctttagcacaacgaaagtcagatgttaaactatataatattgttttctttgcttggccatggccgatcatttttatatggtacaatttttatggtgcttgtgctcgtccctgatttcggttgtgtgattaggttttcataatctgtagggaagactgtggactgttaatgtttcttggggactctattctaagctagtgtcagttattggctttggggttgtcattcttatgtgtattttattcactcaacaacttttgttgatgttgttggcgttaaattaagatactaccgtatatattttgcaggcgaacatggagtctccaaacgaaacaggctgccaggcaccagaatgccccatcctttgcattaacaactgtggcttctttggaagggcagccacgatgaacatgtgctctaaatgctacaaggacatgctacttaagcaggaacaggccacacttgcagcctcatcctttgatagtattgtgaatggcagctctagcagcaacgggaaggagcctgttgtagctggtgttgttgatgtacaggtgggacaagtggagacaaagattcttacaacagaaccagcaagtgattcttcctcgagcaagcttttggaaaatgtgaaacaagggccaagccgatgccacacctgtcgaaaacgcgtcggtttaacaggattcaattgcaagtgtgggaacctcttttgctcaagtcatcgctactctgacaaacacgaatgtccgtttgactaccgaacttcgggtcgcgacgccattgctaaagccaatcctgtagtcaaggcagagaagcttgataagatctaggtcatggactaagtaaaaattttatgtgtcaaattatgatgctttcttatttttctctttgtccatgtggtttgatataggaatgactggctggtcttgttaggtgtcctttatattgattaaaaatgcttatgccattataatgaggacatctttatgggaattatgtattcctcgtttagcattgacgatttctttgctggctcctgtgtgtaagttcttatttgtgctggtttgaaggaccattacctagtaatgttatgtcgctgcttggtattcgatcttcttctcttttttctctatatttgctctatactcccttatgaatcaaacctcaatgcttggcagacaatgtttatggtatgtttgggtaatttcagctattgtggcatgatgggtgttttttcttttcagggcatatctgttgtgtgataattctcacgagggggaagtgagttttaggtacataacatttgaacatatatcctatcctagtttgtgaaagtttcagattattggaaagctagttattttgatggtagttaaggttatgttttaacaattctaatcacattcatgtgtggttggctggttgtcaattagggaaaagaggtgataacctcccatgaaagtgaagtcatttctgttaaattgatatggtgtaaagtggagccttacaatatctttcatggaaatatgacttggacctttggtattttatagtttcacatcttctgattatacctggacaattgaagtgtttaagtatagaagtgttctgaaagaacagtatatacttggctctgtggaagttggcaaggctgagtttaatgttattatttaattatggattgaccctcttgaatgttcattatttattttagtcttttttctttccaataatttaataagccatattatcttcctccccaattaaagagagacaaccccacttgccacttaaattaattaatggtaggtcagccagataataataatgaatttgccaattatataatttagacagatagattatattatttcacttttaaatatatactggttcaatcaatatatctcatctttttagtctgttaagggcaagtccaatggagtggctagccttggtgcttggtggaggagagaagtgtgagattttgtgatataaatgtgataagtttaaaattttgagtgggttccataggtaacattaatgttgcttgcattaagatcaatttcaatgctagccaacaatctccacattatactaaaatataatattttctatttcattttattttttaaaattacttaaatactgaacatctctaaaaattattagcatattcatacattattatttacaatagatatatatagtaaattattaaaaaaataaagaaagaaaatcaccgtagcttggcagttactaccatggatgctttcacattttactcaaagtgctaagcacccttacaaaatgccccatcacgtgccaagcttctccgggcatgagttagaattcacaaaatggtctcagaaaaagtagagttggtagtgtttatagaaagtatgtgttgtgttgaggttaagtatgttacaaataaatgtcaaattcaaacttaatctattatcaaaaattagaatttaaactgtgcttatttgtaaatatgttaaatttatatgacttgtgttatttatttaagtttatttacttttttagaagatcgattacacaagagattcaaagcaaaagaaaataattaaaagaaatttaaagaggatatttttatgtggttcagatgtaaatgaattttagtccatgaattaatagtacttagcttttaacaatggtactttacacattatagagtcctctgtaaatcgtagagtctaaacccttttcacaatggcggtgatgccctatttataggtagttgtacacaatgggtccgactgatcaagaccaagtaaggaagattatttacatctttgatccacaaatgggatatttacaagtgtaacattgtatgagttgggcctgatggtaagagccatatcctaaaagcagcagtaaagttacttttcatagtactattgacgttgataggccaactgtaacattctaatggcggttgtacctttgacagaatacctttctatgagttggtagaggggacaaatccctggatcttacgggatcgtatcaaaggtgtggcacgtatgtgatatctagattgatggacgatcttgaatgacctttcaactttcctgcttggacatccttctagatcgttaacatgtctagccgcgataaagaagcatcgtgggagacatcttagtcatttgtgatgagtccgggagcatgagatcctttcggatccttgtaaccttctcaaagaaatgttacttcatcttttgttgttattctttgaagagttgattctttgatgtaaatctgataattgttgtcatccgggaggatgatgtcttgacctacccaaatacgaagtctgggtataaactggacttgttaatttcacaatagacgaatctacttcggctgaagatagatctgttgcttctaggccttcctaaagaggccatgtgtcatccaagtaaaagtacggacaacaattcaaaaaatgatcaactcattaactcatttataaaaaatttaacatattcacaatttttgtatgaaatttttttaatcatttaacacatgttaaatgacctatttaactaacttaatatattttatataatgaatataagtgtatattttaaagtaattatcgttatcatatcattcaaaagttatccgtttaataaacggttaaggtgtaataatacaaaaattgtcatcatcgtatcattcaaaaattatccatttacacaacggctaaggtatgatataatacaaaaatgacaatggctaaggtgtgacataatacaaaaatgacttgaactcattaagaaaaaactcaactatttttataaaaagccaatttcaaattgtattaccatgtatgtctcacccattgacactcctaaattgaaaagaagttcaatttaactactaaatccattattttgtggcaaacttacatacatcatttgatgtaatttaaagaagtgaactttttgttgttgttgacccaattcaacaaattactaatacacaaacttatggtacagaagagtaagccatgcgtgactaattgatgatggtagagtgacattgttatgttcagctttataacatcaaataatttggcactcttaccagtttttttactttattctttaaaatatcttatcaaaactctattttctttattttacctca

SEQ ID NO: 297510 - DNA, 10521 bp, Cannabis indica
agaaaccaggctgtttggaaaaaggacgatctgcataaaagaaaaaaaaaagatagcataaaacttcaaagggcacaacagcatgagaggccaataagcagtgctccctttatttgggcacatactacagatacattttattctatcaaacaataaagttacctgatccggaagattgtggatatataattgaaataggtacaggctgattatgatcaagaacctacacttgaaggaaaattattttagttggtaaagaaaaatgcacacaacccaaaaagataatttaaaacaacaaaacctgctcaggcttcttcacgtatacaacaccttcatttgtattagctgagacaccatcaatcttttcatcttcctcaatttctctcgaaatcatttcatgtctactaatctgcaacgaaacttgttcattaatcaatctcatttgtagaaaaagcaaaacagagacaatagaaaagaaaaaagataatcaatattgtggttgatattcccatgttttcattgccattcttccagatagttaaaccacatataatactagaataattaggacttttttcagaactttgacatgtaccgaattttgctcccaatttcaagtcgttaaaaattcttccaagtattaaaattgttggatttaaagatttccatctaatttcgttcaattttactaatagactcctaacgtgttgtttgtccatgtaccaaatcgtgcctcaaactttgacacgtaacaaattagccagatactaatacagagtgagcttaaaacaggaaacaatttaggtaaggccaaataagtagttcaaattaggaaaagaaacacaattaattgataatcatttctaacaaactatgaattgaacaccgaccttgcgaagtttcctgctacttcttgaatctctttctctatcacttctttcaggactggtgaaataaacatcttttgaaacccttaaatgaatatcatcttcacatttacgatggcaattcaagagatgatcccataacctaacccaaacaaaacaaaacaaggtttttgaaacaagaaaccagtttccttaagctaatcaagaaattaaagcaatcataataccagcttacgaattcagcactccgattaccgagaaacggctctaaatcatccctagcttgaaactgatcctttccattacaaatcatcaccgtaatatattcctaaagaaatcaatcaaagaaagtacatcaaacacagcatgaatttctacgaaacattcattttatcgatgaaaatgatgatgacttacagcgagaatttcatcggcgaattcagcgtaaaaatcaagaagcgtggtggaaatggaagatttaagattggagataagtgatgattttctacggagtttgaaagagatgggattggtgaagtaaatttccataccgaacagggttgtgttagggttcttcgtcgtcttcttcttcttcttccctgttcccatggcggaatctctcatagctctctcttctttcttcttcttgcttttaaatttggagtatttatatgaagaggaatggtcttaaattaccattttgtccttttctttttccctcttttttcttttaaataaaattattatttttttatttggagtatttatatgaagaggagtgtgaggaagtggtagtaatggtgttaaattaccattttgtcccttttctttttccctctatttttataaaatggattaataaattttataaaagaaaaggtttaattaggatttttgctcctaaatcttgatatgtattaaattatttcttttgaattttttatactattaaaatttctcatatacttttgagattgttggatttaaaaacttctttctaataccattttattttactaatgtggcgattgtccatgtattaaatcgcaccctctaaattttaatataccaaattgtctcctgaaatgtactaaattgtgctccttaaaatttgattcacgtcagattttcgttagtaaaattaaacaaaaatttttaaatttaactatcttaatagttgaaagggaatttttaattgtctaaaatgttcggatggcatgatttgatacgtgttaaaattcaaaaggcaaaaattataattaggcaaaaacagaaagataaggttgttctccctaatatgagaaaactgctctattttgtatgaagagaagtgtcaaggggtacctcaaatgcctaatattgatattagtacattttaattttaatattaggtccatggctaattttgaggttaaatgtgccttaagaaaaagaaaattgacccctaagatgggtgggttctaggctcaccttagcttagggtcagtactaattgggtctcatacattttaattaaaaataatataaaaaattactaatcaattataaaaatattaaaatatcatatcagcagagtgtttgtatctaaaaataccaaatagcaataatttttcattaaaatgagataaaaattcatcagagaatactcacacaccataaaaataaaagaataaaaaataaaaatacaaacaaatacatagatataagttgatgaacccgtgatcatatataattctttcaacataatggaccaccctatctatatatgattggcaaaggtttgtttgtactcaaaaacttattttagattttgtaatatacaccatgattacaagtgtgattattgagttaatatattcttaaattttatgttttattgagttaatatatattttttgtattataaaatagtaaattataccatgtattttataaaattgtacaaaatagtaccttaagtttaattttttgactttttttttaatataataaatttgaaaaaatttcacgaacatatacaaaaaatgtaaccaatcttgtcataacacctctaaatcagattattattaagtttatttcaacaaaaaatcaacttgtggtaatattttgtactattttataaaatacaaaattaaatttgttatcgggaatcaaaaaagcgtaattggaagaggtatttagaattatttgatttattagatcttgaatttgaatttaacaaaacagaatgcccaattaataaattggataattacataaagcataattttttaaaaaaaattatatttttacgttttaagattttttcttttttacggttttatagaaacaacacgaaaataataagaaaattacataaaaataatatctaaacaacatcaaaataacaaccaaaaataacatacatataacaaaaaatcaacaataaaattaaaagagtacaacataaaaaagaccgtattttctgtaaataaaattataaaaatcgtaaaaatatttaaaatttcgtacaactgtatttttataatttttttttattgtttttgtctatttgtgaaataatcattgataaattttgtaaaataaagaattttaaatggtatttactctatctttttaggattttggatggagttgttctcttttaataattcctattatgttaaaaaaaaattacttaagatataaaaaggaataaaaatgttaaaagacatcagtaatatttagtattttctaaagtataatattagtattggtgcaattaagtatcgaattttatatatttaaattagggttggtcttaaaatttagtgggtcataggggaaaaaaatatttttgaattaaaaaaaaatgtagtattttttaaaattcgtaaaaaaaaatatatgtaattttaaaaatgacaaatttgttttgagcccctgagctaggtgggctctgggcacaggcctagcccgtctataccaatggccgaccctgacttaaatgtagtaacttgtatagtgtattactaatcaattgcaagacgttacttttaaatggtgttcaacaccaccactaatacctaatagcaatgtgaatgggaattggtcccctaaaaagacatgcattattattgcactttgtaaaaaaaaatgtaatatattctcaaattgcacacaaagacattggtatgataacactttcaatatcgttcccacaaatccactatacatgtttctaacgttttgaaaattaagctatatctaccatgcaaatatgtaatatctctaattaatatacttatatgtatatatatagtatagaatatcattccatatgtgtacgtgcatgaaaatggctaagaacaacaatattgcaaaaagatggaaagttttgagcggtgagaatgagtgggaaggtctactcgaaccactcgatctagaccttcgccaatacgtgattcactatggcgagagggcgcaagcaatagctgacgccttcatcgctgagaccaaatccaagaactgtggcctatctcgataccctactgagggcttcttctctcatgtagggttagacaaaggtaagcctaattccacaattaatgtactctagagaaaaagatactacattttaaatataattatgtttcgaaaaatgtatagaattactaaaaagagttacacttgatgtcaattagtgtacatattttttatattcaaagtttctgttaaataaaaattcttaatctatcactgaaggtaacccttacaaatatgaggtcactacttttttctatgctgcttatggagatctcgacaatggtgggtctgataagatttttaaaaaatcattatcaccgctatctgagactgagacctctaactgcattggctacattgctgttgctacggatgagggtaaggttgctttgggaaggcgagacatcattgtggtttggaggggtagcatggtgtcagaggattggactgctgattttaagtttgatttggtgtctgggaaggacatacttggtgcaactaacaatcctaaagtgcataaagggtggtactctatctacacggcgactaatacttccaagtttaatcgaaccagtgctcgcgatcaggtaattacgatgagtaacatattagtgtttgacactacatattgtgaatgttaatggtatttcacatcaaatttgaacaggttttctcagaggttaagagactaatggcgaaataccaagaggaggaactaagtataacagtgactggccacagcatgggagctgcactcgcaacactcaatgcagttgacatggcttacaacaaggtaaacatattttctacccaaccaaacaaggctccagttccgatcactgcctttgtctttgccagccctcgtgttggagatcgcgggtttggtagcgtctattctgatctcaacaccagcgggaactttcacatcctccgagtaaatgaatttcttgacattgtcccccaatacccttttattttccaaggctatgtcgacgtgggacagttgttgctcctcatggttctcaaatcaccatacattaagccattccttcatttggttgccactagaaagtggctaccggttcataatttggagctccatttgcatggagttgcaggaacacagggtgttttcggagggttcaatttgcaaattgatcgcgaccttggcctcatgaacaaaggaggagactttgttaaggatgagtatctcaaaattacaagttggtggattgagaagaacaagtccatggtccaaaacgacgacggatcatgggagcttgaggattctcaagagtaagaacagagaaaatcatcatatgataagctattatcagaataactagccatatttgaattgtgtcatgtattcccattaaataaaagctcaattctatgttggcattactatactaaataagaagagctccctatcaaaagttctaatgaattctcatttctagtaccatgattctctattgggatgaaaaggttagatgtgttcaaaagtctttgacaacatcatctaaataattaatgtaaataagttatattttcattattttgttgatgtttgatttgtggaacaaaaattcacaacttcacaaatattaagattttatttttttagtttttctgagaacatttctttctcatatcagcctcacctttgttgttgagacctataaattggctaaagacgcatccatctatggtgtaacgtagtaattacccttgttatcttaacctttatcaattctccttacaaataataaacaaaaaagtcatatattgagcaaaagccataattttttttccttcatttcttattgatggtaatagacaacaatgaaaaagcatgttccaaaatttgagcatagaattacaagaaatcttagtaattaatcatgttcttccttcgaacctaatcaacggataagattgatgcctcaaacttgacttacagctctaatcgacccgcctattatacaactacgataacataaagcggtgagcgaaagaatacaaatcaaagattcacacacagaaaagggttaactctataccttctaacatatctgcttcacttctttcaccttctcaaaatccggggcactgaaacacttttctacctcccaagctagttgagacatgcaattgaatgtggatttcgcgcccttctcatctgttacttctgcgggaaatgggattcgaacctcgaatatgcctttcaaaggagaccaaagacgcatgtcaaagcctaaccgatcaatccatataagctttgcttcagaaacctgccaaaccaatttgaaatatcatgagagaattcagactaaattagtgaagacaaagtgatgtaaaacatgaaattcatggtaacctgaaagttcaaatcagcatagacattgcaaaatcgattgacatcttctacgtgattcgtgttaatctcattcactagattttcagcaaagcatcgaagaggatcaggctgagcacttctatagtctgaagaatcgacccacttgccaacctgaagaaatggtctaagatgtcagattgctttcgagtcactttcaaaaaagtaaatcgaccagcactagcactactttcgggagcaacccgaaatatttcagtagctatatacctctatcaaatgttctgttattcaatcatgaagagaaatgtgattgattctcatattgacttgcattctaaattataagagaatcaatttaaaatgattgaatttgagactaatcaaagtggcatagcaacttcaaatacaaaatataaagcacctaatattacctctttgaagtcttccatttgaagtacccgttccaccgagacaacgtatagaagactttcatcaacttcttcgccatacctcttcttccaaatcgagttaaatttctgtaaaataatgtattgagcatcaaataagagaactaatacacaaacataagtttataagcttgggcattgtggttagaaggaacacaaatattcttctttaaaacaaaaccaatcttacataatcaagttacataaaagtcaaaggtcaaacaacactctcaataataatatctattccatttgtgttaaggcttggggtattaaaaatccaaatataaccccctttctttttaggtggacaattcagttcttgaaagttcaagaactatgaatttaagaaccatgaaaagctagtttattgataagagtaagaaacacagatacaaaatcccaagttattcgagaaactctgtaaactctccaagcaatattttactctaaataactcacacaaaattcgatacccctcataagaccctatcttaggatttataggctcggctagcaaagactccaagctatccaaccaatagcaatctaagattatttttctaaagaaagaaagaaagtggctacttgtcttaaactgacccctcacccgttatgtattgaaaacccttacttgtagcggaagaaaaccgtggttacataagttttagcataaaaatactaaaacatacagtatcgaaaacagctcacaagtatataaaatactcatttgccccgaaatataagaaaaaattacaccaaagttctctattctctacttaaatctaagaatgagaatttcgaattaagcacactaaacaatcatatcagccactaaggacttgacaactcagcctcgaaaatcctaatcaattatactacctagactaatatgaaggcgtaacacatatccatacgcaagaaaatattcgaaaactagaacaatttacacaaccactttgtttaaagttcagaaatttagaagagttgtacccaaaaaaaaaaaaaacacctcaaacagggataaaaaatggagtaccttcatagtcttttcgtcgtctggtttgtcaatgctacctaatatggtacactgaggagtacgcaatccacattgttccaactgtaaccaagaaattcacccattacacctaaaaaattcacatccaaatcaacaccatccactgaaaataataggatagccctcaaatatttgatcaatcatatataaagaacagaaaattgaagataaaaaaaagcttctttgagacaaccttgatctccacaaacagaaatgcaaggaaaacagctaacaaactctattttcatgacacaatatacactacaagttgagcatgatatgatgtgacatacatatagaggaaaattctaaagttaagagagaaattataaaccaattctttttatacaatggtgtaactaatttgaagatgattttatttcagaagtgagcaactaatttgcaatgacacacctctaattgactactacaatcacctttttaacttctttgagtgttttgtaaacacactaaaactcaaacgaccataaacttacactgttcgatcacaatggtcgcatataataaattcaatatggttatttgtaaattttacactttgatgttgttagtttgggaaattctccaatctaaaattatgtgaaatactaaaatttgcaaaataacctaacttaactatggtcgttttgcgattataatggtcgcaacatgtaattcatggtcatttaatgattgtaaaaactatacaaacaatagtaaattcagaattaacaaaaaactaattgagaacagcacctgaacatggagactagatttggtatcaatggagaattgactattagagtcattcaaacaaagaacaggtgttccttcagagtcaacggcaaaccgaaccccaatacccaaaggccaaccctcttgagtaatcgccgaaagggtcccaacagaacccaattccataattgttctcgaaacctcagctggaaatggcttatgggttttcaattccaaatgggtcggttcagaaacagtcgaaatcgagcatttgagagttttgaatcgaattttacgaaaagggtttgtttttgagacattgaatttggatttggagacgggaatagagcaatggagtgagagagagaagtgggttgttgttgttgtgagagattgggtttggagaagcattttaaaaatacagtctttgaaattttggattgttcagatgaaattttttgttctcgaatattttgattgaataggttcttggggttgatgattgatgacaaaaagagaggaagagtgttgttgaaatgaagactgtgttagtttgtacgaggaaaagggttaaaggttgagtcttggtgaagatgatgatgatgataatgataacaatagcagaccgaactgaacagaaacaattgattgaaaacgacatgggactttcaaaaacgacataaaattagaaaaacaacaataattggagaagacgacataaattgataaaagcgacatgatacattcctgaacgacatatttctcaaaaaaactaggaaaacgacatcaaatgcataaaacaacgataaacgtgaaaaacgacaataatgaagagctcatcaaagaattaagaaaacgacacatttctgaaaaaataaaactaagaaacgacatcaattgcataaaacgacgatgaacatgaaaacgacaataataaagagctcaataataaattcagaaaacgacatatttctgaagaaacaaaactaagaaaacgacatttgcataaaacgacgatgaacatgaaaaacgataataaattttgatataacgacaataatgaagagctcatcaatggaataagaaaacgacatcgattgattgaaacgacaatatacatgaaaaacgacaataaatctcgtaaaacgacaataataaagaggtcatcaatgaataaagaaaacgacatatatctcaaaaaagaaaactaagaaaacgacattaaaactcgtaaaacgacaataataaagagctcatcaatgaattacgaaaacgacatctttctcaaaaaagaaaactaaaaacgacatcgattggataaaacgacataaaacttgtaacaacgacaatattaaagagctcatcaatgaattaaagaaagagtaatttgcggcaaaaccccctcaactatcaatttacttacaaaaaaccatccaacctcatattttg

SEQ ID NO: 297511 - DNA, 2283 bp, Cannabis indica
aaataatttccaacacttttgtcggcgcataagtaggttttcttgtagtgttaccttcagttatgacagaggcagtaactctatgatgctgcttatcaactagggtctttttgcggcgacggtctccatgttttgcttgagattcctgcctgcccgcaccctctccccctacctgaggctggacaacattctcattttctcctctgacttgagggatgtgaccattagggccttcttttatgatgatgggtggaggtaggtcttactccgaagtgaccaactagttctcgtcaaggcaaatctccatgtcttgaaggcagcgagagcatcttggaattttgtatcgattgtgtgtaaggaagcagctttgcttaagcttgttgttcccacagacggtaccaaattgttgacggggagaactcctcaactaacttgtggttagaaaaccaacttatgcttcaagttcagaaatgagatgaagaggaagatgaaatataaacttaaattgtcatcttgaaatggagagaattatggaaaaaatttctatttctttcaatatggttttacaagtatgattttccaacccctctcaaatctgagaaagggtatttataggctctaattgcctgaggtaaaaagtggtcccaaggggacaaagcatcgttttcacgctgcatgtcacaggtgctggaggtggccttgcaactcgtacgtacccctatcaggtgtggggtgatccccagctgtaggcatgtgatcctcggttacaggcatgtggtctgcagttacatgtggctgaagggttctccccaattccaggcaggtgatccctagttacaagcatgaggtccccaattgcaggttataggagggtggtccctagttgccggtaggtgatccccgattataggcatgtgatcctcagttacaggttgcaggcgggtggtccacagttgaaggtaggtgatccccgattacaggcatgtggtcattatcagttgtagaagggtggttgtagcgtacccttgtcaggtcctcagatctcgcaggaccattgtcaccgctactcgtaccttcttactttcagagtcttcaggaggcgtggttgtacgcttttcccttgcacgccttgtcctttgattccttcttcaatgtcattctcgtcgatatgcattcacctctcaccttacatttacaacccccaaaacacacacacacacacaacacacacaatgactcacccaaatgcttcccgatttgtccaacggctcatgggtttgcacaagatctaattggctcacacaatagctcatgggcttgcacaaaacctcatgggctcgcacaacagctcatggctcgcacacccaattgtcacaatttagtggtgttagtattttggccataactttctcgatatatgtcgaaattggacgattaaaagtgcgttggaaatatgagaaagagatctatggatcttatgtttatgataagatctaattttgaacgcatcattatgaaaatcctctaacaattgttacttagtaagttgatcttactaactctactcgtgtattgttgtgaggttgacctctgagttgcccggatatacctggagacttgcaagcattgatccttgaaattaacgagccctaggccacaagcgttgattcaatcattcctcgaccgactcttgctagcaacgtttctcgactggctagacattgttgactaatctcgaaaattcactctctcaatttttgggttaacacccgcttgaagctcaaaagaagttaaagacccaagaaaatagcgggatataaccaaaataattggatctcaactaattctgagaatcaagggaacggtaattgagataattctatgtatacacttagggtttgatagagcctttggttgtgtcaccgaaagatagacacaccaactccctttctatataatgggtcatacctgaacatggaggaggatcaaaaattcctattttagaaactatgtaatttttacttattgcactcaagagcatgttcttgttttgcaaccaaaattaattaaatacaagaggtacgtgtaggttactatcaatattttgggtagaatcttcttaaattttggtgtcatttattacattttttgcacactatttatttaattctcattaattacgatcccgtaaaaaaatcagttacacaaatatataaatatatatatttatagggatatgattttgttccgttattgtactttcacggattgtaatccgtgatg

SEQ ID NO: 297512 - DNA, 1487 bp, Cannabis indica
tcgatacgataatgaaaaattattgttattgtttggtttcatatatacatattattatcttatctttactgtaaaaatccaaaacaacacccattgtggttagatcatgttgttagtcttctcttggctcatggtaacggccaaggctccatttcacactataatgccaattattgtttggcaaaaccacacaatatatgcaacactttcatgctgtccaagatactgtacatataacctaaaatcaatcatcaaaaattaaggggacatgttgttcatgctctagttgcaaaactcctggtttttcttcattcaggtgcctactatatcaccctagcacacaccaaattaatgctcccatacacatctcttctgtcaaattatttattaataacataataatattgatgtgtaaaacgatttacacatatatatttgtgaatttgataaataataaatatttatgactaaaacttataaccatttcagctttattagtgagctgttaagttgttctagctgtactaatgcaattagttttcaagattagttacattctattattttatactttgtaatttaatctcaaatgaataaattatgagctcatttgctcattaactttttgacaaaatcttctgattagtttgcttaagttccctaaacgacatttgtctgtgagttcattcatgactagtgataattttttagttacaaacctcgtctttgtagcgatgtatatccaatatcttcgacttaggtgaagataattaaggtgacagtagtgatgtttgtacattttcaatggttaatggtgatggtggtttggttctacaaaactttcttgttcaaactttgtccttactccttaatgtctctatcatagtttccctgtcatatcttcaaaatttagtgcttctcagctaacaatgtccccattaaacttttctttgatgtttttcttgtcattaatttttctacgaagaaattcttcatcaaagcaccctacataaaggtctttatcactcactatcttgctgtaatagtagtttgtccatagctttttaattggcatagtctccatcgattaggacattattataaataatattctcagtctaatatttcccttcttacaataaaacaaagaattattgctgaagttggttttagccacctaaatcattattgttacaggttgttctaacactaagaacattcacactaaatgagcgataagagcacctatattaaatgagttatttaattatcataccaaaattcaacttttgttattttaactcaagctatcaacttcttattttatatcattaaaactccatattaatatattttattcattttaaatatatatattaaaatgtgaatgtgaataatataataagtataaagtacaaattaaaaatgtgataaatatattattatgtgaataatatatattaagtgtatggtaaataaatgtgtaa

SEQ ID NO: 297513 - DNA, 1297 bp, Cannabis indica
gtgccctttaccatttctctaaataaaactacgaatccatccttctatatactattcatttatttctctactccccactttttaattacactcatcattaattaagaacaaaaaatatgtgtactcctttctttgaacactacaaaatcacaagtataatttatattattttttaaaaaatacatcgttaaaaaattagtaaatttattaattacctcattcatcatattattagattaaatatatggtaattaaaaaaatcaagcatgtaaagtaaatatatataaatatatatttttataacaattaagtcccgcaagtcaaaaagcctaagtcctgctttggggccaatatatatggtagaacaagtttgtgaggttcatatatagacacatcaacaacatagctctagccgagatttgaacatttatagttcgggtgaagcactcgatacattaatgtccacatctagtatgtattttttaaaaagaaatatagaaaaatttaatataattttttttatataaaaatattgtaatttttttttaaaagtcaagatttcattaaaccccaacaaataaactgatatatgagcactaataacacgtgcatatgcatttgtctaaattgaaactcttaaaagaagatgtaacagacttgattagtgcataaattataccattcgtagaatgcgaatggcacaaaacgaaccactacccgccacaactaataaatgagaaacatcatcataataaaactgattaaacttaacatttttgattgaagcgtcaatccaagaaatagctacttatgaatcacactccacctcaatattgtaattttcttattttttaggaaagataaattgaccaactctatataaatagttattcacatatgtaaatatacacatgattgagtactaactctgagaaatgtgtaaacagtactttgtataagttgtaaaagtagaagtaagtcatcttttttggttcaataattattatgttcattttttcttttgttggttttcatatctatctttctcatgttcaatctcttcttttgaattcttcttagatcagttgttaacaaaaaaaactttgtcaacaaacataaatgataaaaggataccctattatgttccatacaacaatataattggactaaataaacttaaaaaaaaaaaataaattgatacatttaatggtgttaaaattagacctcactgtaacctttattattacagttttacagatgaatctgagtatgtagctgttacagaggctattaaaga

SEQ ID NO: 297514 - DNA, 893 bp, Cannabis indica
attattagtaaacgggtaaatatatatttataaatatttttaagtaaatgggtatttctatttaaaaaaaaacttaaataatcataaattaaattatattatgtttcaacggcgctccccagtaaagtaactagttatataaagaaagaggaataaaactataataagcaaagaacaatatttattattatatcctgtgaagatccaaaagcctaaaacttgtagttgtgcttgtgcttgttttaacatagaaagatactctcggcataagtagcaaaatggggacgctgtcttagttttggaccgacttagtcttgggatcataagagtacatggtcttattaaatatatttcttctttgaaataagatgataccattatgtgataaacctaattaatattctgatgaaatttcccaaaggtggtagtgcatttatttcaaccaactccacagaaagatgtttagtccaagaatcccacacaccatatttcttcatcacccatatctcagcaagcgatgttagtaatgataactttgtgaccaaagatagacaaccatccaagttacaaatacttgtacctttattttcgaaagatgaaggaagtttaatcaacttaaattcatcactacttagatcaaaaccaacaattccttgcttctcaaaaagatgatgcaaaaaaacataatcttgtccatgttgtgtaggaggaaaatagattagccaatgaatagaggcattaataagtcaggcataaccaaagtcttccatgaattacttctcaaactatatactaaaacatcctcactttttctaaataagttaccattagttgcccgtacaccaccactttgaaatcattggttaatggttcgtatccaaatccatacaaac

SEQ ID NO: 297515 - DNA, 1894 bp, Cannabis indica
ttgagtggataaagaggaaacaatggggatcggttgtgattgaaaccgattccttggttgttgttcaggcaatccaaagtatgatgaacattccttctccttttggtcttcaagtggcggctcgtcgttctcttatggccgatttgccgttagtcacaattaattttgttaaacgttctgtaaacaaagctgcacattgtcttgctcgtagctcttgtttgtattcagatcgtatttttagcgaggataatgttcctgctgattttctttctattgtaatggttgaatcttcttattaataaagttaccatttttcctcaaaaaaaatagcgttgtaccaataaaaaaggtgctagacattaataatacttttttataaattcttatctcatattcatttattaaccacaatagagctgattttgtatctttcgtttggcaaaccagatgacaatgagaatagtttgagggcttggagtaactagtagatgtataataaaatgttgttttaattaattaaaactttagtggcagtgattgttaaaaagtactttagtgtctaggagtctcctcagtatcatattattattgatgtaattaaatatcagttctatataattttaaaaaataattttagacaatattatgaactaatcgtgaaacgataattataaaaaatgttaaacattactcgtatccaataacaataatcacgtatattttgatcaaattaaagtgtaaaatttataattattttctatataattctttttctcctccgacaatgatattctggggaagttaaaacactttttcttttaattatcagaagaagttaaaagacttaataatcaattcattatgttattttcttttttgtatatttcacctaaatacttgaaagcaaaactgaatttcaaagtacaaaatgtagagttttgtaaataattgaactgagatgatcagtctctcatcaattatgattcttcttttagtttcttattatttttccaataaactctagacaatttattttggttgccttgttcaataattcatcatatcattttagaactagataaaatctccattcatcactacatcggtcacgatcacgttctcaccttaaataaccgaaatgcttcaatttatgtgttcatatacatccaacttctagaatattagaaaagatcaaatgctcacctcctttaatataaatataaataaaaacattttcaaaggtactcatttttaataaaaattggcatttcaaagggatttttattttccttcctaaaaatctagtccaagttagattttacttcttacgtttaagctgtgtttagaagagtttaatttaaaataattttcactaataatgcaaaaatagttgtgggacaggaaaagggagatagctttcattaatgacagataatatatttataaagcaaataacaaaaactaaaatttccaatgcatgtttagttatatttttattcttttagttgtatataattttgtcaaaaaattatgtcaaaggaagtgaaaagagcttattgtattgcttaaaaaggaattaataaagagacttgtaacttacaaactatattctatttaaaactaatatatgtatacagtataatttttatatgatttgatatttttctttttatatatatttaaaataagttaattagaatttttgtcctactaaactttgatatgtataaaatcatgttctctaaacttttaaaaccgctaaaaatcttccttgaattattgagattattggattcaataatttttgtctaactttactaacacaagcatggcatgttagataaattaaacaataaaatcaaaatctatttgtatataatatagaacacgataa

SEQ ID NO: 297516 - DNA, 3968 bp, Cannabis indica
tatatatatatatttcttttggaaacgtttttaatatatatattttttaatcaatagtttaggttccattggtacgtaacactacaaatcagaggtttgggggcaaagagtaaaggccaaatctttgtttctttctgggatttttcatttgatttgatttgtcctcacatcacgacggagacccaccaccgacgtccgccgcctgttctccgagccaccacccactctctttgttggtcgatttgcttgcaggtaacgttaaagataacaaaagaagcatatagaaaactttcttcaaatgaaatttagtttctactttctgttgtatgctttacaatagccaaatttagttgcattctgggatcaattttacgaaactcgaattgggaattttgttgggtctcttatcttcgtcgtttttcttgattttgatgttttgatgggttattttttttttatttataatttttctgggttttggttaggaaaatgggtttattctcttcagtatttggtagagaatatttgctttaattctttctttttgggtaattactgaatttattgattcactgatgtaaaaaggaaaaggaaaaacaaatgttaatgcagtgtttattgatgaaatttagttgttactgcttactacgagtagtttgatcagagcaatgaattgttatgttttaatacaattctttatgcttcttcaggagtgaaaaggaaccccttttgttgttgtataatttagttgaaatttttgaatctaagagagggtgaaagatgcttcagattaggcttagcaaaaccccatccacagatggtgctggatgtgccaaacccatgccagtggacacagtgactgtggcatgcccagatcacctagtccttgctgatcttcctgtagcaaagggtattggtgcggcaattgctgcttcacttgtcaaaagcgtaggtcggaggtcccgtcgtcagcttggggaaagggtccatttctgtgttcgctgtgacttcccaattgcgatatatggacgtctggtatgtgttgatccattttgctgttatttgggtgttcctattaaagcttatttgcttttgatcctttgcttttttccatatcatattaatttggtactgcactgtgtttctttctttcaagggaacgtttcccttgttctattttgagtgtataatatataaaaatctcctggtccagatgaagaaaataactgaggactaaggcctaatttagagatttgcaacaatgcttcaacttcccttgtgtataaactttttagtatcgactgaattgcatgcaaaaatgtcttctgcttactgtttttaccttcttgtgcaatctattgtaaagtgccttatttgtgaaattgtttgtagaaagaatagtgctcccgttttattgttctattctggagatagcattaaataagaaaaatggtcttgctatcatatctcgttttgctgcaaacaagtgtattatgctcctgttttctttttgttctattctgtatctatggaccttaattaacaattttaacttcttgcagagcccctgtgagcatgcctactgtctggactgtgccaggagtgattcaatctgctatctgtaagttgtcttaacttttatataatataaacatgaacattaggtacaatgtaagttgtctgaacttctttcagttcttttgtaatttttatatgttcatgctgcttgagtcttgactattattgcatgttatttcgatgtttcatgtttgctgatgaggtacaatacagtcagttacaaattgcatctgctcatatttttgttatgacaaattctacttatggatagataatcgttttacctgctaagtgagaacttatgtttcactaggctatgcattaacactagtaagtaagatattgtactctaatatttggtgtcttgaaaagttatcatggtgagttggtcttagaacaagcaaaacacacataccagaaagaaaaaacttccaagtcatgttgcaacttgcattaactcctgctgttctttgttctaaaatagacgatacctcaaaatatactatggtcttcgttgttggattcctcaccgcaacctacctgacaatgtgttaatgttatttcttgtctgttagctggaggatttagaaaagttcatacttcactacatttacttcttactagtttcctacttgtttgagaatgacataaagaaataatctgtaatttttataaaacattaatcttctaagattcttgctctcaattttctgtctcacagttgtgatgaacgaattcagaagattcaaacaatcaaaattatggagggaattttcatctgtgcagcccctcattgcctaaagtctttcttgaagaggatagactttgaatctcatattcatgagaaccatgcagaacttcttcagttaaatccagagaaagaagatattattgaatctgaagctcagagtgtcaaacaatcatcagtatctgattccaaccttcgagcgccactcaggccaggcttctctcctagttcaaactcacagcttcatgatcgagatgacaaagctcgacgtcagcaaacaagagaacaatcagttacaaggccaataatacaaccaaagcaacctcaaggtttcaatcaagtacagaataatcaatcagatctgcaaccagactaccgacatcaaggttttgataggcctggtccccacaaccccttccaacaacaaaactttgactcaccgggtgctgtaaagcaggaatctggtctgtattcagacaaacaacaaggaggtttgtctgagactcccttctctgagtatccacccatgcatgccatgcagccacccaactacatgatgccaatgaactcgaaccagatgatgaatccctccttaccgtttggctatcctccgttccctggcgatggatctcaaccattttacagtgctccttatgatatgacacgccaagattcgacaccagaaaaaggatcagaacaagggtcactgttgggtttcccacccggttctgcaggtaacatgcatttccaagcaaactatcaccagccgtggaatgcaggacaggccaatatgccttctgaacctcctcaagcaggtcaagatagtttcactaacatgccggattctcaaggaaaaggtccatattaccaaggagaattcggacgctatccaacacctatggcaaacaaagggctggaaccaatgcaggccggggatcccagggatggcaagggtatattagccccgcagcccatgtcacttcctccgcctcccccacctcctcacatgtcacaccagaaacgcaaatattattccggtgatatgggccgagatgggcaaagctatggatggcagcacgagaaccgagacagctttgggagtggccaggactagagatcattggtctctttattcttttgcccttctgtgattaatattactcttattttttctcacatgaacttcaatttctccatatgctctgtaaacagattttgttttatgggctgcgttggcccgttatctgagagcatttgctcgttttattgataaaaggagttaggagatcattgccatgcactaacatttagcattttctacttagtcattatatatgttttaaaatgcctttatagcttttgctcaggttaaaggttatacatatattcattgggttgattcatttatctttggcatattagcggctaaactacttgaacgttaaattttttaacacttaaccacaaaaattaattttttaggacaaaactacctaaactcccattctgttttgctctatactcctccgtctaaaaatcactgttaagtgccacaatggactgttcacgtgtacacacttgtacacgtggcaaatttttagtggcccacgtaatattaattttaaaaaatcattataaatat

SEQ ID NO: 297517 - DNA, 2564 bp, Cannabis indica
ccacaaggggcaaactattgtcttggctatatggctattttcctaaataaaaaaataaattgttaaaaaccaagcctacatcgtaggagacttggacgggtcttcttcttcttcctctgcctcgacctcttcctcaactttctttgcctgctcgcagtaggctaggacttcctccatgccctcccccaagaaactttaatccatttctcgattcgccatccaagctcggtagatggaacacttggcaacagtgttgcatcgctccttggtattggccttggccccttcgagtttcgcggtggctgcatcaagttcttcttgaagtttcaagcacatctcagatttagcctccttcggggatgcctcaagtttagccttgtgggccctcttcacctcctcggcctctttgtttagatgggtgatctccaactgagcctcatttcactattcggcaacggcctcgcattgcccaatggttctctgaatctcgccctctaattgtttcaccctatcgagaccttggcattgggcgacgaaagaaaggaaggtttgctgaaaataaataataatgaaaatgcataagtatttttaaaggttcttgaaattaaaggcaaaatgaaaaggagaagggaaccaatcgagagaccgaaggcgagactcctttcaaacatctcggtcggactaccattattgaccaagtcccagtcgttgggtagaaagatcggagatgacgctagctagtaaggcgcagcatactgcgcagagtgttctgaaccaatgctcccagcctcggtgggcaaagcctcaggcgcttaactcaaagaagctgtggccagactagtttttggaacgagctcctcgctatgtgtgaggctaggaggatgagtttggacttcattctcagagatctcgagatctatggtctgcaagacacgctttgttagccttcgtcttcctgggccttttaacgggctccacgttgaagtcgaaagaggtttccgaggcggttatcctcttcttcccctttttgcttgaagtatggagaaggtcacctagatccatatctgcgagataaagagatatgttaatatctgttaaagaagcagaaaaggggaaaatgggaaacgaatccccacttaagagaatttaccataatcataagatggcaaggaaggagggctataatatccactaaactccctagatcccgtgatcttaaatatgtcataggggtttagtggatctaagttccgatctggatggcttactctatcccacatggtcctatattgctcgacaatctcataataagaactagtgcaactaagttgtacacgaaaaggtggataccaactatcgaacctatgggtgatgcaatctacgagggttcccaatataaaaattatatcggctatcgttggatgtcactaatgaagttcgactcgccctaggaacggttggagaccatccacattgattaccttgggatgattcttcttcagcttcccgaggaactgcattctagagataatgcacctgagctgcgtagtcttgggtttcatcgtcagctaggactggaacctgctaccacgacgtatacttggggtacttattatcacaagtatactcgttttcggcgaggaggccaatagatctcaaattggcctcgtttaagagaaactccactaatcgaagactaaaagggagacccagcaaaagcctgcatcgttcgaccatctcaggagttggggttgtaagtcagtgaggccaaaattaaaaacttggagtaatttagaacccagtttgaaataaatagctacttacgtatgatgtgaaatgcggttgtatttattgaagagaggctcgtcgtccagaagaagtcttccttaaaaggggtcttatttggtaacccaacgatgatcctatgatcgcctatatgagtcccaagatagtagaagcctcctgtacaatttttcctcgcaaggactgcgttgaacgagtaaagatagactatctctaggggagtggggcactcccatcttaaaattttatacagaacccagacttgcaaggattctgtaggaaatagaaccaattggaatggggctattccaaggtggttgatgaactccttaaaagtaatctcgcagggggagaattgttcaagccctgatgtgctcgaggctcaaagcgcctatcccaaccgagccactagtacttgctttgccactagtttcacctctggctccctcgcgtcccccgcgagtaagtcatattggaggatagcagctaaattcaccaggagtgacggacctaacacgatatgttttggcgatccttagcgacgacatgcatcgactaccaaaagatacgtttcttgtagtacgcccatcccatatattttgcatatactatatacatagagtgagagtgttggctagaccaaccctaagctagctaattatacccacaccacacataaacattgatacatatatattatttggtttcacatgagaaatttagtttagtatgcttaaatgtaaaatatgttgttttaatat

SEQ ID NO: 297518 - DNA, 3194 bp, Cannabis indica
gacttcaagagctcttccaaagtcatgccaaacagacccagaacaatgcaggtaaatgacactattgttcgcatctttttaatgatattattattactaataaaattctcctaaaaagcaagaaaatgatttccaatgtagaaatgggaaaacgaaaaatacaatttgcttttgctttattaaccatcacagtaaaagtacttacaaccaaaatgatctcataaaatgttctcaatagtcaaaatatttatgatatccattatcaccttgaaaagaattggtgtgtgctgattcatttttgtaatttcccaatcttatgagaagagaatatggttactgatccttagaaaagaaaggaaactttttattcattattgacttcctttgggaagtattttaagaagtattggttggcttgtattatcaaatcctcatcgtcccactcatctcggtatgtctctggctgagcacgctttctcttcgaaactgcagaatacatttgtttccgccattcctcagacaatgtacagccagaatgaactgcgagccaatcatcataatcaaactgcaaacacagcattcaaaagattcattccggcaaaggtttcagaaagattgagaagtcattgggtaaaggttactgggttttgaaactaagcataacaaaatgcagatctttaattagaaacaaacaaattgtagacaaaccagcattataatctgaatcttattacctgagaagcacccaaattatgagtgtatcgcttaggagtgcccgaaacttctagagaataataaaacgcattaacatcgtccatcatctcctcttgtgatggaagatcaaatcgatcggacagaaggcctgcaatccacttgctctgaagttcacacaaagggaaaggaataacctggaaacaaaagtattcaaataatgtttattactagtcataaacaaaactattattattgaaatgtaatgatgttgcttaaagcagaggtataccttccatggtaacccaacaaaggaaagccttggagccaaggctggtgggaagacatgcttataaagtggtccaacacgattgtcgtcaacagtcacaatgccattggtttcaagaaaaggaaaatggaatttgtaccttaagggggaaaattgaagttaaatttcagtttattttttttaaaaggaaaaaggaaatttgttttgctttctatgcagaaagagccttagattcaatgtcgattatcacatataagtgaagtaatgttccaaatctggttattagaatacatagcataccctgtgcagtgaagaatgacatcagcaaagacagcacactcatcctggaaaaccacactaccatcttcattggcacttttgatctgcattagtattttaagctagttaaattctggtatcggggtagttttcatatattcataattactcagttgtgacaacaggtaagtactttttaccatactatgaatccaaagattatcatagccaggctgctttccaagggttgcctcagtaattgatctacatgcaacatgcacttcttttgccactgcagctatgtcacgagaaatatctaccgcgcttgccgcactccctatcaaaattacgacctgcaaatgctaatacataagattgtacaaaggaaggaaaaggaaataataatctaagatataaacattttatactcacaaattctattagcatcatgtgaaaaattataaaataagctgatgctggctatagagacatagaattcattctctaaaagtatttcagaatactttataccacacaatcttttctttagcagaatcataatttgcatcaaagttaatgtgagagtgagaaatattcaaacgtgacaagtatataaacaatttaacttaaaatgcagaaatttacatgagaaaaatgaatcttaaataaacctgatctcgaaaaggctctggaatccgatagttgtggctatggatttgagtccctggccatgcatctatgccttcaagaaaataaatgtaaaaacagtaagggttgcagtagttttgatgtatcatctttttcttcgtgaaggaaaatttagcatgctacattatatttgcaccgaaataatactttttcttttcttctttcactttcaaatttacaaaagcaaggatcaaatataacttacaagaaccgaagaacgttttgttgattaaaacgaaaaacagagacaaattctaacagtagccttacaggtcttaccccaacatttatacattaattcacagaatgtaaacctctgccaaacttatgcttctatatcatatgtgaagaacagaagaaacagaattaatgtcaaaaccaatcaaagtctaagagattcattaggctgagacaaattcagattcataatcccaaaatccaaacatgcacaccgggtaagaaagggaaaaagaaaaagatgaatttctctttaactaagtcccgttgacacatatgtaaacatttaccaggaatatcagcaatacgaggctctgtataatgaccattacagactacaacggcatcataaatctcatccactcccaattcacctctcctcttagacctcaccttccacttcccaccatccatcaaacacacacactcaacctcagtatcaaacctcaccaactcaccaatcccaaactctctggtaaagtctttcaaatacataagaacctctctgtgacccggaaaccttctggggtctctctcgttttttccatcgtctttcttcaccacaaatgggaaatctcgaaaacccattacttctctagggaggttggtccgtaaggactggtacaagctcgagtggacaacggcccgacgtgggtcagccccaattggatccgactcgaccttgggagtgtacacccatgtcccaccgacttggtctcctcgctcgaacacaacgacgctgtgtccctctcggccgagctcacgggcggctactaggcccgctgccccggcaccgatcactgccacgtggcgggacgtgagtagagggagtttgggtggcatggaaaggccttgcattggagtcatttttatgctactttttgtttttagaagtacaaaggcttttaagtcattagtttcaactttaaagtactctcaatagatgtttttttttaaatgtgttttggaa

SEQ ID NO: 297519 - DNA, 2246 bp, Cannabis indica
attttttttttaattattgggttgcctattcatgataatgaatcctctgctgagtacttttgcatttcacaggaacatagtactaataataactaactattaatcattaaatttgattaaatgttattattttacacccaaactttgtttagagtcatgtctcgagcttagttgagtcttattttagagatgggtcaaacgttactcaattaaatcacacgcgcacatacaaactgccattttactttcctctctcagcatactactcaaacataatatacaaaatattatatatgtcaatataagaaaatattttttagtgaatgggacttacgaaaaatactattttctttttgatgggaaaaaaaattactacatttggtgtagtattttgatgcatattgctaagaaaaaactacacctactgacgtatcaatacatttcagccaattacatctaattaaaagcacataatttgtattgtaaggtaaaaagaaaaagaatttgtgtgcacatgggacacaacggaaactaattgggctgcccaggcccaaagaaaagctgaataataaagtttgggcctaagttcctgaaattactgtagccggggaaggggttatcctattcgtagaaggtaatatgttattcgaagcaccaaacatacggtattaagctcgaactccgaagagacccgtaagaactgagaaccagactcggcatttgggtgctcttcttcttttgcccaaccaatcaaaggtacgaacttctagtcagtcacttttgagcattacgtaagaatgaaaacttcattcatttctgtttccccatggatataattatcaagatttgatgatattctcaacttgtatttatttatagtcaaattctggtactgaagagaacttgagtaacgtctggaatgaacttcacactactcttttatacaatcattagtcttaatagagcttagagctcaaaactgcaaatggcattcttttcatttccatttattaaacaataacaataataataataataaaaaacaatcatagagacgctctcttgtttactttgttgcttttctgtggtttcgctttattttttattattttctcctattgggttaacaaatttaaacagtgcatttattgcttacaaactgacgcagtagaaattttttgcttgtttgttttttggtgtggtgggttgttttgattaataattaaggtcaccactttgattatatagtctgctattacatacttaacttgttaggtgcacctctatacagttaacagttaccagttatggtttgtctattgcttagtattatcctgatattaaagattgtcagggaaagagatggaaagcccagaccatttaaggacacactggacaccagcaatggagaactattttattgatatgatgttggatcaggtgcacaggggaaataggatgggtcatactttcaataaacaagcttggaatgatatgttgatgatgttcaatgccaaatttggatctccttatgatgtaaatatgttaaaaagtcgttacacaattttgtggaagctatttaacaatgtcaagaatctccttgatcaaaacgagttttcttgggacaattgtcgacaaatggtggttgctgaaaaatatgtttgggatgcctacataaaggtgctctgcttgtttaatttgattaaacttttgtcactattcttaaagtaatttgatgtggaatgcatgcaggctcatccggatgcacaatcttttaggaacaaagctttggtaaagttcaatgatttgtgcttgatatattcacatacaacagcagatgggagatacagcctttcaagtcatgatatagaatttgatgatgaaattcaaccgatgaatatgggtgtgggtttcggtgcgtctcaacatcttgttattaacctacatgaatgcttatcatttcaattgatataatttttctaatttgcaatttataattattttgggagatgtttttccttagtgagagtgcttagttctatgttggataatcattgaaagcctggttattctgtgtcaacatgagctgattaacttctttcatctttaggttgtcataattgttttggctgctgttttatatttaataaaactctattatagccttgaatagttgaattcatatatgccatgagacatgtttactcttctaaacattcttctttttcttcttcttcctttttttt

SEQ ID NO: 297520 - DNA, 4218 bp, Cannabis indica
ttttagtaattatacagtgtaattacattcaattctcatgagggttatgagaattggagagtgtaattagaacccccaattacttccaattacatagttacagtgtaattacatggtcagataaacatgccaaattgtgtaattaccttcaattacactgtggctttccaaacacacacgaagaaaaatatttgtacgcagaacgttttttgtaactctacagcatttaaatataaatatatagatacttagaatgaattatctcaaaatattctatgaaattactttcttcgtataaatgatcattaatgttatgatagaacctcgtagtgatacatcctatctttataaaaataaaaatttaaggataaacttattaaatgagaaaataaacagaaactatacttctttttacaagttcaggaatattgttgtcattttgtttcaatattttaaaaagtgaagcacatcttccatatctaagattacctaagtacaatcatcaaatttcatattggtatgagaaacaagggactatatataagaccacaaggctttcatatatttcagacagttcccaatcccagttcttgatgctgggcgatagggatgaatgatcccagtacatatcatctgctgtacatcatcatcaaatacaatatccactgcattcttatacaattatacaaggaagtatacatgtggttttacctaatttgaaaattgcagtgagcagatacaaaaatgaaatgccaaaaaggaaaaagagcacttcaaaaaaaaaaagagtgctacctaattgttaaatgctgtgaaaatctgtaagacaccaagccttctcccatattgaagtgctaaccagcccgcaacagagaagtatactacaaggaagcaagtgcggctaaaagggattctaagaagagctcttacaacatttctgacagcagcgaatcccggaaatgaatatttcatttgttgcaggagcataacaaagctgattgagatcaaggaagttgaaaaaccagtaataactcctgctatcatttcccacctccaatactttgatttgtttttgcttataacccaagactgtaaaatcttcattgatctgaaaatataggagccaattatcaatatttagcaccaagacagcatgaaaaatccaacaaacacaaaaaacactgcactcgcggaccatttacataaacaggttagagctagagaatgtgattgcatttaagaacctctcaaaattaacaatgagcatccatctgttttctggcaaaagtgaaaatttatcccgaacacagacgaaaagagcagacactaccatttttataaaactcagtatgttccaattgtacagtacagtattatcccccaatgaaaattacaagagaaatagcagcacatcctaaaaataacagacacctgataaaaggtaaatgtttttgtctacagtacataaacaatcataaattgaggctagtccagtgactggatacaagagtgagtagtgtgactgatccgagtttaagtgcctttttaaatatatcttacacaaaaataagtaaataaaccacagcgagcaaaatattttacaccgattcaaaatcaaaagcttaaaattatagcaaaccaggagctccttcatttagcacttcgattggtgtaattaaattgttaatcatcagtagttttactgttactggtctgcagcttccaagaaaaaagaaaaaaaaaaacttcatcccatacactaaggaataaattgcatagggtagagaaactgcaacagaaatgagggatcccagtcataggatatatcaaagaaatgcttgttgaacttgatttcactaaaatataaaagatgtcactccaacatctgaacgcagttatttcaacataaaccaatgtaaggtctacatttgcccaaattattaactaataaactgaaaatgtaaatttataagaatctctaatctaacactatctgaccaagaaaaaactgcaaaatgaatgcatgtaaaaattaaaaacataacccaataccttaactgccatacatattaaaaacataataatcaatactttatttgaaatatatgtgaggatctgctacctgatgcgtttctgcaaaatctcagtaaagaaactacaaggcacaattgaggaaaacaatcctgacctcagcccttacatgtcaccagccaactcagctatttcttgttcctcctcacataagtatatttgaccaacgacctatcactatcctcccttaaaagaagtacaactaaggaatacaggagcataaagacaaatctacactaatacgatagcttttggaatgtaagatgtggcttgcatttggtggcaatgtatatacaccaactttggttaacacccaccctggttttgtataaattgcaactgtgaatgtaagatatggtttgtctttggtggtaacagacctacactatcaaatattgctactaaaaacctaccctgtttttgtacaaattgcaactttaactctctgatatggaaccacagaaacacattacccattatatgaattcagttcttctactttagtgtaagtttatggttctgatgttcccttgcattaaatgatctgtctaaggatacatacaagtattatagtgtcccaaatttgtgttgcataatttgatcatcttattaaatacaagaaaggtaccataattcatggagacaaagcaagtgacagttgttggttaaaaatacatataaactttctttcactattgttccacataaagcacatacacaaccaatgaagctattgagaattgtatccagctcaagggactcagctaaaaggctctgcctaaatcaacttacaatacaccacaggtatatacactacttatctttgcaactactctataacatacaacaatgactgatatattataaaactgcacaataatagataattctcaaaactttagactacttacagaaagacatatctcttaatcatctcaaaagtagatggatcttttgcttggcaactgaaaaatccatcaccatgtaagcttactttggaaattccataagtgtaccaacagtcataagtttcattcacctaatcacaaaaagtgaaaaaagacaaccatcttagaatttaccaaaacttaagaatgcaagataaaaaaacactaagcaaaagataagtatagtatgaactgataaaatttaaccttgaatttagctttgttcaaccatgcagcgccaaaattaggcctgcagtttaagaagggcctcatttggagcttctgcaaatgccagtcgagcaacacctgaagacaggtctctatattccacctgcaataaaacaaaataatttagtaaaaagcacaaaataaaaatgccagaataacatataaaacccacaatcacacataagaaagatgagaatatatattctaatgcttcccatgagctttccattatatataaactgcacaatggataaccaagcaaccaacctacaaagataatataacaaaaacaacccacacaatggaaatcctttgttgtaatggactcagaggaaaattcacatataactctaggagttcctcatgctaagagaggtatggattgagactatagtacaaaccttaaatattgacgcccaatagtagtcataacgacagcgaaatttacttttctcaaaaggataaaacacatgcttggctttgtagttgaacagtccaagttcacagaccttggatgatctgagatccacacctatgaaagggaggcaaagcaaaaggttatatcttaacaagaagaaagaagttaatgtttaaacaaaaaataaagtactaaaagattaaacagaaggagatagataacaacttttatacgtgtaggctatgttttataagctaattccctgaaacttatatctcattttgttgtagttaatgaccaaaacatttcagttgtccatagccccaaacgaaggactgttgggcagaaaaggcaatagcaccaatagaatcaatgagtaacaccacattcataggctgtccatatgtaaatatttatcaatatacttaatcacccaattgcaaaggacaacaagaacaattttccgcaggctgaagcacactgagagtaggtcactcatataaaaataagaacaagaaatgaaagagatacaat

SEQ ID NO: 297521 - DNA, 2727 bp, Cannabis indica
aaaaaaaaaaaccttaaataatgaaaacgcacctatatataattgtttaaaatttccatcatgctcatatttttcaatattaaaaaaaaaaaacaaatatttatacctatatatttgaaaagaggaaagtgttgaacagattttgtaaagttatctaatcctaacattggaggtaacgtttatcatctaaatcaactttgttgatgtaccccatccgccttgaatcttgctatagcgaaaagtagcctaacgtccaccctgatttagagtcctaagtctaaccaccttattacttattagctatggtaaaacacctgcctgaatccggaccactattttgtctttcaacaatacgtccctgtcgtgcacaatccaacaaataataacatggagttaaaattacaaacatacgtgaccaaggatatcaccattagcaccattaaatagctaaacaaacatgaacaacttaagacaaactcccaagcagataaaaccgtcttcttttctagtgttttgaatatagttttgagaaaccatgttcattattcgaacaattttgagattctagtgcttcacaattctttaacatttaactaacaaacaccaatgaggaaaatagatatttaaataaatatttatattatgtgtatatattgcatggccacttagaaggttttctacatttttaggtaaattctacttttggtttccagatatagacaatatgaactattttcaccaaattctaacagataatctgacatagtaattaaacttagagatgcagcttttagaagtgctaacaattacttgagggaagaaagaaagaaagaacaaagcaccaacaaattctatcccaattaaaaattttagttgcaacaaacattagcagagacagaagacagtgcacttaaaacatttttttatataaaaaaaaacatacctacagaaatggcatgaacagttaaggctaagctgctgagatcacataacggcttcggagagcatcaatggccttctcaacagattgagatagcttggtgatggatttggatgctgcaaaatgaaactgaattaaattatattgaataaattgctgatacaaaaaatattgttggttacccttgtatacacacacgatcattctgatttatatagactggtgataaacttgttttctaatgtatgacttagcttgccaattaaatttagttcttcatatgtgaaacatccgattatgctgatgaagtactagcaagttcttaaatttcttaagaaacagaaacagccataaaacataccataagatgtgctggcctgtgcatcagacgtgaactcagaatatgaagtctgtaaaaataacatccagattacatttcaggaaaaaccataagtagtatttagaatgtgaaatttgactagtaactggtaacaaagtatataccatcattgcttcctgactttcatcaattcgttcagacatcttcttatattctttctctgcttcatctgagacttgctgacattcttgattctgaatctattggattagaaaattaaatccaagaaattagctgacaaaatctctttgccgcagaaattgaaacatccaatgaaatgattgaacaagcattctgccaacattgagccaacattgagctatttcccctattcgatggtgttatcttagctaaacttttctctcgataaaccgagctacttacttagatctactatcaataaccattaaatagaggtttgattaacatgtgaaactatttccttcaaataatcggagctagagaataatattacatacgcttaaacggctaaacaacagaaaagtctcccccaaaacatacaaatctttcaaacctacatgttaatttaaatgattaccaaatgtgaagatattgtttgttttccatcataataatcataatagaatgaggcatttcatgtaattaacagcatatagtgattgaaacaagattctgaaacttagaagaaaattgccaaaacttgtgaaagtttcctgtcaagtaatctacatttgaaaaagccaattttaacaggaaagccaaatttaacagcataatcttgcgagttatttatggacgtcgaaagcaattggagcaagtttatgtagattagtcagaacttcattcctactgactgatttaaggatagtaataaatccttattactttactattgcagtcttcaatacgtccaaagaaatttcatattaggattttaatttgtcatgacgacagattttatgtacagaaaactgtgcacaaatatcaaaataaatattgagtccgtttgaaactccactgtttattttgattataagtaagcaattgaactggtagtattttcatacaaaagatcaagttataattaatctgaaaatatatcgaaaaattttatagcaattcaaaatctaatgttgagtctggacatcgaagtaattgactgaggtagcttaatcagatcagtatttgtttgcagatcaattataaaatttgagtaaataatccaatgactctcaatgaatcaaaacacgttacaatcatcaatcaattagagcaagaatctttcacctaaatcgatagttgcggctaccaaaccgcataatatatatatatatatatatagagagagagagagagagagagagagagagagagagagagagagagagagagagagagagagaga

SEQ ID NO: 297522 - DNA, 3287 bp, Cannabis indica
aataaaactaacactacgtggcttggcacgtaacaatcacctagtataactatatgagagataaaaaaaaatgggcccaaatgaggttgcttattaaaaggagccattttacatagttgtcaaaggtcagtcacatgataaacaagcacaagcagatctttttgtctccatggaatttccacgaaaatgttgaaatttcttttatcactggaaaaaaaaagagaaaaaaaaagagggagagagaaattgaaattcttcaaagttttgatgtgattgacactgaagtctcaaaacatacattaaaaaaaagatctatttaatttccatcaaattaatttgaaattaaagtatagttttctttttttcttgcatagattgtgagattgttctcttcttgtcatatatgtatttgttaatcgaaattttggcgtaaaaagatggtttacattcattggccggccactaaaagtttggggtatgctatgtgtccaaaaggtgagactaacaattgcttgacaacccatatatacgaaagatagctcatgttacatgcttgcaagtaaaagaaaacttagtaagtatatatctatttacatattaatgtttttataattaactttccttttcttccatacacctgatttgatatgccattattttaaattgataatttctatttttattatactttaacaaaagaaaaaaagaaagaagaaaatatttcaaatttctacttgtttttgtttatagttaagaagctaatttcccgcttttagattccccttttagcttttactataacaatttgaaaaattagaaatctcaccccaaactaaacaattgaaatatatggtataaaatgtatgtagggtgataattagtatttatgattgtggtgaaatctcatccttattcgacactgttatacaactcacagtgacaaagattgatccaaaaacaaaactaacaatgacaagaaactaacaaaccaaaaaaatggtgtttaataagaactagtaaatgaaataagtgaacacaagaaagaacaaaacttacaacccttttattcaatcatgatcatcacttttcatggaggataacttgaatctaatttgcacacttttcaagagagaaaatagagtaaaatatttacaattaacctcacatgagtctcctcaatcaaacacatgagggtgactttaacatccctccaaactctctccaattctatcttaattctctacatgtccatcgtctaaaactatgtagtctaatgaatttaaaaacttgtctcgatcattgaagagggctactctttatagtggatgctgaagctgttttgactggttttagctccaactgttttaactaatagttttgccaattaggattagtgaccatgctgatgtggcagggaattaggtgagtcaaatccaccacaaatccacctgatttgattcacttactcactgtcgattagtattgaaagagttgaccatactcttgcaatcaagtatgctcaaacaatgaataaatttgtctatggttatactttttgtgaaaatgtcagcagggttatcatgagtaaaaaatttccttacctaaacctgttttgacattactacatctctgatgaaacgtagcttgatgtgaatatgttttgacctctcatgaagcattgaatttttcatgagatgcaaagtactttggttgtcacaatagacattaatgtcctttgagttgaatcccaattcatttgtcaatccctttagctagatagcctccttgataacctcagttccagccatatgcgacaactttctgcaggttagacttctagcttacacaacctcctaacatagtgcgcacatagcctgtatagctccttctagtgtttatatttacagcaaagtctgagtcaacataactagtaacttcttctttgtgttggtattcactattgaacccaatgcttgtgtttaatgtaccttttacatacctcatgatccattttaatgcctcccagtgttctgtacctagatctgagatgtatatgctaacaacactcatggcatgtgctagatcaggtctggtgcacaccatggagtatataagactcccaaatagctggcatatgggattctagtcatcttgattctcacagtttcatcgtttggagactgagatgctgatagtttgaaatattgagcaataggagtagcaactggcttgcatgtgtccataccaaacttgtctagaaccttttgtaggtagctgctttgtgattgagtaatacaagtctgagtaggtatatgtatgtctattcccaaaattcccttggcctttcgaaggtctttcattttaaactcttcattgagtttcatcttgagatcatttaattttgatctctgctttccgattattaggatatcatcaacatataataataagtaaatgtgatcactaaaatagacacaaggatcatatttacttttgttgaatcttatcttgatcacgtaggagtaaaatctgagattccactaccttggagcttgcttgagcccatagagtgatttcttgagtaagcaaacttggcctgcatattctttgtcacactcttttggaatctccatgtagactttcttctcaagttctccatgcaagaaattagttccaacatccatttggtcaacttctaggctgaatttagcagctttagccatcatggccctaattgagacttgtttgaccactggtgagaatatgtcattcaaatctacaccttctttttgtgtaaaaccctttgcaacgaaccttgctttgaatctgatgggttcaattgccaagaattccttcgttgtgcttgaaaatccacttgcagcctattaattttcacccctctggttcttttgaccattatcaaggtcttgttcttcactagagagaccttttcctcatttatagcctgtaaccaagttgttccatctttcccattaactgcttcttgatagctggttggttcaaagatatccatttccttcgctacagtcaatatataagcaataaaatcagcataactaagcctgtttggtggctagctctcccttctttctttgtctcttgctagtcggtagctgcttagatcaccttaaccactctcattctcaattatgacttctaactgtgaagagttttcatgtgattggtccacctcaatcttcattccttcctggaatgttgtttgaacaattttgagaaagaccttgcaaagtctcttaattaacaaa

SEQ ID NO: 297523 - DNA, 6012 bp, Cannabis indica
ccagtatgtattttcaggcacgaaggttgactaagagattataataggaggttggcagtaacactcctcgtaatagatataggaagcattgaaccaattcgcaaaacattctgacatcgatttatcaatgtgctacatcaattcttttgtatgttttttgacacgagatttatttttagtagttttaataagaaatttcatagtggtaatagttggttcctaaaaacattaatgataaaaaaaaaaacagaatttgatcttgtttggattaccattctctttcgattaggattgtaccagcaagagtggaaagaacagcaacagctccagagatatttgtcaaaattacaagtagaatgaaaacactaaagtgtgtgagcttcaaggctgatgagttaaccaataacactaccatagtgcctccagcaactatgaaacacagattttgtgacaccaaccaaagttgaagaacctaccaattacaaatcaacaatttttgattctttctttgtatagttaattgtactgttttagatttggagaataggcaacaactactactttcaaaaaaaagtcaatggatatataaatacctttacataggtcaaactattaacccaatttccaacaatggggccaaatagtgcagttgaggcagattccaatacaccataaatagcagcaaatagtaaagaatttggccaaatcttaatcatgtacaacccaactgagaattcccacatcctaatgaaacaaacatatcaaaatcattaggattaattcaaccaaatgttaacattaataaataggatgaaattaatgcattatgtttactctcttaaaaggttattaatcattagaagtcaaattacatcaaactaagtttacagtatgaaattagatactatgaagaaacaaacgacaagccacatcttaatgaaacaaacatatcaaaattattacgattaattcaaccaaatgtgaacataagatgagattaatgtgttctgtttactcctacaacgattattaatcattagaagttaaagtacatcaaattaagtttacagtatgaaattggatactatgaaaaaacagatgacaaaccacatcctaatgaaacaaacatatcaaaatcattaagattaattcaatcaaatgtgaacatagggcaagattaatgtattctgtttacccctacaacggttagtaatctttagaagtcaaagtacatcaaattaaatttacagtgcaaaactgaatactatgaagaaacaaataacaaacctggcgccccatctggccaaaaagtgggcaacatataggtatgtgataagataagaagggaaagaaccattaatagaagaagttgaagcttgttgatcatgttgaataagaggttcattcatcatagcttatttttagctctagtgttatgaactaataagcttgaggaggatctttcttatctaattctaatgggagaaataatgataaaaaaaaaaggtagtagttgataaaaatgagaactatgttgttagattttagtatagtggtgattagataagaaaagtgtccttactttgtctaaaaacctctgcacaaattatcatgtatatatttgtcaagaatatatcttgttggctttcttttggattcttacaactctagataattttcttatttttcttcaattaactcatttttttatttagattatttgtcattaaaaataatttgagtactcaagttacaaatgtaatattttgatgcttttattgcctaaaaaataattcaaatactatcggtttaatttttacaacagagattattagtctaatttttattttttttattgatgcagccttcaccaaaaaagattgaattgacttaagctaacaaatgttcagattaatttaatattgtatacaaaaattagtacaaaagtttataatacaccaactggttattacttagttaaaaaaagggggaagcttagaatacaatttgcttaaaaatcattagataaaattcagatatttttcaaatttatacttgcaattttttgttgagaaaacatagatagggttttgaccttttttatatagaaaaaagataaataaataaaaaattaggggaaaaaagagagtatttaattggtaataataaacctttgattagcttccacctaaagtgaaaatagacatacaatgaagtgttgtgcaagaaaaattagcaataataatttttaaataattcacaactaatccaatccatgatgtaattctcttcataaaataataacaattaataaatgccatttaagttttcaagctgatgtaacatttatcaaaaatcatgcagtatttgcaccattgacatcattaactcacttcactaaatatctcactaataatattttataaaaatagaataatttcttttgttagcaaaaaaattattgtgaaaatgtagaaacaaaaaacaaataagaaaataatgtgaaacatgtaatattatataacataccaatttttagtcagcgctaaaatttaaaatgtgtttagtaatactcttattttttaaaaatataagtagaacttttacttttggaagcaaaaatgtgtttcttcaactatttatatttttttttctacataaatttattttattttatttatttaagtgaagaatgaaaaactaagacgagataaaataggtcaagattcgacatcacaatttgcaacagggttgaggttgaggtttgagttggagcccgaggctcgggtttgggagcaagagttggggtctgggatccaagagcaaagttcagaccaatctaagttcaagttgcgattttggagtcgagggttcgattttgtatgtgggctagggtctagctcgagccgaggtccaaggttgtggtcgagtccaattgtaagattggagtccaattgtggaattgatgtggaataaaagaaatgcagattaactataattaagaaaagaaaaactatttaaataaattttaaatgtgacttaaaaaaatttgttctcattttaaaaaattaaaaatgaaagcaattttatacaaccaatttttagatcacttttataattaaaaaagaaaaacaaaaaagaacgcaaccttagagtttgtaaataaaatctaaaaaaaatggcaattatatcttaccaaaaagaaaaagaagatgaagaagaagagtactcgagtgatttttatgtatgattaaacaatgagatttgatataacacaaagttaaaaatatcaaagcccaagtaaagccaatgaacagttatataaattgtcaattgtcattataaatgattaggacacaaaatttactttcaaaatttacacataataatataacacattttctaacatgactatactcaagtggagtggttagaaaagatatcacatcaatgagaataaattttgaggtgaaattttgtattagtctaaaatcaccaaacaagccatctaatctaaatggggaccaaaaaaaaatcaaaaactttgtaacaaacacaaacataatcgaccatgtgaaccaacctagccaagcaagcaaatctcctgcattattaagaaaacaaaactcattagataactcatctaaatcgaaaagaaggatttagttaaacatatttttttacactgtaaatcgaaaaagataaatgcttcggtagaactttttttttctttctttaaactagttctcttgctgaaacctacaatctctgggatgtaaggaacacttggaaattgtcggtacctatgaggggtggaacaccataagctcatgagaccgagcaaatcataatagcctcacaactcgaccttagtctcttgagtgctttcgttaaacacgcttataagaatggtaatgattcatcagcatcatctagaggctcaggaaaatgtttttcaattcagtatttttacttgatgttctgattacttttcgaacaacatttatgttacaacaatacaagcaaaatataatgcatacatatataagcatggaaattgctttacaagcaaaaaaggtccaagaaaacatgacactgcatttcttcttgtaaaagttccacgaaaacatgcaaccgctataccatgaaaaagccctgtttatcggggtaacttaaattagcttccctaaacatgtgttgtaaaatgagaaaccaactacaaaatatgaaagaaagaaagaaaaaaaacaactctacaatgtaattttacaaatctaacatcttcctagttgcgctctcgctggattcctcaagcattcgaaataagaaaattataatacaaatgattttatgatattttgtttaaaggagagaagactaagagtggagtgagtattacacttcactttggtactcaaaaactctccttcagtatctcatgaaaaacatggctagtgaaaatcgaaatctaaactaacaaataatataacatccaagtagatgtaattaatctagatcaatctgaaaagaagataaaaacacaaatgaaacaaaggaagatgaacttcatgacttaataagctaatcaaatttctcacaccaagtaaaataagcatccattttataagaatactgtggcaacaaataaataaagagcaattattattactattactataaagaacccatcttaccaattgacaggatttgattctagtctatctaagactaagaatcacccttgagttcatctgaatctgaatcacttgcattataacctataagaaaaaaagttcaccaaaacaacaaaaccacattacataataatgaaaagcaaataaaagattaagaaaagtgtgataatgacaagacaaaccaacctggatgcttatcactaactttccaaaaggatctagttcttgatgcccttgtaatccaaatccttccctgaaaaaaaaaatgatgtgaaattagttagttcaatgataaaaatgatagcttttttgttaaaccctaaaatcccaaatcaaaaacaatgatcagagtaaaagagaaaataaaagccataaaagtaaaaatggaagaagaaaaagaagaagaagagaccctctgagcatctctgggaacgccatagccactaaaatacatctgacccaccaaaacttgcatgttaatatctccagttttggcctccttgagtgtgtccttaaaccaccgtttcacacaatctgaaacgacctcagaaagcggcaaacgactgtcgttggagctacttaccgtctccttctccttctccatcttcttcttcaaactttggtcggcgattccagggatctgcgacgtcgttttagagaattggtatattctggaggtggtcgtcgaaggaatcgattttcccatacaaaagggaaaaaaacaaagtagagaatttgagagagaaagtaaatataattaagttgagaaagagagaaagaaagttcgaggaaaggttaaatgagttacctttttggttgtggaatggaagcaaagtactgttgtttgtatgtgtgtttgtttggatactgagaaaataattggaaaaagaaaaagaaaagaaagacttttgaatttttatggtttttttttttcttcttctaatttttactatttcaacggaacttgggaaaacatcttttaaaatagaacccaaagcaagtcaaattgttttagggtatgtttacaatgcacttctttaaaattggtgtaatgatacttttgatatgttaaatttttctaaatttttctaaattttaccgcatatcttaaataactacaatgtataagatcctaaaagaaattttgactaaatattttcttagagattaaaataaataaggatgtatcagtgcatgttaaaaatagtcccaaactattcacagctttataaattagttaggggtgttcattggatcacatccaatgtttttaggcctatccaaatccgatccaatcatatattggatattagatttt

SEQ ID NO: 297524 - DNA, 1608 bp, Cannabis indica
ttattttttaacgggagatcaaaccgttaaacttaacagaatattcttttatttttaagtatattctgttaaaccaagaatgttaaaccaagaaatgccgttagataggcacttttaatatataaagataaagatatatatatatttatataattatatgactgccggggttctaatcaacattaaatagtttacgtactacggcgatatatataggttagtattaagctcaaaactaagtacaccaataattaattacatttacgtacgtacatgtttataatatctcagattatatatatacacacatcacatgtaggtcttcaaatcgtagtttttgatatcgaaggccaaaaatcaatactgtcccaaaagatataattgttttttttttactcaatttgcttttccaattatattatggctcaactaaaattgatcaaaaagtgttctgtgcaacaaaagaaaaaaaaaggagaaattgtcaaagatgaatatctctcccaaaagatgaaatatattttgaagaatattgaagttaatatataatatgaaaagccttaggtacgtatatgcgcacatgcataattaagtaacaaacagagagagagaatatataaaatgtgacatatacacacacatatatatataaatatatgattgtattatatatgatttaaggattagtcaattaagggtgtattccctgaggtttggctgagtaggaaggagacgattagggttaagattgtgatgatcatgaagagttgcaagttgaagaacactgcttggttgcacttctccactaaatgggaattgatccaaaacactcacattcccattcccattcccattcccattccaattaatattattattattcattctcattctctctacttcttctatctttgtcacatgtacttgattttgctcctcataagctgctgctgctgcttggtgctcctttatctattttcattttaaatattattatatcataacatatataattaattattcgtaaatgtctataatatatatatatctctctagaaatatgtgctcttactcttaccagatgaaaaatttgctcattatcttgctccaatagttgcttctatatatgtacacatgatcccattagctttagccaatattaatattatttcattgcaaatatatataataatattaacaaatatatatatgagatgttatatgtacagtactaataatgagacttcacctttctttgaagattctccatctgctgttgtaagatttcaaactgcacatccatagataatggaaagttaattaataataataacatagcactatactacacatatataatcaaatatataattaatgcctttataaaataattataataacatatataggtaataagtgttgatgtattaaacttgatttaatatagttaatttttaaatttttcttgttgttattaaagtttttacactatttttatatttactaataaagtgtctaaagttttcttgtttgtttgagtactcttgaattttttagaattatctttcacttgtgttagttgtgagaattatgtagaaaaatgtagaa

SEQ ID NO: 297525 - DNA, 5798 bp, Cannabis indica
aaactaggatccccgcctagccctaaacatttgggactaaaggtactaacagaacaagagtaaatcatttggaatatgttagactataattttgttatatgatcaagagagagaaacaatgactaccaaatgtggtggggatgcggaaactaagatggaactaacagaaatataaatcgtgaggtcaaatgcaccaatgtaaaactataatactgactggataatgatgcagatcgtgataacttgctcctgaagcagtgtacaaccttgttaagtcatgatccaacaaatcagcagcgggaagcactgatttaacatcttcagagagacatgagactccgtctaggtatattttctacatattaatacaacaaattaataataatatcacacaaagataattacttctgcattgtagaaactaaccagtttttctccataaatttgatgtaattgcatggcaataatcatcccggatttaggataccaatgatgtagtacagggtagaacacattcatctctctctcaacaattaacctaagttcgttcgcaagcaaacacaatggatgctttctcttcatctttgactcaagatctatggtacttgctacctaacaaataagatagtgaaacattttagctttatcactttacttaatactaaagagcaaaaaataatggtaagaaccaggaacagtattcaccagcttgtatgcagcttcagtagacctctccacatatgacttgattattttagcagaagccttgtttgaaacattcaatgatgtgaactgcatgcatataaagttatcagaagctaatatccatcataggaggagggggcaagggaagcggtcaaaggataagcagaaaaaaaaaaaaatctgagctctaccgatgagattgtgcattgagaagtcatgcattaaccacaaatatggattaaaacagtgaagactgcaaaaaggctaaccttgatctcaccataatgatcagaatttggaattccaagtattacagccaagctcacaaccctcttaaagttaccaggttgctgaaatgcaatctcataaagttaacagtgggaatactgagattcattaaccatgtaaagagattaactaaagcaattttatattacctacctgcctgaaatgaagatgatagtcttgcaatttacaatcacaccaattgcctattatgaagaaaatagcctgtatcaagcttaactttacttccttgcgaccagattgcctagagcacaataagctttctgcataatttctctctgtatcatcctctttgactgatgcaactttctgcagctcaagagttgcatattccaagagcttagcctcgtctgtttgagtaaactgcaaatgagatgaattcattggtagatgatttccaacaggactagaacattcttttggaatttagcaagttataagatgatacaagcaagtatgaagttgaacgtataatccatagccctcttgtaaaatattaccaggctttcctttttcctcaatctaataaatctacatcttgaagactgaatacaatacaacagaaatattttttttcttttacatgatcaagcaagtaaattgccatactttaggtttgaagaattcagtttaactgttatatcaacaagcatgttccatgtataaaatgtttacctgtaagaaaaggacccatccaaatatggcattatgaattttctgagtgatgcccaatgtagaccaagtcaatttgataagtgtcaggatttcatcagcttcctaaaaggtcaagtacataaattgagcttcgtgcaaacacaatatcaatgtatcagttgttaaagattctcaattccccatcatgaagtgcatacctctacgagctggccttcgtcaagaatatcaaacacacttaaaagtagtttctcatacagtctaacattcaagtgatacccagcagtccaatagtaggtttcactttcaatgccaaattgtccaggtagagatgataacattaaagctacacgtttgatagttgatagaacctcaacacgttctgaaggagacattgtcatgtcccactcctggtttaagcaaatcggccatcaattgcacataaattaagagatagttgtggcaagagtacctaaattatactaaactacctaagatcaatttttagttgcaccgtaggtacctgctgttagatgttgatgtgacagattagtttaaaatactatttgtggcaaaatacctaagctgtgcaaaattggctatattcatttatgacctctaagttgtgctaaaagtggctatgttcatttattgtcacatcaacgtctaaaggcaaagttaacaataagtacccgcggtgtaactaaaagttaatcgtagaaactctcgtcaacaaaatataaaataaacttcgcccttaagtacaacttaggtactttcgtcgtaaatgtgcctttaatataaaaaagtaaagaaattttgtatttcatgtggacatatttctttcaaacagttacaaggatatacctcagcattcctgatctttgcaagtgaccgtttaatggttaggtgctcagacccagcaagactggcagaatcatggagaagttcttccaaaataccagcctaaaagagaagttgtgaaaattatgtcaatcatgttcattgccaacaacagcatgtgcaaggtgtctatggattagaaaaactctaaaaaattaaaattcttgtcctagggaagaccatgagcaaaattttaaaaaaaaaaaaacaagtaatattacctgtctactcttccactgcaaataagacttctcgtgcaaaaaatcagacttgaaagtgctatttaaaagacctagtgcaatttgaggaacgtcagctttcccacaggttccccttgtggaaaattgcaacctacgcctgatgcaaacatccattgcttctgaaatctaccaaagaaaaacaatgcacacgtgaaattttatcataaaacagaaagatatctaatagccatatccctcaagtataatgaaataatgaaaagtgtgcccaaacctccaaaaagattaattttggaggctattaattctgctgtgtacataaatttaaaattggttatttcttctttctctcactgtatggaaggaaagaaaagaacaagtttttaaggaaaactactcgatctaaaaacaacatttggcaataaaacttgattcaatatgctttgtcaaaatagtatttcaaagaataaaatagctattacatgcctagtcagcacaatgcaagtgtataaaaacaacacaaagaaagaggaaacagcaacttgcctgcatctgtaagcggatggtgtggatgagctgtgagtgtctgtcaagacattgaggcattttgtccttcttattcttcaaacctaacaaaaacttaccattcttttctttctttttatgctcaactttatgtacctcaaccctacacaaagagcaggtgtaagggaataaagagcgaaataaatacactgataccacaccggaaagacagcaaacctagagagagttattacccagaagacgagattgatgcaagcaatatttcatatgctgattcccgcaagtcatcatcagacaatcctttaagaatcccaaagccatgcatcagtttactaaagatgaaagatcagcaataaaaatacaaatttaatcttttgcatatgtatcatatattgacactcacacttttggaacataaaatttccattggaaaatgaagatattaccaagaattaaacacaaatgacctatacctgtactcagattaggcaatcctaatggaggaattttcacattttctgcagtctttggctgcatattcgttgctactttatgtttaagaccgtaatcatccccaactgtcccattgtacttcccatttgaagaatccatctctttagtagaacatgaatctttttcaacggttgcttgaactttgataggaggaggtgcgcgcagaggaggagatctgacaaattctgggttggtaagtagaaaataggaactccctgattgagaatatatctgtcgaaataatgcagcacggttaaaactaaattcaatacaaggcaattaaaggactacagcgtttttacaaaaataaaacaaaaaattaatgcttcttggactatcactctgctattattgaaattttcaaacgcttcaaaagtccccattatcttttcacaaggttaatgttcctcgttcctcactacctgattttaatatcaaatttagttgaattctctttgttatatctcttcacaggcgcgagagaacatgtcaacaaaacaaagagaatcggaagtttaccatggatggatgattgagctcctccaactttttctttctagcttcagaagcatcaaccacactacctgataaacagaacatacagtagcaagtcaacaaaattaaccaaattcactacgaaaattacagaaattcactaatccaattttaaagcacattaacaagtattcgaatcagtctccagctcaggaaacttcgcaaaaccaaggaaacaaagttaaaagaaccgaaaaaaatcaacaaaaagcactaaagctctaaaattcggacaacaaattaacagtaagacgaacaaacagtctcgattcagctcagcgaagtaaattttgtcagatacagctcattaaattttctcgataaccaaaaagaaatgaaacggtgaagcacataccggagatgatacaatcgatgacgtaatcgacactaagattgtcaaaatcgatgtccgaaagagaagtagctgtagtgacgccggaagacgacgacaagagaaactccaagagcttccgacggtcgcttcggtacctgtgtaaaatggaagcctcctccatgatcgtttcttgctacttcttcatcaccattgtcttcttcaatttcaaaactcagaacagagtccacttcgttcatccgaggagcgccaaagagaatatatataataattgtaaatgccaaaaagaaatggaagacaacaaattcatttcgaactatttgcctttttggttttagtccttacattattttgattattatattttgccccataaaagtataataatttatttatacatacacggcctggcaggcaagcgtgttcaacgcaggtatatatcagctatcttgcatgacgactttaacattttgtcccatcaacttaaaaagtgacacgtaagcaagtaaactgatctccgttaaagtgctgggtttccgtcaaaattaaaattacatataagtttactgaaatctccgtccaaatcaacttccgttagaatgatgtctttattttagtacaaaatacaaatctttgacggcaaaacacctcgttttaggtgaaagtgaaagttacatctacatgttcctacactcaatatcttgtaataatttagatataaaaaatagagaaatttaccggaaaactttcttatattttaattttaatatgcctaacttttatttgtggcaaaattcttgaagtttattttttcttacaaatttaaggtttcaattagatattactattaaataccaattggattactactgtatcgacttcaaaattttaatgttatatatacacaggtgtatacagtagtcatctagttgatatttaacggtaatatttaactcgtgtgtcaaatttacaaagaaaaataatcttaaggggattttgccacaaaaaaaataaggaggttaagtgta

SEQ ID NO: 297526 - DNA, 2332 bp, Cannabis indica
tttttaaaaaaaaaaaaaataacggaaccaaacccaaataaagtacaacatgaatctgaacacagcacgaattattgagcttgtgggccgtaccgggcttaacctataaaattattgacacatcataatatgacataacatgatccatatttttttaaaaatactaaaaggcatctataagattgttattggtgtaactcaataccggggtccaattgttttaatgtaataaatattatagaaaattgataactaattataaagttatacttcatcgtattgttagacactataagtatctcatagcaatgctcatatgttttttatggcataatccatattattttcttataaactaacatgacacgactcatttttgaaaaccaaaaagtataaatcgagctaacttagtaaacaagtatttaaactaattatggtgtgaaactagtagcttatgaggcatgaagtaacacaatactaaacttaattaattaatgaagttaaacttcattgtcaactttttataataataacatatcaatgccacccatttcttactttcaatggatgccattttcaaaccatttctctttggcattgttgtagtaatctaatagaagtatatatttttttaagtgatgtaaatatattataattaagaaaaatgaaaagaaaagaaaaccaaccatatgctatgtttgactattttgtttgagaccactgaccagccagcaagtctccaacccttccctctagtgaacaataatttatccctttattagaacatatgatttgtttggtggagaattatttttttatttatttttatttagaataaatccattctacattaaaaaaaaatcgagttctctaattagttaaataaaataaaaaataaattgtggctaaaataattaaaattttcaaaatgttattctttagacactcatttttttatggtaaatataatcaatgattttaaattgtcgccttttgtattattatattaattttttttcagtaactatatatcacatattttcaacttgttacattttaattttctgaaaacaatgactaaattattaaattaataaactcatgtcacacgacttaatagaactaaacaatatcccccaaagataatatgaaaaaaaatttaatcaaataaattgttaatgtatccaaagagcatgtttaattaatttatgtgcaatcatataatttatccaccgaacatgaattatgaataattgaatactcttagaaatatgaataacaaacttgctcttataaagtaactaataatgattcaagatcattgaaaagtaacatctcttaaaaaaaagcaaacacaattgttagattgtatatttcatcaatctaacactatcataagtgatacaaaatctgtttaaatcaccataaagtaacctataaatgaaaatattaatgaaacatatcatccatcattttagaagattgagtataaaagtataatatttttagaaaaactgagtatactatattttgccaaaacaaaaggctataaagtagtgtaatattttttttaaacattgagtattttagtcataatttaattactctaaaacaaaagataataaatttcatctaccgtatcagttcttaattcgtgattgacgaaactaagattaggacataaagattataccaatatatctataaaagaatatatttttttaattttaaaaagatcaatatatatattaacaaaaaattagatagagtatctgcaaattaaaccgattaatagaataagcaacgacgctcaaaataaaaaatctaaattaacagccttacatatggtgtaagcaatatttagacaagacaaccctattagagttactcttagctttgtcatttgttcttaatagttatattaatttaaaggtgtatttttggtgtttatcttccttgctatagctggcttaaaactttaggtgtggcctaactcctcccaactctacattaaatttcattgtaataatctataagaaaaatggttaagctattattataattaagtaggggatggagaaaaatcatggttatcatttctattgttcggtatattatttattataggcttaatttagaaagaaaaaaaacacaacaacaataaaaaattacaaaaatacagtttgtatagaattattaatatttttacaattttttaaatttatttacataaaatataggttttttttatgtatttttatgttgtatttttgttattgattttttgttatttatatgttattttttttatgttgttttcttgtatttttat

SEQ ID NO: 297527 - DNA, 2358 bp, Cannabis indica
ggcataaaacccaacaatcactaataagttaagtaggcctttgttgactgagggagagggccctattgactctagtgtgaaatggtttcatacaaagttgctaccttctacttcgggatctaagacgaaaaagagaaaggctactaggagtgtttctcccattgttactctggtgcacgatcattccctctcttcacctaattctaaggtgttggccccttcgttgggcaagagcgagattgctcccttctcttttgggaaggaatcccccaagaaggagtcatttggttccaggaagttgaggagcaggaagtcggctaatgacaaaagcaagactgttactgtgaaggctaattacgacaatggcaacacagaatcaggtaccaactccactatttcttcttctgagtttgggaatctacttgttgaagttatagttgatcaaaattttcaaatggatgaggaggcggcccttagcaagccccccagtcccaatgaggtttctttcttggaattgtcgcggtgttgctagaccgacggcaatccaaactctaaaggcttgggtttggaagttgaagttggattgtttatttttgatggaaactaagataggggtgagtcagatgagtaatatctgtaagtctttacattttgagaatagttactatattccttctactaggcgtgtggggggtatatgccttctttggaataaaggtgtggatattgtggttactgaaactctcgaatcttgttttgtgtgtactgtcaaagactatgctatctcgaaaacatggtatttggtggctatttatagaataccctatgatgactgtaaaagggccttttgggatcatttggtagatattattaattctcttgatggttcttgggcacttatgggagatcttaatgttcttctctctaaggaggacaagtcgggtgagtgtgttttttttttgtatcgggatggtttcactcttcaaaagtttcttctatccacttggggaattgacttgggttttagaggttgcaagtatacttggctaaacaaacgtagtaatggccacttggttaaggagaggttggatcgggttattgtggacactaactagctggctgattgttcctcggggggagttcataatttcctgataacttgctctgatcatggcccgattttatttgattttgttgtgtttaaatcaaaaggctttcgtcctttttgattttttgaggcttggttcgatgactcttctagctgggatgttatcaaagaagcttggacacgaagtgctttgtctgaggaaccgtggtgtttggggaaaataatcaattatacacagcatgcgctccgttggtggagtaaaaatatttatggggaatgtgacaatcgaattaaggagttagaacttgagctccaaactcttcaatccaaagaagttcatgatgttaatgagctggccgaggaaactattttacaaattaaagactgggtgaaatctagaaccgaaaggagtctatgtggaaacaacggtcgagggagctgtggctcttacgaggtgacaggaactcttcgttctttcacgcctccaccatggtgagaaggaagaggaatcacatttggaatcttaagaactctaatggctttctttgttcgaatgagagggagattggagccatccttaatgactacttcattaatctgttctactctagacggtgttgtctcttatgagggtctggatactttgattaatccatccatatctcctactgcgaatagtttacttacggttgtgcttgacaaggaagagatttattctcatgtttttcaaatgcaccctctcaaagagtggggtcccgatggctttttggggtgcttttatcaaaagtgctggagtttggttggggacgatgtggtctaatgcatccaacagttttttacctcaaaagatttggagcctgggcttaatcactctttcatttgcctcatacccaagggggttaatccaaatgtattgatcgatttcagcctattgctttgtgtaatttcgtgtacaaagttattgcctgtgtcattgcccaacgtttgagagtggttcttgaccacatccttgcccccatacaatcggatgtccttcctggaagatgggttgcggagtcatctatccttacttaggagattgtgaatgttattaagaagaagaaagggaaaggcggcttgttggcaataaaaactgacatgaacaaggcttatgatcgtcttgagtgggggtttctaaaggctgtgatggagaggttcgggtgttgggttttatgccctaaataaaactctttacaatctgattagttatc

SEQ ID NO: 297528 - DNA, 7817 bp, Cannabis indica
gaatgtaaaaggagataagaaaaaataagaagacaagcgagcttgttaaattacaattataataaaaaaaatccctagaggtaggtagaagtacataaaatgagtacacaaaacatggaaattcttaatttaaacttttgaaaggctgaacaataacaaatcgattaaacaatttctgttatgaaaattataaattttgtagaacttgcagcaaaaatgtagagtgaatgaatgttagttcgttactctaacaaatatgattggaaagtgtcttcacaacattaattgaacttaaatcataaatactgtatacaaaaaagaaaaacttcggaactataaaatcagcatataatgaaaattattgaaaatgcaagtcaacgagagttaaaggtcataggaggatatcacaaaacacaaattgtaatagttgaaaattataatcatattcgtaataataataaactattctagttgtccgcctaaatttgtgctactgctgtttttagtttgggtttttggcctgtgttacagcaaggttccctttgtatttttcatcataaataatcaaagtttagtttctatttcaaaaaaggaaatcaaccaggtttcatcttcataagagtgcagccctaaatagaagaataccactcaagtagtagttaaaaacagggtaacaagttgtttaagctaccaaaaaatatttagaacaaattatgtactgcaaaacaaaagcaacataaataaacagaaaaccaatgctaaactgataatataatatcatcaaattggaaatgtcgacaacatagtttgaaatataaacaagttggaaggtgataacatagctttggagacaatatatgagctacagtcctacaagaataatagggcttcagggtctaaaattatgtatagcataaatggccagtagacaaaagatttagttaaatctggtattatgtggaagggtgagattttaactattttagaagattttgtcagagaaaacggtcacttttattaatacgtaggtaccactcccacttatgttctcctctgaaggggagaaaaagtttagtcattcttagaagcaaatgtgatggggagcaagtccaaaataaaactgatgtgcaatgttcgaatcaagagaagtaataaccatttatatccatatatggaactacttttctttcatgtgacaccacaaaaataaagtagaaacatttacttactcggtaataaaagtagtcatacaatcggaggaggtggtatttatctgcaggatcgtgtttgttgacatacttaagtagctttatctcatcaaggctttgatcaaagaagtccttgttgttctttataatcttcacacaaacgtccatgcctgtatgcaaatcatgtgcttgtatagctttactgaaagcggctgatcccaaatactcagtaacatgatagcgaccagctatcactgaatttaacaccacgtgaaagtttttatcctcctcaaatccagttctgattaacaaaacgtatagtccattagtcatagcaaatgaccataaaaaaataagttacaggaacgaagcagttttctttaacagcacgactatgaattataaatagattagagaaaagagaaatttttacaatagattcagatgaagacatactctgatagaattggattcaagctctcctcgtgggttccttatactatggagtttaatttacaatttggacgaaatctctaattttttatatttattttgtcttcgagaacagattattatcatagaattttcgtcctttaaatactctttcagactacagctctgagaacttggcaaaaaatcagttttttaagtagcaacatcaaactacatactttttccttttcttttcatcttatatatttatctaatattgataatagtactaaacgagattcttggaatcacaagtctaatgaactactaaaaacacagaaacagaagaggatactttcaagaataacatatcctgcaatgagttacttaggaccaccaattcagaaaaattacaagccacataggagccaataatttagaaaaaaaataacagaagtgcaagaaagctagttcttactgtctcaacaaactaagagcaataaaataaaacttacacagcaaaacctcagcaattacaacctcaagctttctatataaataataaattatatactttttatatcttaatatatatagaattatataaataaatattttcatacttgtcctttccaaaccctacatttgacaggtgaaaaactctagcaaatctatctcgggttctatatgattatagaaaacaccacaaacaatgctagacaagtatttcttactcaattcccaacagattagaatggccttttttaataataaacaatgcattgaaatcagcttgaaaggaaaccatgagatcttagttttgttgacattaacaagcggttttatggctttcaatgataaccttcaataaacacctatcatgtgatttcaccatattagcttaaaaagaaaccgtgagatcttagttttgttgacatcaacaagcggtttgatggatttctatttggatataaattttttccagtcataatgataaagcagaaatatttttcatcgaatgaccaagtgtgcacattgcttgcaaatttactatcaaggaaattttggagtgttgatttgaaggaaaacatgactttgttcacatttgcataaagagaggcacaaacagatataaaagcatagagaaaaaccagaaactttcaagtaaacaaaagcagtggtacccaaaggaaataatcgcccttgtaaagaacaaaacttcatcaaattatatttccaatgcatagcagttggagacatacctaatttttcctgtggacaatcttaaggttgaaggtctcgaattcctcctcctgagccttaatttgccgtacttgctcttggacagcagctgcctcttcatcctcaagtgatgttgctgcatcttcctcccttgagatgccagctttttcatcatcttcttcctcagcatgctctctttcagcataagcataatttgagagtgttgagggagatgaattagtggacctaacagcagtagcattattgtcatcccgagaactcttggcaggtgaagaatcagtgcttttccgtttccatgacgagagcatttcatcggacctcattagctcattcaggcattcatcgttgtcatcaccagcagcagcattacaattgtttgaccacagagatttactagaacttgtcggcattaattgctcatctcttgatggtggaggaaatgagaatcccccgtctgtaagacttttcatctccataggcttttccttactattcccaactatatatttttttgactcttgtttactaattttctttttttcttttacgtgcttcatgttagaatcatgatgatgctttcttgatccaccaaatccaacatcatgatcttggaagtattctagatccccttcgctactacctccaaccaaactttccctaacttcactaccaatatctgcagcatcactgttaattcccacaccaattgatctaacagaaccatgctggtcctcttccatgcaaacatcatccagccgttgccttccactttcattaataaccttcccatcccccaacatgaccagctcatttgtctgagtcacaaaaccctgccagacaggttcggcacgcatcaaattcagttcttcttcatccatcagctgcccgtcatattgagctatcaaatcgttatcatcattcctcccatatagttctgtcaccgataatcctataggatcgtctgaagcagtagctggttcaacattttttgcttgaaagtactgctcaccagaaaagtaagaatcctcctcggcaaaagattgatcatcatcctcatcttttgttggacccctttcttgaggatctgggacacttgcatgcccagttcctttttcattgtcacttgggtagtcaatttcatgagccaaaaaccaggcttcatcctcaataggttgtctcatgtatcccacatcatcatcgtcatcatattcatcagagtcccagtactcatttggatagtcagaaccacttaaaccatcaccaatagtagcaaaaccagaaaccagatcagaagcatcttctgcaatcccctgacttactgacagccaactgcttccagcggtcctcctcccacctagtccaatattaaaaagtatcagcttaatccttggcatcatgataatccaaaaatatcagcttcatatacatatatagagattatgcataaatatagcatcataaaccctgatcacttgaaaataagtttgtgataggataagttggtccacaaattacaagtatcagaatctatttcaataccaattctgtatgaccttctgtatgtattaattatacacaaaaatagcatctataaaacctgtacattttaatacattatgagcggatggagggctacaacacgtccagtataaagtagcaacaagtacatcaaaagaaagatttaaatggttgtgtgagtgattttcaaataagaatatcaggccctaacttgtgtaaccacatcagacaatcagaacagttatgtatataaaataaaaataaaattgaaaaaaaaaacagtacaagtagtgtaagtaattggagaccaaacttgattataacaattcacagccaggctccaagttcatatcagtgactcatatggcaaaaggaatttaaatattcaaaaagtacattgtaataactggaataaaaaaaatcagggaaagtatggcctttttatttcaaaatattggaaagtatcagatcggtacttgactctaatataatgtttatagaactaatatgaaaaatagcaaataaacaaaagataacatgtttcactcaattatcaaaatacttttcaaggaaatcctagtacagaaatgcttccactaagccacaaagataggtttgcatacatagaaataagaagtaaaataaatgcctaaaaatgtacaattcaagaagagaaagcattacaacgaattgtcaaacaactacagaaatttcaaaatcaaaggaaaaaaggaggaagatgcaatatccagttcaaggtagaactaacctgcagagctaatttcctgcccgacaggtacatctagatatgatcctataagcaaagcgttctcagcactgctgagatttgtactaggtccatctctatcatatttttcctcccaattaacactcaataacttatcttctgagtctgacttaagtttgacaggcggcaaccttggaaaatcttctttatgattctcaggaaaaactaagctgctcatgacattgtgctcagaacttccttgcgactttcccaagtataaagccctccccacctcatccacctgctcctttattgccaccctaacgtcagttacttctgcttttctctttccttctttcttatcagagccagaaccgctatcattaccagttgaaaaatcacccttagagaatggaaaaacagttttaacagaacaatctttccacacgtcagatgatgaatttgcagcttcctcgccccttgaccgtagactatcagtaatattttccttagagtatgcaccggcaaccttatgttgctgatcaagttccttgggttcactcacactggttctgttgtacttaggttcctcaacaactttactggtacttcccacccaagaagttttcttttcactgtgaaaactgacatcttctccagatttcgcaatgccttttgcattaacagcagaatcctcaccagcgccatatggatttgcagtaccattgctagaactatacttccatgaatacaaatctagcacagtgtcctccggacctttataaaaagtaaagcccttgtcgctagttccagtagtttcatttgccttattccgctccccagtagaagaagaagcagtcttccatttgctttcagacccatttctaccagttccacactgaatctcttttactatgagttcctttgaaatgtcactggaattccgagaagacgtttgattttcagcaaccggtttgtccccattctctccatccaaagagttgccagaatccttgtcttcaagtgcaagtttctgaagaaaaccattcaaatcagggcgactaccaagctcactccgtaaagctgcctcagctctggtgaaccgatttcgccgcaggaagtcaagaatcaaatcgaaggaattcgtgtcactcattgtttaccaccaaaactgcaggcactcaaaagagaagcaccccgccaacctgagagagccaccaacaaaatctcatcctataatatataataaattagaaagaaaaaaaagaaataactgacattcaatgctccattctctacgtatacaaaatgccccaagaataaacattaaattgaaaaaatcattgaatttattgcgtaaacttacctcgtactatgctacacccagcagcaacattttgtcttctaccgtcctgagcaatggaaagaaagatgaaacaacactcgagattcagaaacccaaatatagtttcatttcgtagacatttcctaatcaaccagagtaagcagaaaatggaattagaaaaacaaaatatgcatatgtacacacacaaaataaagtcctcaaaacttagacctaagttgtaaaaacggaaaatccaacaaaaagggcagccggcctagctcaaagaccaaaactagaatattcccaaaatggatccagcatcaaaacccaaatttcaatacccatatcccaaattaataaataaataacaacctcaatcttaaccccaatttcattcgagggtttccgaaagtaagaggattcgacgaacaccgaaaaggaaaaacaagtttatctcccaatgcacatacagaatcaagatctgaagactcctccactaaatatttttgaatttagaaagtgattatgggttgtaaagaggatcaaaacatagggtccatcacaatatgaaattaaaaaaaatatatatatataaaaaaaatagatgaagccaaacctggtgagtggggtctgctgaatttatatattgttgtgtatgtaaataatacagatatatatagatatattagtttatatatatagatgaatatgtatgagtatgaggggtctcctttccttgtctctcgttagttttgtgagtgtctgtgtgaggtcttttttttatttttagggtggaaagaagagaaatggtggtggatggagccaagcttaagggattttggacataaacaacataataagttaatgcaataatacatctaaatatttttgcacttatgtacaactttacccttccctctcccgctcctcaaattaatatcactctttttaaaaccattttactgcttctcttagtacacactactttttctcctctccctttttttatcacattattaagaataataaaaaaaaattgccatataatcttatacttttactttgctagcaattaattctaaaatcaaaattttaatggcaaaatactcaaacttgtattgtgttaacatttagttttttccatctatttttgacggttaatatatgttggattgtccacatatacatagggtttgtccacgtagtttacacatgacacaatttatttaaaaataaaataaaatttaaaataaacaataacaaaatttttttttttctttttcttctttcctctctctctctc

SEQ ID NO: 297529 - DNA, 4656 bp, Cannabis indica
ttgacacttcaattcgataattatgttccatatactatactagttcactcaactatggtaatttagtattgcatctctcttatttttttaaaaaaataaataatatttaatttttttatattaaaaatattaaattttaaaataaaataaataaatataatgtatttgaacctccctgtctatatttattaattaataacggaagtggtagtaatagtataagagaattgtaacattaagtatttttgtcaccaaaaataaacattaaatatttaagtatataaaataaaaaacattaggtatgtataccgcaatttatccttatataagtgtagtataatcataaatcataaattactcacacaactaagtagtattttcctacatgtccacctgataataatctaccgaactatatataaattaattttaatattaattaattaccttaagaatatcagaaatagttgtcttatttgtggtttttgggttttgagtggcagcagactgagcaagagcaccaacaccaccaggctgcgttaagttacgcccagttgctctcatctcggcggcttgtattgcggacgcatcactttggtcaacagttttgtcgcccattgagagtgcagccgcctcaagggcttcgcctatagtaacggagtccttatccaaaaccgctcctggtgtttcgcttcccaccactgcctcactcaactccctcaccacctataaatataaataattaaaattaaaaaaataatttattattctcgtaaattttgacatgtactaaattatgttcctgaacattttaagtcgttaaaaataatcctgaacaattgagattgttggatttaaagacttttatttaatttcattcaattttactatttcagtaattgtttatgtactaaattgctaccagactttgatatctaccaaatcatgtccctcgattttaacatatactaaattatgacctctgaactttcatccgtgttaagtttttttactaaaataaaaaatattccttaaatccaaccatctcgatagttcaggtgtatttttaaccaccttaaaggttcaatgggcataatttgctacatgtcaaattaagtttaggaaccaaaaattctaattagcatttttgccacttgtaccaaattttattctcaaactctaaattattgaaattattaaattatttttatttaattctattcaagtaataattgttacacatacaaaatcacgttaaagacctttcattcagaaagaaaaactaaagaaaaaaaaactttgaattaaacaatcttcatactttgaaacaaaatttaacagtttaaaaaaatttaaaacatgtcaaaattaaagaaaaatatcttaacaattatattattacgaaaaaataatttgccataaatttaacgataaataaatatccaattaaaaacatttacgctaataatattttttttttctaaaaccgctaataatacttattatttggccaatataacacttaattattatttactgaaaatatatctaaaattagttagacataatatatatttaaatattggcaagaatacattataaaaaaatatattttcactatttaaataataatatatagaatatactaaataaattctagaatttaaaaaatatagatctaatgaaatagaaagtaaatattttttttattatatgaatattttacaattaattatttttttcttttgaataattatttttaacgttttctaattaaaagtgttctctaattaaaaattttaaaagtgaaatatattttttaatttgaatattaatttaagtaatattatgtttaactatgtaagtattataaaatattaatttttttttttcaaatattataaattaatataattaatcacctgaccaccaatggcttcagtgacgacgcggctcccgtgaagagttttttgagagacggtgacgccctcctctctacccacgtttgatgcgttgttatggccactcaagccgagtcgctcatttagagcggcagccgactccatgaccgcagccgagccaccctttagagttttccctataaccatgttctcagcggcttgcatagcggctgcgtctctcggcgcaataggcctagacgctaactcaccctggacgttgaaaacgtcgccgtatttgatggggtccagctgttcaatctcagctgctttttctggtaattgtttctggctcattatattaatatattggttcttatgatttattattaactcttttaattataaatgtttttggtttttgaagggaaaattctactagaagtactaaaactattgattgatgatcaaatacgacaaagcttggaagtttttatgtaataatacgtatatatttatgatgtgaagaagataaaaacaatatttggaatagttgggaagagtggtaagtgggaggctgtattggattatagtgtgacacttggtttggtgtgatctaagatatccacgattccaccacgtgatgatgcatacgtggttacccttataacaattacagctagccgtacaacacgtagtcttagtttttttgacatggcacaaacttagtatgagtaagattttatatgaaaaaaaaaatatttttaaggaaaatacaaattatgaattttttcttacgtgaatagattgaagaatttttatcttatttcatttaattttattgtttcagtaattgtttatgtactaatgtctcctgaactttcatgcatgttagaatttttttactaaaattagacaaaaatccttaaatctaacaatttaaatagttcagggaatttttaacgactttaaaagtttaagaacataatttaaagtatgtcgaaattcagagagaaaaattcttaattagctaaaaaaaaatataaaattaaacacaacacaataaaaatataaatttaaacacgatacaatataataagaccaaaaatacgaataaaatattacttaaaaacataataaataacaaagatatttttttgaattagatgagtatgtaagttaacttcaccatctaattcatagctttcaattttgtattttttttagtaaaaatgaaaattcaaataatttttaacattctttttaaaatttatgaaagttataatccaaattattcatataaaagtcgtataactaaaaattgctataaagtatgatagaatgagtgaaagagtcctcttatatgttgcttgtggccattttctgtagcccaataacaaacaggcccaatagtccatttttattggcccattaatggtgtcaaaatttaaacctgttgccgccatttttattcaaacaaaactcatcatccaccactttgaaattgatccaattctcaatatagaaacagagcctttcttctatatttctctgtacttcttttctttacttacaatggatcttcgtcttcatccaaatccaattcaaccaggtaccatttttcactttcctttttctatattcattgttgaatttctaaatatttaaccatatcaaaattattttaataccaaatacaggtaaaaacaagcccctgaaaccaccaaataagccgattcagaaaatgcccaaagcttcaataatcacttccacactttccaggtaaacattatttctcatttcttaagtttgattcattaatttttgaaatttcacctttatttttttttcggttatttaattaagagataagcgagttttcggaaccgttcgaaactccaacaattcaacggtcatcaaaccctcctcctccaatggtgttcctcacaagaagcctcaatggtccaaacccacacgatcgcagcccttcattgaaaacccaaaatccaatttgaaacaaattgaagaagagaaaaagactccaatttcagggcatcgaactccggtgaattcgaaaatatcagcctcgaaatcgaatttccataccgccaagatttgtactaaatgcagattcgatcggctcgaaacgtcgtcgtattgggttggacagatcaagttggctgagtcagtaggcaagcattttgcttcgcttgctttcttcaaactcgcaattgaatcaaaagcacaggtaattattcaattcaattttctttgtcttacatgaataactgtatatatatatgtgtgtgtataaataactgtaaaaatgtgtaatttagccatttgaaaagctggatttggaactgaagaggtatttggggagaaatggaggattgggcgcggagaatgagtggaaggaagtgtgttctaagtacgaaatattattattgaagaagaagaaagaaagtgggaataattatagtgaagattttgattcagccattaaggaattgagcttaactcaaactcaaattactaatcttggagttgagaatgatgatgatggcttttgtcaaaattgaagcctaaactaaaaccattacatttatatatgtttgttttgtagtacattgtcatttttgtgttgatactcattgattgtaaaaaagattgaaaacattttcgatttatgaagattgatagataggcgtttgattgaacttcatcaaaaaaaaaggcgttttgattgaaaatgaat

SEQ ID NO: 297530 - DNA, 3963 bp, Cannabis indica
aattacgtacattaaaactataattttattactatgcctttttttttttttaagatttattcataaattttcaattataaattttttatttatgtatatataataggaaaaaagagacaacgacttcgaagccagagaacaaatattaaaatggtaatcaaaataactcacaacattattttataagtacacatgactgtgtcatgatgtgttgttgtgtacatttcctatatatatatatatccatacataaacatgtatatatatatatacgtacttaaaagtacaaaatcccatttgccactatatatgatatttgtaccatgaatttccaaaattcatgaatgaacatgaacatatatattatgtatcttcttcattttctaaatcttgggttagtgcaagttattataatatataggtgtgggctataattaatgatgtgaataatctatatatattacattatataacaactctatatatatatatataaagtaactaattagtaactagttcctctttaatacacgaaccggaagaccacctctaacggtagcagtcaaacccggactaaaccggggctccgaattcgacccgacaacccgaatatcaaactgtctaataagacttaaagcaacagcttttaatttccattatggccatttctttacccaaacaaacccgaaacccggcttgaaaaaccgggtacttgtacggacaagcgtgcacgaaaaccccttctttattaagccacctctcgggtttaaactcgagacaatcgggtccccatatccgctccatccgacccatagcgtacgggtggtaagtaaccctcgtacccttccgtacaaaagtcccgtcaggaagaacgtcatcttcctgacagaactttgagtcaatttgtatcggcgggaacagcctcatgctctcgtggaccgccgcgtgcaggtagttcatctctctcatctcgccgtatcccgccacaaccggatcacccgacccggatataacccgacccgcttcttcccggatcttggactcgacttccgggtgctccgaaatcaagtagaagaaacttgtcagagccgaagaaaccgtgtctcgaccggctaagaggaagctaacgactatgtcgcgaagataacggtcatcgtcgattgaagccatgaatcgggaaagaaggtctcgtttgtcggcgaaacccatttgccggcgatgggttatcatctgggtggctaaatcgtcaaccattttaacggcttgtttcagcttcttctccgagccaatattgaaaagtctcttgattttccatataataggcgaagccgtcatggctcgctcggctgagattttggaagccaaatcaaatgcggctgcgaattcgggtatgggcatggatagtttcaaacaacccgggtccaacccgaatgaaaaaaggcatatattatcaaaagaaaatcttctaaacacatcttgtaaatctaaaacgacgtcgtttccttcaagaataggaataagcctgttctgaatttccaaagccacaatttcaaacgcgtaactcttaaccgtcgtactcccgagttccaaactcgccatttttctctgaaatcgccacgtgtcaccatcgacgttaaaaattcctcgaccgagtaaatcgccgagaatcatcgaaaacggttttcctttggggtaattatcgaatctggtcttgagaatatactcaacgttttccgggttggccgtgacgatgttgttaaggacgtgaaaatgaatcgttgaagtcaacgattttttgagaaggtgtgtgtaccaatcgcagaggttgagaaaatcggctgaccaagtcgccgataagaatgaacggcagagatggcagttacaccagggtttgattctgaagagaaagactaagaaagagaagaatgagaagaagaaagtgaaagtgaagaagagaagagcaagagtagtagtagccatggaatccatatgaaacgactgcgttttatgagagagagtctgttttgaggtttttttgggtttggttttttgagttatatatataagaagaattattattattattaaagtgcatgaacaacacgtggggaaaaaagaggaaggggtgacgtaagcattaggtttaatatagcacgtgggatatgtctggttattcagtcacttactttacttaaatcaaaacttgctgtctcctgtctggctttttccacgtcatcattactactattgttatgtctcttaaatgttgttttatattgaataatttacactataaatacttaaatttaactcataattttaaataaatacttaattttaatttttactaataataatacgatatccaaaaatataacttacatattattacagttatttatttacaacttataattaaatttagatatttacaacgcaaattactctttaatattttatattttttaaaataataaaataaattatgtattttttaaactgtaaacataaaattttgagcttaatttttaataatttttttacaatataacaaatttgaagataattcttaaaattagttttgtaataacactttttgattgatttattattaagttttattttgacaaaaaaaattgttttaataactttacaaaacaaagagttttaaatgttatttatcctttaatttattttattaaaaattaaaaataaaacatagtatttaattgacttattttgtgatgaaatatggaacactagtcgtcatggcacaccgtttaaataaataaaaataaaaataatttatttttttaatcaaattaaagactttttttatttttgggttatctaataaaatttcataaaataccaaagatatattaattcgtgttaacctaaccttcaagaaatttaacctactcattttgaactgagtaattttttttaataattattaataataatagataatgttaaaaaaagaaatgctaattataattttctatatacaatttacaatattattattataaatgaaattttttgaataatttacaatattaaaaataatttttttttttttttatattcaaatttattaatgcgtgttcaaaaaaatttaaatatatttttaatattgtaaaatatttaaaaaaaatatatatttcaacatatatttacgaaagttaacgctactatatactcctcatgttaaaaattagtctctggatatattacgtacttaaatattttttttttattatatgtagtttttggatgttgtgattttctttcattaatattgtaaatttatttttttttgaaaaaaaaaaaaaaacaaaaaattctaatgcatgcataaatgaaacttacttattactatattgtatatatagtcaaatgtaaggatgaatttttagtattatatatgttgagtctacatatatagaaggcacatatttatatataatataattaagtatttaaataaaatatcgaaagcacgcaatttgacttaatctactactctataattatataattaataattaataattaatatatatttatagtcaaataaattttgtaaagagatgtatataattaatcattagcataaacagtatagtaataagctaaataaacattttattaaatggatatccttgaatatatattggaaaataaaatctctgactttttcataatttatatctaataattaatgtttgaatatgggtatatctttagcttataatttccaagtcaaattaatgtaatatatattttttattaaaggaaattaatgtaattttataataaattaataaatagtagtgagaaataaaaattaattaatatattgtatttgctaattgtacacggcattaagaaatgatcgacaactcaactatgcttgtcttttttttcataaaatgtcttaattattagttaattata

SEQ ID NO: 297531 - DNA, 2499 bp, Cannabis indica
ttacatgcaattgtttcatttttttaatttttcttttgggcacccctcataccccatagtgctatgtctttaataaaaagacattttaaaaatgctccttgtggttttgatagcttgatttcactgatattacgttcatgtgcacaaaaatcccaaccagctgctgcagctcatacttaaaactgtatttatattctccgggccattagtgatgcgtaaataatagttccttttagaaattaaaattccatcaccaactattactattgaagtttctgctgctgctatgtacttttaactaccaatatatttcatgttatctatattttctttttagtttcggagatgtttttgattgtgctagaaacatctctttgatgattaatgtgtaaaagaaaatggcaataagatatatgcctatacatttaaatggtactctaaccgtgtttcacttaaggagaattaaaaattcttttggctcaataagtctttctttgcataaatcaagtgaatttcagtgttgaaaatcttacaaataaagttctttcggcattggcttacgttcaattgaaccgtgtaaaaactcttctttgttatttacgatttttgcatttatgtttcttctcttacaagttgatagatctgattgcttacctgattcatcagaacttcaatgggtaaggagatcactaaactcttagtgaagattttatgtattacttgtgttggtatcatgcctctctttgctttgcagaaggtgactcaatcacatgtttcttcttgctcaaaaattggtgaactattacatcaaaggtaaaatttgaacttaactcgtcaattaattatgataaattgtccaattaaagtaattattcattgcatgaactatttaatggttatggtgaggattataccaaaattatatcattaggtcaatcttctatgaaagcttaggaaaattttcaaacttaatctagtttgaaggtaatattgatgttaaaatatttaagcttgtcatgttgagcaagaagatgaccaaccacagcctgcaaggaggatagagataggagcacatgtgatgttaaccctttgaaatcaagtggctgcccaaaagctggagatggccgcataatgaaatactgtttaggcccaaaaaaatagtaaatgccatgaaagccactctcatagctcaaggtcaccaagtagacccttatggggtgtttggtgtaagaacttcatttggtgggttttagttgagagagttaagattaagggaatatcaaactcaagtatttaaagcgtttgaaatgacaccaaaattatacttaaaaacaggacttaatcataatccttccactaatatgaccaaacttaggtttgctttacattcccattcccaagatcttaaactcgtcttagaatcttaaaccccataacaaacactccattaacctttggcgatgtctagggaacgtttggttggtccctttgtggtgcccatcatacacaacaacacattttgcaggaatcatcgctcttggaggacaaatcataatgttgaagtatccatgttgatgtgaccataagaaggtggcaacaagccaaatatattgtgtgcccccaagaagtatcattatcccaattcgtaccaagggcccaaacgcccacctccttgacgtgttgttgcaaacaactttgggaactctggggtgacaacactaggcgcctcaattacctcaggtaaacttgggattcatagcgcacagtaaagggattcaaacccataaccactcgaaaaagtctcagccaatgactgtggacaattttgatgagttcgatgagttggacgagtatgagcatcctccccccttgaagatcttaatgcttgaagggacggaggtgcctcttgagcaaatggaggttgacaagtgcacgggcgcgacttaactagtgagacaatttgaatgctcgcaagaacgtggtcttgcccaataatgccaaccatcaaagtgagcacgtgcaactcaacttacgagataaactaaatgctcgcaagacaggggttgtgcttggagttatgcctcttgcagggatacctctagcctagaatgcctaagtataagttgatcatgctaagtatttgctttgagcagaatcgattttgatgcgttgacagataaacaaattcatgaaaggacaagttagagacttggacttcgacaacaaagatagtgagttatgctcgaagctcctcgtagaggttcttttttccaaaggatttaaaaatgtcggtcatggtcccaaacaacgtaaccgctgtccatatggatcacctctccttagagtccaacaatactagatgccactacttttctttgtagtcttgttgggtcgacacatgagtggttcaagaacacaaactcaagttgatccattattggtcttagtcatccttggaattcatagtctatacgtctcgcgaaatttgaggttacatgc

SEQ ID NO: 297532 - DNA, 1392 bp, Cannabis indica
acagggtccaatctgtaacttttgcaaaacacagggtctaaaatagtatttaccctataaacaatcaccctttaatataatatattattttattacaagatgttgcaaccaccttcttaatcaaatgtttagtactttttgcacaaacaaaaaaaaacaatgttttggacctataggatcaatcattatacctacaacaaacaatccaacaagattagatgtatctctaatagatgatcagttctcagttcccaccatctttattcattccccttctatttttttcaactatttatttaacaactatttattcattcccctttctctttgtaacttgagcttgttgttcttccccctcaaagttacaaacgtcaaaaaaaaaaaaaaaacaactaataaactttgtggggcgacttaattaatattttgtcacctaatgggatccatgcataatatattcaaaatgatggtaaagagtagagagtagagagtagagagtatagtagagtcacaaagcacatgacaaaacttagggtcccaaatattatgctatacttttgtttgtagtaatacaataaaaaacttttgattgttctaaacagtccaaaaagtttgagacccataccaatttattccccttttctctttagaaattaatttattattttatagcactaatatcgtataaaagaaatattgcaatctttaaagttttaaagaaccagtctcataaataatccacccatccactgttgtactatgcataattattaatttctcactctgtttcccccttcatgctccacttttgtaatactcatttttagaaggatgatgggaactatattagaacttggaaaatttccacattatgaagagaaatttttaggatatacttaagtaaaagtagaaatatattaggtagtcaaattaaattcaaaatgatcactgtcatgaaactataaattgagttattacaatggttaatttgagtcactttaagatgcactaaagtgagttgttgtagtgcaatattaatgttttttattacaaaatgcaatagaattaataatgtcaaaaccagaaaacttcaagttttgttcattatttctcagaatcaaaataataatggcaatgaacatgtgaatgtgagctgatggttcaggctgataatgatgagaccattaaggtccataacgaattttgtccttgtgacacataaatatcttagggaatgatatattatgatttttttttttatagttaattaggattttttctctcgaattttgacatgtatcaaatcatactcttgaattttttttaccgttaaaaattttccttgaattattgtgattgttaaatttaaagacttttgtctaattttagtaa

SEQ ID NO: 297533 - DNA, 4693 bp, Cannabis indica
gcaagttgtttcagtatatccaaggagctaacttgaacttctctaaatagcaatgacagttctagtattaacaagcatagtaccaggagctggacctcgttattcatcagcctattttttcagattctacttgcctgtgaaatttcaagctaacccaccttcacctctccccgaactgaacttgaaactcgctgcttaggagagtcactatgtccctgtgagaaagttttttgggtttgcgagagattccaacattttgagaagctgagaagcttgccaccagcttgagcaagtctccatgggcaaatcacacttctttgcaaagtggctatgcatactctattgcctgttaaagtttgtcttccaagttcatcggtgttatcattgtataaatgttagaatattgatatattgaattctctgtgcataataatcaagtgaatcaaacatatgccaatgcattcttctcttacctttcagtgagatcagtttactacttgtcatcagggatgatgagaaaaagtgtaaacaccatgttaatggtacaaatgaaaaggcattatgagggaaagagaaaattgtattaatgtaagagttctcataccaaaaaatctattcttgaaactaaatgtttttgtaaacaatctatagatatcaaaatgaaagaataaatgaaataatgttgcaaaaaatggtaaaagttagtttggcctgcgtctttgatgaaagtagaaatgtaaggatgctttaggagtagtacctctcttgcttagcataggcaacttgaattgactacggtaaacaatcaataaaaggcatactagaacaacaaatacaaatattggagatgacatgaacttcacatgtaagtttaaagtaccatagattttctccttcgacgaaggcagctcttagtgtccaagaaacatctgcaggaccaaagaaaatctctttatcattgagacacaaagaatcttcgattaaagatgccatgtaaggcactcgaaaataataatgtgcagtataattttgctttttagaaacactgctcttatcagcccaagattttgagcagacatgctgacctttctcctaaacccttgtaaggtttgcttttggactcaaattcaacttgtcataaatagacaaaaaaaccaaataaggcatgaaaatgggcagatgggtgggcaaaagttgtcaaattaagtaaaccaccacttgaagagcataagtaaaaaaaagtataaagtagaatgtattaaatgtgttctaaaataattgattatagaagtaatactctcaatgtttacttatttaaagagaaatgctttgatttctgaaagttattaaaaaataacatatacattggataacatgtagctatagccattcaagtgtaaagtaggccttaacacaattaaacataaggtgtttagtaactaatcgacaatcaatcaatcaaaataaacatgaatgaaactagtgaatgaaggtgttttaaaaattatgcaaacatcacttatccctatcaatacacaagcttgacctatagtcttctccagcaattgatggccagtccaaatgacttaaattgagagaagtagcccttgctagtgttttgcattgctcctagtttggaactcctaccagatataaagaaggatattcaactttgtgaagctcattattattttccctgtcactaatatttagcccaaaacaaccatagcaggtatagttctgcatgaaaccagggctaaaacaagggtgcctcaactctagtacacccccagggctttccctgaggacttccgtatgactgagcaaaataactgatctatcaaacggttcattcaagccaaatgcaggcagcgagtaagctgaaatatgatgtttaatagatccaaatcttgacctcattaagtgggtgtctttgtcttccttcataggagtttctacttccatcacaacttacaaagatgaacctcctaagtcgagaagttccaaggttggggacatggactgattcctagagatctccattttataattcagggcaacccaaccatagtaagcctcttccttcccactcaacactcttatccaactccttttatatgaaaagaatgttcctttacaatagtttcagcatcctccaagacctgcctactttcctcaattactaaccttctcagtccagcagtagctaaaacaaaaataggagtgtccttatgcctttggcaaggtacaatctttacttcccaagtaatcaatggcaccaaagattctctcacaccagatgaattgtcaacaaacttatctaaacctggttcagtttgcatttagtgatacttacaagaagtttttagaagtgaactactggttaaattatcaggataagaatgcaacaaattgggaaattgcatcttatttgcatcttttgctatctattcatacacattgactctcgttcctgtgctaccacaatcaaaaaccacagtataataagaccctttagacaccctatgaccttccctaagtttaaatgtgaccaataacaaacccacagctaaaacaacaccacttacctttattagccttttatattgatagaatctcatgattgataacttgagtttggaacaagatttgggctccatggctgaaacatcaacatgaatgtattccctatagaaaatggttagctccaattctaacaatcttccatttggggcagataaatatgaagatcttaagggaaaatttcaccgaaataaatgtaaatgtcatagcccaccattaagagtagtatttaaaaagacatagaaggtgagtcaacatatacataaaatgagatcaaataaaacagggagcttacttgtttcaattatgaagacttggaaaccatctagggaatagagaaaatgcagaagtgacgttgtttgacgatccaatgtagaatacaagaatcaacccacaaattcttaggaaaaaaaatgagtctgtttgaacatttacttgtccaaaactcttaaattttccttttccttaccaaaacattttacatatctactctaatacaagcaaaaaataacaaatttatttgtgataaaatagtacaactaaatgaattaattattattattattatgttaacttatttgattaatttttataaaataatccacttctgttaatttactctaagatacaaaacatttccctactcacaaaattagggaactaagccctactagccaaattttgtaaattatatatattattcttaatagcacttctgtgaagtgtcatgtgtcatttaatgaggaaaactaaattaattattctttaataaggtcccttgacaccgctttgtcacggaaagacttcttggaaatgaggagtattcgggaaggaaggatatgcagaggcatattcatgcttgccttgacatcccagaggtgaaaagcaaaatacctctcctgaacccgaaagggtctagaaaggaagctcgtttagtttatatcctaagaggcattcaaaggacctaaagcggatgttgaccatcatgaagtgttgcggatgtcgaccttttacacacgtcaggtcaccaaagtgacaattatactttttctaacaaagatcagatcttgtctcctacatccgagcaagtagtgcgcgtaccaccaccacctttttaccagacagacattacagacttttgctcgtaaaggaatgatatttgagcaacatgtggcccctacttttaaaggttgaacctttgcgtgacacgtgtccaagtggcacaaaatagtctccattatccaactgttgcacgtacgggcataatgctacccaggggatcatccagttaactctaacattgcatgtaatttaccctaatagtaggatttgagtagagaccttaggcaggtcatgggtctgttcatacctgccacttagcctataaataccctttacttctcatacgaagtgggcagatcagaacgtacatagctaaaactctatcaatattgctctaggtcttcttcttctccaagagaaacttagggtacagaattagagtttcctgcaaaataatgtaaacacatcaatactgcctttagagactaataaactgactcgtggactaaggttcgttaacacccaaatcacgtacaaaatattcatctctttacttctgtaagttattatttctttagctcctaatgatttagtttccaaaaaatctcgataattatttcggtactttcattgagagctgaagaaagacgtaaaccactgcaactgccatggtgttcacataaaagatggttcctaagaaaactcttcaaggtggccttgggacagtcatggaggaggtaaaccccctttcgtcagagcacacccaactgagtaatgcaagaggcgagaatttaaatatatcaatattaaaataaatagattaaaataagtacctaatgaaactacaaccctaaaaataatgagctttagttataaggatattcaatttccattgttggtcttacatggttaatatttcaatgggacctcgagacactagacttcgtcccccatatggatggtcttagattgaacatttaacaccataaagatctcaaaagataagtattttgtaagttttcgtctctattagactctcccctacggt

SEQ ID NO: 297534 - DNA, 6734 bp, Cannabis indica
aataatgatgccttggtatcaaacctcgagcaaagaaatcatagtatcgtggctttactagcaaagtcattgaatcatatgaaagaatatacttatgactaacagaccaagcagctccttcgatataaattttaaacctgctgatttaagatacaataatttgttattaaaaaacaataataatgtatacaagaatctacatttaaaagtgattattgggccactaataaaatatctattaatttgccagataacttacaccacattgataaaaaatgagctacatggttagatttagaaataatataaatatttacctattagtgcattgatggaccaaatttgattgcttatacccattctttacctcatgaccccagtcctatataatgaacaataataatactatttaatttttttttaagagtttaataatagaaaatgaaagtccaatcactatatagcacaaaaattaattgaatgtaaagaattatatagaaaaagagagatcatatatttatatataatatgaatgattattacctgagcataaagacgagcattccaatcttgtgtttttgaagccctacatttgaaaaggtcttgtctattaggagaaaccgatgggttccctttccaataagcataaggttctcttttaatccatctttttctcttgttaccttcttttaggtcctttaataaacccacccatggttttatgttgatctcaggcctatgagaacatacttaacagtgagctttaattttgaaaatgaaacatacataacattataaaatatgtaataaataagtaagtgtggataatggatatcataccaaccccaaaacgaccaatctggaaacacaatatcaagtgtagtctcatctttacaataattaaacactggagggggtgacgtggcgttgggcccactaaatttttttgacagaacaacaggtggatcaccacaattgaacatcaagtccaaatcagggactctacctgggtatctccgtaacaactgtaggattccccacagagtaaaaatatctctagattggaatgaatgtctataggtctccacgtatgccttaccgttcagtataacaagtctaaagtttgccaggcccattgtttcagcccgttcaaccatttctctagagattcctgtgtatgcccatggcttcaagtcttcgtagatccaacgaaagtattcaggacacgtgggagataatgaatggtcccgatctaatttgggattgaagggagtatatgagtaatttgatgggcaagctcttgtgggtccgtaagcagtgcagttcataagatgttttgggttcttttgagagttgtggaatgatatactgcttagaatattctgatacgaaatacgtacaataatatcaaagaagaaagaaaagtcaatcaaagtgattaatacaactacactctcctagaaataggtagtacaaactacaaagtcaacattattagcattgcagtttggcacaccaattgaataagttaatagaaagatatagaaactgaaaatacaatttgtgaacaaaaaaaattcaaaatacacatttttttttaataattttttatagtatattttcttttgaaaataacccaataaggaagaccaataatagtgttctcaataataagataagggaaaaaataatcggataatttcaaccaaacacaaaaataaataaataaaaaggaaattacaataatagcttcctctttgtcatcattaggccttattttttttttttcttaaacggtgtcatcataggcctttgaatatcaatatatagatatataattttattttcttttcctttcatttctagaaaaataggcttacaaaattcaagaaaattattaaatatgacgagtagttagaaaaaattaaaataaaaaataatatttgtacatttctttctttctttctttattttcaacatacacatatgacatcagaaaattattaacctcacacgacaataaaattagtgcagtaaaaattaataaaatgatgtgtacatattttatatatgtaaaaacttacattggtgttgaagaagtgcatggagagaatggccccaatgaaaagggtgaacatagaaatgaaaagagcagaggttttagttgtatattttgtaattggctgccaaacagtttctttgaatttagcccaaagtccctctgtgtattctctcatttttttctgttctgttcagtaaattatgcgttcggtgtttcagatattatattatattatatataatttaataacgaaaatattcagagtgatttaatattcataacgaaaatattcaaagagattgtgtcagcaatattgttcatatttaagtatttatttgtgatcacacacaagtatatataagtggcatcatgatgatcttaatgaaaaaatatatattgtaattgttaattattaacttagtaaacatgtcgtatactatcttatgagcaattaataaaaaaaattaacaaatgatatttttatatatgaacaatttattcattaaaaatatctttacttttaataacaaaatatattccaatatatccagcttgcgtatgtgtaccagttatgtgacacgtattcaaattaatatgctcgtttgtttggaaagcattttattttaacgcttgtctttgcatttttctttctgttttgttttgcctgaaatatataatgtgtgaattcaggcaaatttttattactttaagttactttttctaaatatatacatatataactaataataataattatgcataccaacttttaaaagttgaacatcaaccattctttgttctatacatcaatttcacagtaaaatgtacattcagaaagaaaaaataactagattttttcaaaataataaaaaaaagtatcttagaaatttttttaaaaaaaaaatataagaccgttaagtaataatatattcgaaagaatttacatttatgaaaataaataaataaatcccgtcttgtgtatatatatatttatagattgcaccatccaccttagaaagtttttaaaactatatatgccctggtgtggcttaattttatatgtttgtttttaccttttagaattaaaatattcttctaaatgtgtttagataaaaaaattaaagttttttattattattttaaaaattgtttttggaagaagcttgtagtttttttcaaaaagactttaagcctttattttaaaccttaaaataatttatataattcttagattacttaaaaagatcattttttactgatattcaaaaagtaattgtcattaaaaaattttatataatatttatttaaataataaaaataagtcaaattttatatttattttatacttctaaccaaaaaaaaaaaaaaaaattttaaaaaactgagtgtactaactttttaacatacagccacaacgatacaaatctacgataattaagccaatataagcgtggaatacatttgttgacttttattgtgtaaatgtgtgttatatattatacttgtgtaactttgcatttcaacatcacccggataccaaacctaatccttaaaaataccattagaaagaatgacctaaaaaaattaaatcaagattaattaccaatctatttggattacttctatcataattaatatttgatccgttagtaaaatctagaacagaaagcgaaagaactgaattttattctgatttatcatagaagtaattatatagatagctaccttacttttttcttcagccggtacgctcttgcttattaagcttggacaaccggttctttctcctccggctaatagctgtagcagctcccaaatcagaaaaaagctcgagatttctgttcaaatatctatatataggctggtcatgtgcatgtataaattaaaatatatatggttacgatcagctgtagagaaaaagcagctagtcaacctaataaaccttatcaaacaatttaatatggatgaaaatcttttagaatatagaaaaattatgaaaaccccaataacgtttgagatacgaaactatgtacgcttctacagacaagagggggtgataagggagaaactagaaagtagaacaacaccacaaggatgagaaacctagggacgtctggttttattaatatttcttaattattacttttttttttgggctgaggaggacattttattatatattatttatgtttctataaatgctataaaagcacagcggtagcggtgttaagtactctcttatatgttaatattattatatatctaattaaatatcagatgttatataatttaatgtaataatttttaaaaaatctcgctgtttgaaagtattatatactaccgtggccaataataatactctaaatcaatatattatattgactttgatgtagtgtttatagtactaaattattttttttttttttgataattatactaaattatttatttggttataaagaatgagcttggaaaataggaagctaaataacaataaatgcaatagaaaataaaataatgtaaatatgaagagtcaatgtgagtgtcttaaatgtcgtcaaagaaaagatataagagaagaccaagactagtagttgcgtgttaacagcgcggaatgtgactgaaaagaaaataaataaataaataatgaaacctacaaagtgagtgcaattttttccatgttccacacatataattatttcaaacaacaattatatagctaccattataatttggcacccaacaatatactaatctcctatttgatgatttttagagattttgaatataatttattgaatcaaaataatattacacaaaatcttacttttagttataataaatttgtgattaaaagtaaaaaaattgtaactaattataaattattattcttatattgtgaccaaaaagtccatgactaaaggtattagtcacaaaaattataatttgttgtgactaaatatatttttagtcacaattaatagttattgtgactaaaattaaattagtgacaacttgtaattaaatattatattttagtcaaaaataattttaaatttattataactaaaagtagtaattttttttgtttgtagtatgagattactttattaaaaaaataataataaataaaatattaaaatcaaaatgtaagtgacctcgtgttaaaatataattcactaatcgtcattacgtcatcctctattatatatataaatgttatggtaattaactgaaacagctaaagtattttttttagtaacatcaccaacaacaacaccaaaaatcatatatatgttaggcaacaaagccggcagagtcttttgtaatgtcttatgcttaaaaacattttcaggtcttaattctaaatttaagatgatgaccttaattaatttcacaaataacatgaaccaaaattttgaaaccttacctttagatcgatgagctggttatattattattaagacagagcacttgaaatattttgtatggttggttcacatatggcacagtcgcgtacgacgtcgtttactttggaaaagttgtactgtacatgtattaataatattacactattgcaatggaacgtattaatattaattgcatttattcatggtattagcatgattaaccattttatatatactcactggatcaaaattttcttcagtataattcaattaagaaatagtacttacgtatgaattgatccaagccaaagaatacttctttcttttgttgcagaaattccactaaataacacaccgcaggatctgaaccacgcgaaacgcaggctgttgatgactaaaaggatcctcaccgttcaacactgattaccatgaacaaatcaaaaccatgaacaatttatgattattgtttggctagatggaaggaaattattcttatggtggttttcttcttttatttcgttactttgaattttgtatacaaggttcggatatatgatcaaatgtactttattgtggtaggaaaagagattctttctttatacattagaatctctatttatatctagtttaaaaaaaaaaaaaaatctcatttttatccatttttgtccatacaaaaaaaatcttggtttgatcaaatttggcactaccaaaaaattgactgtccataaaagactctgttttgttatctgtttaattttgtattgaaataattaatcaattttttattcatttggtatttcaatcttatccatatatgtatatttgtcaaatttttatgttctttaatttaatttacagattttttttttttgacatactgagattttgtttgaacaactggtttctgaaaacttgccatatatacttgctggcttaaatttcccatcaatgacattccgtttttcaagtgtcaatttaagttgtacatattgagtttcgattgtaactttattaggagaaataacagtgtttatagaaacattattatgaattttattgagtgaatttgtaataaatgcccactgtaaatattcagctatttatgtcttaagattttatcaaaatatgtatacacttttaataaagctgcttctaccgttgtatgtatgttatatataagtaattaaattataagtttaagggaaaacatcttaaatcgaattatagtatgagataatgcttaagtagagtcacaaaaaacg

SEQ ID NO: 297535 - DNA, 4174 bp, Cannabis indica
aaaataattagtttatgttttaatatttctttttattatggaaattatgtatgttaatattatatatttaaagtgattataatatatttaatttgaaaaagaaaaaaaaataaaaatgaaataagattttagtgatgtattcattggtcaagtcggcctttctaggaggattttgtggttgttgtcttggtgtttaacaaagaagaaatggggatgaaatttaacataggcattattttcaagacatatttgagaaacaatgactaggtttcgaaaagagtaggagaatgataaactttgcataatttaagaatatgaaattacatgatggtaatgttggttttatggtactgaatcaggtacgcagtggaataataattatctaattatcattgtaccacagtctcaaggatctccacatgtatatatattaaatcttaagaatagattacatgaaagaaataaatatctcttgatgactataagggtatccttaaaatttcttataagttatatctaataaatctcacacagtagtcttccaaatcgatccaccacacacaagaagtagtgtgggctactaggataaagtgtataattttttcttgatgaattctcaacacatgagaaagaactgttcttgagagaaaaataattttccttctctctatagtgtttaaaatttagtgtgtaaaggtccaagcggttcaacgtttctttcaaaggggtgagttcgagaattggtgtagtcaagcaaatgttgttctaattccaaagaaaaaaaaacccagctcgtatggcggatctgagaccgattgctctttgtaacgtcatctacaaagttatcacaaaagttatggccaaccgaatgaaaccactcatggacaagattgttgctgatatgcaaagtgctttcatcccaggtaggctaattactgataatatccttgtttcttttgaaattctgctttacttaaagagaaagagaaaaggaaaagagggttatatagcgctgaaattagatatgagcaaggcttatgatagaattgactggccttatctggaagctattctcattaaattaggatttgatcgtagttggacccgccttattatgaagtgtgtctcttcgacttcttatcagattgttcatgggggaagagagatggggccggtgactcctagtagaggtatacgacaaggtgatccactatcgccatacatcttaattttatgtgctgagggtctttctgcgctcattaacaagtttgaaaagaaaggttggattcatggctgtaaggtggcaaacggggctcccagagtatctcatatgctttttgcggatgacagctatttatattgcaaagctaccatgggagaaaccaatcgaatacaacagttgcttcagactattgaaatggcctggggtcaacaagtgaatttggggaaatcctcaattttcttcagctctaatactgatcaatccctgcaggatcaaatttgcaattatctccaaatggtgaaagttgatgacaatagtagatatcttggccttccaagcactatggggagaaacaagaactcggtgttggggtatctaaaagaaagagtccgtaagtgggtccagaattgggattctaagttcctctccaaagcaggtaaagaggtcttaatcaaaacagttgtccaggcacttcctagttatgcaatgagtgtgtttcttctgcctgttgaaattggaaggaacatggaacaacacatggcaaaattttggtggaagacttctaattctaaaagataaaagcattcattagatgtcttgggaaaggttgagcaagcataaaagcgtcgggggtatgggttttcgtaatctccgccatcacaatttgtctctccttggcaagcaaggttgccgttttctcactcgccccgattcgctagcttcaagaatcttcaaggctagatatttccctcgaggcacttatctcacggctcagctgggtaaaccgagttttgtttggcgtagcatctgggaggctcaaagtgtggtgaacaatggagtgcattggaaaattggcgatggcaaatcggtatctgttctgggtgaccgatggctaccatatgatgttaatccttgtgtaacttcttctcatcctgcccttaatgatattatggttgaaaatttgtttaaagttgatggtgttggctgggacttggagatagtgaatgatcttttcaatgttagagacaaagcattgatttgcagcatcccgattcaagctaatggagagccggattccttctactggtttcttgaatgttcaggtgattacactgtaaagagtgctttcaatttgttgcagaaattgaatggctcttggaatcatgtggatttttcgggtttttggaataatctatggagattgaagattccccccaagtgcaagaacctggtttggagaggagcttcctactgcctgcctacaatggtcatgcttattaccaagcgagttgctgttactagtctatgcccgatctgcgaatctcatgatgaaaccattttacatgctcttgtcacgtgctctgtggcagctgcctgttgggcaaaggctggggtgaacacaactatcacgaccgatatggattttttggactggtgtgccaccactttcgattctacctccaatgatatccaatgcttggttgctgttctttgttgggccatttggaaggctcggaacgataaggtgtggaataacaagctgcctaatgcttcttcgactgttgcttttgatgttacttatcttggccaatggaagaccgctcaaactccattggagtcatctcagctggctgctggggatagagccgagcagtggagccccctgtctcaaatggtgtcaaggttaatgtcgatgttgcagtctttgaagggtcacaaggctatggctttggtttccttctaggaatgaaatcgggtacctaattgagggtgttacacgctcttatttgggagtggttagacctgagttagcagaggcgattggggttcgtgaggccttaagctggatcaaagccaagggatggcaacaggtgacactagaatccgactgcttgttggtcattcaagcaatccggagccctatgagaatgatttctagcttcggttcagttattcaggagtgtaaggctttactcttggaattgggtaatgttttaatttattttgtaaaacgttcagcaaactcagtagctcattcatttgcaagagcttctagtttttatcttgaaccgggtttcaagttgggggatgtcccaactgagttgttgccttgtttggtagcagagattgaagtttaataaagtttcagattattttctttctaaaaaaaaaaaaattagtgtgtaaaaaaagtgtcatgatttctcaaattagacctctatttatagtagtaaatattcaaaatcatatttaatcatatttaagattgtaccctaatcacttctactattttcattttaattttgtaaattccattttaattgttgaacaattcattattcatcatcatacctacattagttaattttttttgcggaaaatacctacattagttattatcatcatgaaaattgaaacctctcatctgaaatttgaaactcacggtttgaaatgagttaaaaactctacttatttatgaacacaaaaaatccctatcaatctgagatatgtagtgttgtatattgtcgaagttggatcttagtgaagctattgaaacccccgaacaccaaaccccttgaatggagattccccccgcgaacccttcgaacccaaacaaccagaccaccgagaaccttcgctagaaaaaatggtggagtttcttctgtgcgttttgatatctttacatttggggttttttggatttttgtgtcatctaagtgttggagttgcgtatttggttttggagagatttttggttgataaaaatggtgagtgggggctgaaaagttgtcaacattttgcaagagagagggtttgaaagtgtgaaagaccgttaaaaaaaattaaagaaacagaaaaaaaaaatgtacaaataaagaaagggaagaagaaaaagaggagattaagagagagatacaagggatttttattagtttttttatttttttagtt

SEQ ID NO: 297536 - DNA, 1820 bp, Cannabis indica
attcagttccagcaagaagtgataaatcagcatttccaggggtaatgtttacatatttatctgaagaacaccgcaactggacatgacccaactaagatacgaagggggcccacatagacaaaagtaccatctcaaagaagacaaacattaactaagcaaaagacaaatgcggtctctaagtagttaagaatggcaacaaaataaacactaaagtgaaactccaatcaattgtcataaatataactcaataatacaacagagagaaaatttgtagttacattggattaggagacgatattggaggaacgtagctcggcatctcgttcacgaccttgttaccatcatgggcacctattttcactgttctactacccattaatcaccatcatagccacttccaagccaccgccagcctataccccaagaccggatccacacaaccaaagtactctgaggaagtcctacaaaacaccctaagaaacaaatatctcagtaccacaaacagaatttaaccttatgttatgtctgattcctgccctatggcaatttccaaactgcaactttagattgaaaagaaagataaagacgcaaaacccacgtcataaaactgctaagataaccaacttaaccttctgagcaaaacctgaaatcatcccatggaacaaaaaccccaaacccgtccgtacacaaattagagccgtagcgaaattcgtaagttccccaaaacccatcaaactaaataaacccttcagtaagaaaagcttaagtttgaagtaaaaggaatactaaccgaaaattagtcggtgacgaaacagagctttgaacactgaattggcacagccagagctaaatctcgaagctgaagttgataaaactgctcgagaaaaccctaacccgtgaagcttcttccagataaatacaataaatttttttttttgacttttggacagtatgctctgttgtattatatattaatattattattattatatatcatacatacatctaattctctccgtacctctttcttctttgcttacctctataaaaggctagcaatttcaactggcccacctcgaattttggatgattatttatttatttatattttaattttctcataggttttagagagagagaaaaagagagagagggagaaaagacgaagaagaagaagcgtgacgttcagaccattccaatctccgccatacgtctttttctgtagaaatacattttattttaggataattaacaattttatctctaaattttccacaatatagattttggcacttaaaatataaagcttgttcttttttagtaaaaaaatacaaagttttttttttagccaaaccatgaacagtttggttagcatctcgacgaacataaaatacacaaacattagagaaattggataaatgatttttaacatcaaaaactaaatcgttaaaagatggaggacaagatgctaagttgataattgctttgacaagcatcagagaatctgtctcaatttgatccacacgcaagttcatttgcaaatcccattgaagagcatggaacaaagcctttgcttccatttctagagacttgaaattgcccacaatcggcttggaaagagcagccaaaacagctcccttattgtcccgaataactgcctataacccaacttgtttgaagataacacagttgcatcaatatttaatttgcacaaaccaggaggtggtgggatccatagagattgatcagcagccctactccgatcccgaaggctaatagaataggaccgaaatcctatgatgttatcccatgctaatgta

SEQ ID NO: 297537 - DNA, 2572 bp, Cannabis indica
aaaaaaaaaaaaaaagaaatggctaaagtgccaaattgatgggttaacaagatgtttttaaggttagcagtattcagcgtgcctccgatcaaagggcctaaattgaatctaagtaagcataaatcccctggatctaatggtccaagaatgccaatggttgcattcaatgcaatccatagaaccaagaacacgtgcattaatgatgacattagtctctcgcttaaatgattagtcgtcattcctcaacctaagacaacacacaccctagaaaaccacgtgacatacacaaacgaagaggcaatcgacatatgtgttacactaatagtatatgaaaagttcaagtgccttcgtaacattttaccatggaatattaagaggccaaggctaatcatggcctcaaatatgatgataagtttggatgagggatggaagcctccgtgactcccaagttgtgaagacttaagggtaaatgatattcatgtttctagatagatgacatgtgatcctcagattaaggccattaaagttaccaagcccattgaatgggtccaaatggatcatccactcagccatgagtgaagttggatgtattgtccaaattccataactacttcctaatgataaagtcggacataatgtcctaggatgtaaacttaccttcaaccaataggcattcaaagagacaaagacaaatatgttcaggggtcatttgggaaaagaagttgaagaggcatctgggagcatatagtgtctgggagatcttcctatgtggcacttatctaacagaagtcctaagaaatctggcggcatgtgccctgtgtcatgcctgcaaaaggaacaaagtaaaaaatatcaactttttgggcaaaggcccactactttgacattctctgtcaacaaacaacgattcatgctaagttgtcactatcagcaggacctccacgtacagatgatggttgcctacaaattaggcctcacctacccgacctaataaaaaatagtttattatatttatcccatcagtgggattttctcatccaattaaccctaatgggttagggtctaccctacccattagccaaaaagcttatatatatggcttcatcctttcatgtaaaaggttaacaattttatgtgtgaaaagtattaaatacttcatagccaaagagctcaataatattgattcatggactaaagctcgtttatgcccaaatcacgtaaaaatattgccttatttatctcttaatcttacttttctttagcttaatcttcttttaatttagttttcaaaaatcatgacaaacaagatccattgatataatcattatatacttcgtcaacctctatttatggtttgtaaataagaaaaaaaaattaaaattaccattttatctttttaattatctctttttcttagagtactactgaatttactagtgaaggttatgtcacaacttattttatcttgagtgctcgtaacatttttaatactaaaagttaaccctttagagaacgaatgaaccattagtcaatctagaagaaggctaagattctatatttgttaagctatgtccctagccatatatatcaccaaatttccaaaacaagttcttagtctaatcatctcaacaaaccataatacatgaatcaaaagatcatattatgtatagtagttcatagcaacctaaagattaagactatcatgtatatgatcatcaattgatgtgtttgatcaatactacaaagttatatttaaacaagtgttaacaaatcacatctggtccaattttacatattctcttgttttgtatgtatagtacttccactaaagtactaatagtgacccagatctatgtcacatttcataatactagtggaccatactacactagcaataagcaatctaaagatttcataactttattttaatgcttactctataagtttattatctctataatgatcctttgatggcaagtaagtaatctaaagttttcagaacttaaggtgattttcataccatcatacattgtttatgtacatgtatttaatttaattatttatttatttaaagtatatgctagttaaaattatttttaagggcaccttctaaaagcttcattcttaggagctttattcaacctccagcttctaaaacgaggtctataatcaatttttgtaactcgatttcatctagttgagtcgaagataattttttggccaaaattgagtgaaaataatggaaatttgaggggttttgatggacgaaaaatttctaagagatttatggagctaaatttgagtgaaatttcgaagattcaaatgaagcaactagtggccgaaaatttaaagaaaataaattggtccatttttagtatataattatattgacgaaaaacaaattaaacaacaaaatactattctagctaatatatcaaaattataatcctctaatttcgagtttaaccattaaattaaagattaaaaaataatttcataagtaaaataatgtagaacttaaaatttgaaatgtgaaagtttttcatattactcagcaaaatgaatagatagc

SEQ ID NO: 297538 - DNA, 5497 bp, Cannabis indica
tatatagttgtgtagcttattagatatgaaatgagataatagaacttttttcaattagaagattaatgtacattttactattaataacatacattattataacataactatgttttacatactcaaaatcggtatcagttcaggacttgcaggaagcggctgagcaatatgctgcagccaagacaaaaaggctcttagctagtgaaggcgatcagggatcggcaagcacgcctgtacctgaacgtgtgacagggacaaatggagctcggtccgttttggtggaaactaacctctgcgacatggaaagtagccaaatagatatcccctttgggaagccaccagggatcacgacaaaggagagttcagaccaaggattatctaacaaggttaatatattgggtcaagagttgttggactctacaaataaaagcagtgacctggttttgggaagccaagcccattgtgtcgattggccctcaaacgaatgttgggctcagcccaaagcccgtgaacttctcatgggggccctaactgttgataagtatcacagagaacctacccttttcaaccctataattgacattgaggattttagagttcaggagcacttgtatgggcctaggaaaaggaaagccacggatggattaattttcaggcccaatacaaaaggtaattcatcaccaagctcctctaatccagtaaaccaatgggctggaaaagagaccaattatccctcttcgtcgaacacgattgttgaagacgattccaaagtgatcttcgactcacctgcaagtctcactggggtgccaaccgtaaacaactactccccaggatcccagggagaatcgaaacaacctacaccgagaagaggaagaaaacccaagactcttgggaaccttgtcgaagatggtgtccgaaagagaaggggtagacctccaaaatcccaatccccgctggctgctacacctaagacattcaagaggggaaagaataccaactcaaagctgggaggtaatgcttcaactagcaacaactgggatgacagaaatttcgaccttaaggtaaatttggataaccatttcgttattgttgaaaaacaaagaaaaccgagtacaagttgtacaattacagaaatgattgaagataaacctttgaagaagagggatgatgccaatgtggatttttgttttggggccacggagacttgcccggaaaagtctccaatgtcgccatgaagatcttagcttggaactgtcgtggactcgggaattccgcgacagttcgtcaactggcgcacttggtgcgtcaccacaatcccgatatgctgatactttcagagactaggctcactcttaataaattcactacagtttgtacaagactcaatttcttagactttcattacgttcctccaattggactctcgggaggtttggctatgtgttggatgaaaggggtacattgcaagatacaggactcctccaagtacttgataattggtgaaatttcttctgaccctccggggattccgtggaaattattaggtacttacgggccacctacgagagttgacaaagagcaattttgggttcaaatgggggacattgttatgaagtctcaattccccttgcttttgcttggcgatatgaatggaactctcaacgacaaagaatgcttcaactataatggaaatgctccagatacgcgttcgactttcgtagaatggtccacagagccggcttgattgatcttggatttgttggcccaaatttcacttgggtaaaagggggcggaagctcaaatggaacggggccaatgaagagagcgaggcttgataggggccttgtgtcaaccgattggaggattctatttcccgatgcaatcatcaaccatttgactgctacggcttcagaccatagacctttgatgctcgatacgacaggaggtgttaaatgtaagggtaggcaattcaagtatgagaacatgtgggaaagagacccccggtctttctgggtggtaaaggaagcttggaaggatagacgtcatgcaaattcgatgattaatttccataggaaagtgaagactacgggtcgaaagcttcggagttggaacaagactcaattcactcatctgactcgacaaatccagattgcgaagtccaacctgcagcataccgaacaacagaatcctgacaattggtttgagattgagaaagcccgtcaaatgctgtccgaagctctactaagagaagaaatccactggaaataaaagtccagagttcaatggcttcaagaaggcgatatgtgttctaagtttttcatggcgtctactattgtgagaagacggaggaactacattcagcacataaaagtcacaccggatggagattggattagagaccatgatggaatagttaattgctttgtcaacaatttcaaggagatttttaagagagatgactccaacctcactcagcttagggacgggttgtttgatccagtaattacagagaatgacaacattattttaaacactatcccgcatggtgaagaggtcaaggcgaccctttgtgacatgggaaaagataaggccccgggcccggatggattccctcctagcttctacttgcaccattgggacacagtccatgaagatctaattgagatggtgaaatacttcttttcgcacttagacttgcctaagttcataaatgacacctcctttgtgcttatcccgaagaaagattctccaagtctagttaatgactatcgcccgattgcgctttgcaatgtggcgtataagatcatctcaaatatcattgcttcaaggctaagagatatccttccaagagtaatatcaccaaaccaagcttcatttgtaaaaggtaggcatattgccgaaaacacaatgatagctagagagattgtgcattccatgaacaagaagaggggcaaacgtgggttcatgctaatcaaactcgacttacaaaaggtgtatgataggcttgactggggctttgtcatcaaggttctgcagcaaattggctttcaaagtccctttacggattgggtacaggcttgcatttcggtcaccgaaatcaagatgcttttaaatggctcaatagttgggaagttcaagcctgagaggggcctaagacaaggcgacccgttgtccccagcgctttatatcatggctgccgaaactctctctagactactgatggaaaaggagaggcaaggccttcttaaaggattcaaactcacaaggagaggggagtcggtcacacatttgatgttcgccgataatatcattcttttcggggaagcttcagttcgcgaagcgagatcgttcttaaattgtctaaactattattgtgattgctcgggacaagccatcaacttctccaagtcttcggtatatttctctcgaggtgtggccggtaggaaagcccaaataatcgctcagacacttggaatgaggaaaatgaataggaacgcaacatacctaggaatccctctgtttagatcaatcaaaagaacagaggatactaaatatgttgttgacagggtattaaaaagaattcaggggtggaaggttaaactcctttcaagtgctggaaaaacttgcctcattaaggcagtcggctctagccttgcgaactatgtttcatcctcagatataatcccctccacgacggcttctaagatagacaaactcctgcgtgatttctggtggggtgacactgagacaaagagaaagatacacttggtatcctgggatcgcctctgcaaacccaaaattgatggaggtctgggatttcgtgcaaccgagacaatgaacaaagccttcctcgtgaagtgggcttggaaggcccttacaagtcaagattgcttatggtaccgaataatgaatgagaagtacatcaagaaccaaaatttccttgagttggaagccaaaccgtctgattcaattttatggaaagcaatcctccgagtgcgaagcgatcttggaaaaggcctatgtcgtagaattggcgatggcaattcaacctccatatggtttgacccgtgggttccaggagacaaccgccaaccaattctgcgtgtagatgaagcagtgggaatcagcttggtaagtaatttcattattaatcatcagtggaatgcggatttgatccggaggtggttccagcacgatgatgctaagcgtattctgaacatcactcttcctgagacgacggttacggactcctggttgtggctgccaaatccttctggtgtgtactcagtcaaatcggcataccgattgctaaagaatgccaatcacagtaatgatggagatcgaaaatggaaatccatctggggagcaaagatacatagtcgcctaaaaatgctttggtggagaattcttgctaattgcatccccactaaagaaaggctgagctattctattcctatccaggacaccttatgcctattttgctttaactctgttgaaagtagctttcatttattctgggattgcacttatgcaaaggcagtctggtttggctgttgctggaccttaagagctgatcttgcttcggtgtccgattgggacgattggattcattggttttcgaatgcaaacaatagacctccctctcttgattttaatcttttattgggaggagctgctattattttcgaaaccatctggagagagcgcaatgggaggcttcatgacaacaaaacaaacccaattgcgatcttaatttgctccatcaacagcaggattcaggaaattacttctcccaaagactcccttgactccattcaatcagagtgggtgcctccccctgacggttgggtggcttgtaattcagatgttgccataggacataatctttccatgggcgcggcagttttccgagacagttctggtgccattttgcgagctgcttcccttcgtctgaaccattgtgatcctctgccgggcgaagtagcagcggtttgtgagagtgcagcaatcgcagtggatctcggatacagaaacattgtttttcaatgtgatagccttattgctgtggcagctctgaaaagcaacctcaaggatatccgcaacctgcacttcaatgtccaagacatggttcacaaatttctagcttctgcaggaaaattcaatctgtgggagataaattggatcccaagaacatgtaatggtgtggcccattctgtggctcaaagggcaaatcgtttcaacaagatcgggtttatcgatttggccaattttgatgactccctgtgtagtgataatgcagatggtcatactttagtttagcttagtttagtttaatctagtttatcttagtttctttgactttctgcttgcttctttgtttgtttgttaggccgactttggcctggttctgtttgtagtttgctttgtctgtgggtgtggttcccagatcaaccactaaccaaaaaaaaaaaaatatatactaacacatattttattt

SEQ ID NO: 297539 - DNA, 1690 bp, Cannabis indica
taagatgaatgaggtttcatctcaaaaccaattggcaatgagaggagtagcccattcatcttatatatcacaatttattttcacacattagcaatgtgagattatctctaataagaacctaggaagagccaataactggaatggaattgccatttcacactttctaaatgaggcctttgaggagtagatctcttccccacaaaatgcttctccaagtggctgaagtatattttaaataccttactttagcatttttaactaaatagaggagaggttgaggaagatcttccaagtttgatttgcaagcataacttaattatgatagataatagatctgaaaccaaaccttaaaaaaaatattatagttcacttgataagcataatttaaacacatttttcatattttactttttgagctattttaaaatattgttatgtgtaaatatgataaatcaaactcaatatcctttcactttgcaaaaaagaaaaaaactcaatattctttcctcaaaaatttccaaatcataattattattttattacaaaatatttttaatattggaaactttttagatacattttaaacagagataaaatttgtggaaatatttatgtggaaatttatttcttttttaaggtatgtttcattaatgccttaatcgccaaattgattttgattgacaagtgtatggaaaggtcacactaaaccaaacaaaaaaaaaaaaatacacaaaaaagctgtgacaaattaacgtcacagccaatatacgtcatcaatattctaaataaatcttttattctttattaattaatatttttctaattttttttttcaaaaggcattatttttgagttatctgttctggtttagataaaacacgcgggccccacgcaacaacacaatagtaaaatgactaaactaccactaacttttcgtttctcttctcccgacacgccaccatatccatactattaatttcagaaggttaaaatcgtcaaatagaaaaatctgcgcccgaggaggggcatagttgatccgcataaccatatttttgcgaagcagcgaaatttgtgtgcgtgcgcttgggtcaccgtgactgtcattgtctgtgactgtgagcgtagacaaataaattagtactacctataataataaataaataaataataataaaaaagaagaggtggagtttacatagaaataaccgtagcaattaatgcggttactttattgagcttattaaatctgggccgttgatcagagggtaaatggtttttagactttacgaactgtagagtgtgatacttgaggggtttcacagcacttaaaacggggacacacggaagggactacatagctccactgttatcactctctcactcactcttcaattttcttttctgagagagaaaattagctatagagagagaaacagagatcgcttcaagtttctagggtttcttccttcgcttctcttctgtgtttcaggtatacaatctcgttttctcttttctcttatggatttttttattttgatggtcaactgttcaatgtggttcgtttttgggttgttttcagcttcgttttttctgtacttttttatacttgcctttctcaggtccagtgagaatagttttgttttctctgcaattgttctctttgattttttttttttttcagttttttggt

SEQ ID NO: 297540 - DNA, 3459 bp, Cannabis indica
atggtaaaagaaaaagtaaaatagtggagtagaagaagcactgtagaaccaaacaaacaaatacgtggtaggcgtcacaaacccaggaatccaatcccacccaattttgacagtttcactcataataataaacagtcgaagttgaaaccttgagcttcgcgccagaaagtgtctatctctcttttctttctttcttttcagctttgcgacgtgtcgtttaggcactccttctccgccgcatcaaatcccgtgcttatcttataaaaaaaaacctcttcttttctccacgtgtcgtctcagggacacacgtgttaacttttttatgagtttttttaattagttggcaacacaacttatcacatacgttacactatatactacactggcagagcagagataaataaggcattgctattgtgactatatgagactgttttctgctccaaaacggcatcgttccgaaacccatttctaacgtcttattcattgcctttcgtctttcgcattcttatcaattggggccagtcgactcagatatatattacaccattattataactattattagtagtagttggtaccccacaaccacacaaagatagattacaattacattacaccaattaattttaatttggtgaccgcagatacaaattgtatgattgtaataattctattatttaaaaaaaaaagggttaaattcttaatgtatatattaatatatattatgaatggattatggagcccatgttcttctctactgtggttacagtgagtgtgtactgagtggaatgaagaagaagaagatgatcacgagtacaccccagaaacttccatgtgaaaagatcttgaaatgactaaatgaaaagattcatcggtgttaaatcagtatatatgcactatagtacttccaaacaaataatgcattaaaaaaaagagtaactatatctcatgaaatccaaaccgactatccttaaaatacaattgcggtgtttaaataatgaccaaacaattgaaagtatagtgtttcttgttcgattccaaatacactggaatcaaattttattgttcttgtatagctcactcagctaatttcatcttataagctcactactatcttattctactctatccttaatgcaattcgacttttcatatactcattatttaagaccgatcgaaaacccaattgacttaaaaaagaagaaaaaaaaaaaagtttctgactcaaagccaataatctttctcggaatcaaaatttcaagatcagctcaagaagggtatagaaaaatggcactaattactagctatatccattacacagagcctaaagattggctttggtggagttggatttttactttattatatatatacataataataatactatgaaagctataagcctatttatctttattttctaggggccctagaaagcagaggtgaaaaaaaaaattaaaagagagaaaaagcctcttctcaaaaagtggccaatttctttttttttttctttaactcctctccttttcattcccattcccttcccttataaaaaccactctctccttctcatatttcccatcgaatctaactcaaagccccttcactttacactcagtcactcacttgagataaaacgaaagagtgaaatggagagtcggggctcgtctttttccagctgccgaacctactttcgggctttgacccaaacccctgcccgtttagcccgccgggctggctcggtatccacctcttacgaagaaatgagccaggtcagagcacggtctggttctaacatgatcaaaagcctcaggtggttcgacctcgtcggttttggaatcggcggcatggtcggcgccggtgtttttgtcaccactggtcgagccagtcgtctctactgcggtcccgctgttgttctatcctacgccattgctggagtttgtgctctgttatctgcgttttgctacacagagttcgccgtcgacatgcccgtcgccggcggtgccttcagctacctccgcgtcacattcggtgtggttttctcactacccttttcatctgaaaacaattttttttcgtaatgcatcaccgaaaatgaatcaataaatgaaaatattaaaattgattctgttttgcttaggcgagtttgcggctttcataacgggtgctaatctcgtgatggactatgtcatgtcaaacgctgccgtcgccagaggcttcacggcctatttgggtaccgccatcggcgtccctgtcacgaaatggcggatcgtggttgcctgtcttcccgatgggttcaatgaaatagatatcgtcgctgtcctcgtcgttttgatggttaccttcgtaatatgctacaggtatacatataaaaaagcaatctttcttatagttctgtttcttcatctttctgactttttgatgattctttcaatgctctgtttcagtacgagagagagctcgatgttgaatatggtgttgacggcgcttcatattgtgttcatactatttgtaattgtacttgggttctggaaaggtgattggaaaaacttcactgaacccgccgacccgattcatcatccatctggattttccccatatggagtttcaggggttttcaacggagctgccatggtttaccttagctacatcgggtacgacgccgtttctaccatggcggaagaggttcgtaacccggtcaaggacatccctattggagtttccggctccgttatcatcgtcaccgtcctttactgcttaatggccgcatctatgtccaagcttcttccgtacgacttggtaataataatacacaaaatattaatttacataattaaaaaaaaataaactaaaagaaaacagaacagagcaccttacttgttttttatttaattttaagaagatattaattaattttatagccgaatgacgaaatggcccttgcgccttgttattacagatcgacgcagaggctccattcgcggccgcattcagtaggcaatcggacggctggaaatgggcttcgaacgtgatcggagtcggggctagtttcgggattttgacgtcgctgctggtttcgatgttgggccaggcccgttacatgtgtgtaatcggacggtccaacgtggtcccggcctggttcgctaagatccaccccaagacatcaacgcccgtcaacgcttccgcttttctcggtacgtaactcctgagccctgccttaatagcacgctagttattattttataattatcaattcattaacaataaattttcttgtctacgtattatttttttgttcttataacgtttgaataatttaatttaataataatatataaatgaatggtttggatttatttatgggattttccatgcatcgattttcgtttttgtaatattataatgtgtgaaaagttgcacagttcccaattgtagtcatctttaggcgttactttc

SEQ ID NO: 297541 - DNA, 4291 bp, Cannabis indica
taataaaaaaaaaattattaagtaatagaatattctatcaaaattaaagtaaaaagcttaaaaaaaatatttaaactaaaaattccactttaaccataatttatataaaatagatatattaaattcgaaatttaccaatttgaatctctatcccataaacataatcctcaaataagatgaggtcaatcttaaaaaaccactgaacacaaagacacctaattttaaactaaaatcttaaataaaacacaaacacacacacttcaattcaatcttaatcttaatcttaatctacaacatcacatctctttctaataacaccattcttcccaaccagaacaccataactggacagcttaacaaaagcagaagcgaaggcttgaaagaaagcttcttggtcagaaccaaaacgacgaacaaagtttgtcgtacgactgtccattaccatctccgcatctattctcagtaacccatgtccactcatggcgttaatgtagtacaaattgtcaaacccaagtgctgttgggtcattcaacacaaacctcgacttactcatcattgattcctcattattaggacaacttaatcttaaaaacgcttcaaacccatgttccattcctgttattggaccctcttcgccttcgtaaagacgattcttgatattcaaacagtgtgttactcccagtgtgtgtgaacctgcaaaacatcatattatgcgtatcaactgtttgtgaaaatgtctatataattaatgggtcaaaaaagaagtgtgagcttttctaattaactaaaacttttttagtattatgctactaatctctattatttctcaattatgtcatggattaatcagttatgccttctatattattcaattactcatagtgttctaatttgtatgcaatatggtaagtaacaatgctcaaagaatacccataatggcaacagattcttcaactgacattcctttgttgacaaaaatctgaagcagttcttcaactccaatggtggaaggaggaagaagagcattggcgagttcgtagcttggagtgctcgaggagtctctgcgtcccaagggaacctctatacgaggccctccagaagtagctactgcctcacgtgctgccatgatgagaatgtcagcacaagaaacttggttaggacatgctacttcaaccatggacttcagaaggcttatcgtttccctctgtcggattgcaaagtttttagttgaagccatctctgatgaatcatttttttggctgtcttgatcaaccagaatggaagcatcacagccctgcaattggtttatcattatgacaacaatgttagtaagataattaatcttgtttagctcatttaatggcagatggatatgagaagggaagagaaagagataaagacctgaacttggcaatcatggaacatgagcctcaacaaagcagcaggtgaagtaatatcagaagagaaaacaggtttgagaccatctcttataatattctcaacttgtggacatgttttctcatagaaattataagaaagtcctccactactttcaaccccataattcaacactgaaaaaagacatgtcaatacaactataattcccagctgctgaaccattcttcttactcttgtgtagtttacaaaacccaagtttggtagcagcagcagtagtagtaatattacttgaaacaagaaaattagagctgcacagcttaagttgacaaaggtttgcataagctttaatctatacaattacttaaagtatatagtatgaattctctagagctagcttataatatatatatcatgatatatagtagaatgacacaattttaaagttcatacattcctcatttatttgtatttccaaaactggattatgatattttatcattacctgctcctttgtttctatatataaaaataagtattcacacgcaggaagaaaacagaaccaatacaagtactgatatcacttagtttgaatcacttcacttggtatgacaatgacttgaaaccacccaagtagaacatgtgttcttcttatcaatactcatcattattattatacacttcatcacccacaatagttctattttccaactcatggttttcccatattaaaactttataccatcttttcatttttaaaggctgtcattgactatgtaatcttttgtcatagtactgatgaagtgtaacagccatagtatatgtatatacatgataaccgaatctgcatcgtgccatgaggacagccttgcctcaagctcatggacatggccattgtgattgtgatcgaaaataattattaaaccaatatttactgtataaatgttaaaagggagatttttaatagatgtttattacatgatcaatatatcttcgggatgtatttactatttggtcttttaaaatataatttgaagaaaagttataagtttagaaatccaaaattgtctctctctctttttttttttctgtatataaaaaattagaactaatatgtacaaatgaaaaaataaaatcacttaaagctagtcctttatttttcaagaaaatctcttatacatattagttttcattattattattagtggatccatgaaaagaaaatgaattgtgtgcaaaaactaaaaaaatgattagaggtccattagagaatttgtgaataaattaaataaatgccaaaaatagtataggaagggaatatgaggtttctacttaatgatatcattttagttttagttatttttgacatattaacaagaaatgagctaaaatttaactaacatatgtaaaccacacaaggatttgttagaaaccctccaaaatagagagagagaaaaatcttccctaccaaaattgcatgccttccattcaacaacactcaatttcaccatccaaatgaactatgtaccataaaaataataagacaaaccctcttcaattaagaacctccacaaaaagatttaccataattgaatcacataagaactcaaaaactgtaatctctcccaaatgaaaaattaaccaaaaaactaaaacaaaaattccaagcatgtgttctttcacgaaagcaattcatgtatcattagctataacttttctcatctcagtctctttgacaaatattgtccatggctttgatgccaaagctgtcattgactctcctcttttgacacaaaaaattggcacaaacaggacgattaaggttgatctcaatggcaatggtgaattcaaatctgttcaagctgctatagactctgttcctgaaggcaattctcaatggattatcatccaccttaggaaaggggtcttcaggtaatgaaaaacaaacttcttcatgccaaaatttcaattctctttaaaagtctattgctaatacaatatatgtaattatgtatatcgatatatacttatggcagagaaaaggtgcacataccaccaaacaagccatatattttcttgagaggaaacggtagaggaaggactcatattgtttggtctcaaagctcaagtgacaatgttgagtctgcaacgtttaaggttgaatctccccacttcattgccttcggtattagcttcaaggtacatattttatttatacttacatatataatcatatacttaatgatgtgactctatacatatcttatattgtatataaatatatgtatatatgtagaatgaagctccaactggggtggcatacacatctcaaaatcaatcagtggcagcatttgtggctgcagacaaggttgccttttaccattgtgcattttacagtactcacaacactctctttgattataaaggcagacattactacgataattgctatattcaaggctctgtggacttcatttttggccgtgcaagatcacaatatcacgtaagaattagttgtgtatatttatatctatataaaaaatcatatatataacactatgcataataatgattcatatatatacatatatatatatatatctgttaatgtttgcagagctgtgagatatttgtaatctcggacaaaagattggcaatacatggatcaatcacagcacataacagggagaatccaactgacaatagtggttttgtgtttgttaaaggaaaggtttatggtacagatgatgtttacttaggaagagcaaaagggccttattctaggaccatctttgctaagacatacctttctaggactattgtcccacaaggttggactaactggagcagtggagccaacagttcagagtaagaatctacatatatatatatatat

SEQ ID NO: 297542 - DNA, 3891 bp, Cannabis indica
ctcggtgatgggcctactctctaacaggtattgtttatcataatgaactgaatatattatatattttcttttgattctgttggtaggggatttgatcagaaagtgaaggaaaaaaattaattgtattaaatttactcttttaatgttcttgggtaaagcccaatcttggcttattgggttttatgatcgttgggttttgtggatattgatttggaaattgtgggtgcagagtgtcgaaggagtctctgaaaccaggggatcatatctattcttggaggactgcttatatttatgcccatcacggttctcctccctcctctcttttatttttttctcatttgttaaaaatagtctgtgttctaactatttatttgtagatttcttttttctttatataaatataatcaactgcatttgttgagttaagtaataaaatacatgcaagttgatgatttttaacgtttgagtcttccttttcattgtgagtatttatatgtgaagctttggttgaaacgagttagggtttgtacagtaagtgtagtaaagttctaaatgtttcaagtagaaaataagtttcaattatgcaagtggtattatggttctgaattattggaccaaaagatcaagtgattattgcaacataagtagtagtatttgaagaattgaatcataggaaatgaaccatcttgctatatttgctgtgcttttgaggaagttgccaagggtactagtcatgactgcctacttccacagtctatccatttttttactattattagtattattataattataattatttgggttggatcatagcaagtttatattagttttaaaaattgaattgcgtaagttatggagaagaagatagatacataacagattggtttaagcaaatctacctttttttttattgctcattgaggcgaaatgtcggtgtaggcatcatgttttaagtaacttatgtaagggaatgcctttctacttttgctatccttgcaatgttcaaatctttggttatgtaatcagttattctacttgatcaataccgcgaacttttttttaaccatgtaagtaacatatgggagactcacaaatgacagtcatcacaatttaaaattgtgtggtttcactgaaaaaagttgtatctattgtcatcattgtggatatctgctagtgtaatttgtaacaattattatattttggtgttaagtttttcctttttgtttagaaacattctaaaattaagatatcatgtctacaggcatctatattggagatgacacagtgattcacttcaccagacgtgggcaagaagtgggaacgggaactttcttggatctcctcttggttagttctggaccagctcgatcactggagccctgctctgtttgcagtccatctgaggaaggcagtggggttgtttcctcttgcctgaaatgtttccttgctggtggcatcttgtaccgtttccagtacgctgtcaaccctgctctttttcttgcaaaagctcgtggtggaacttgcaccttagccgtttcagacccagctgatattgtggtccatcgagcaaagtacctacttgacaatggattcggttgctataatattttcaagaacaattgtgaagactttactatctactgcaaaactggactgcttgtcgttgatcagggaacattggggcaaagcggccaagctgtgtcgataattggaggacctctagctgccgtcctgtccacgccattgcgtcttgttaccaccaatatttatgggatggcagcaactgctgttgcagtctattgtggtagtagatatgctgctgacattggaaggagaagagatgtggtaaaggtacctgttgaggatttgactagaaggcttgcaactggcttgctccaagttgttgaatcccaaatttcggcatctccacttcaagactcatcccagattgtcacccggtgaccatggactttggtggttgctcttggttcgcgtttattgcatgtacgaatcaatgtttcctatattatgcattggtacttttctttgagtgataatttctgatactattgaatgcttacttctattggaaatgcttttatttcttatctgttgagaagtgttttaagagcatcgaataatatgtcttatgtataatgtattctattaatctaaggtgactgcttatgtggtttataaactagcggttaccgtagtttgaacccaaacataacgatacaacgccgagttctctcttattttcacaattccagtttaagcgattgccaattctccaaacttatttttttcccataaaaagctttgtgcagaacttatctcatactttttttttcttaaaaaaaatcaattttttaaaaatgcctagaagcatgagaatttaattgttgttttactaatgattaattatttatgtttgtaattgtataaaatataaacataaaaattacctaatatacaagtatgattaatttggaattcgtttagctagtgacttctctctcgacctcccaactagaattttctctttccaatcttctttttgctctcaatggaggttgcgttagctatgttgtgggactgttcggtgccctggccttcaatgtgctagggtcttggtggttagaggttgcatagcttgttggaccgtgggtttggacattgtggcttcctctctctgtcttgtccaagtctagttctgtacagacaaccgtcattatgctccgtggaggtggatctcgtgtttacaagaggtggtctacaggttcatttctctctagggttggatgggaggtttcgctaacgagagtagtcattagggtctttagtttgagggtcgtcggtggtagtgtggtggttatgggcttcccatgtctcctcattgggacatggtgttagctatcattttttcgtgcaaggtggtctcaggtccttggtggaggtggttgtgactttgcattttcaggatttctaccatccttgaatggtacgtcatagggttctatactgtgagtttgtctcttagggtagtgcatccttatgttgttagtctcatgttccaaatgaatctgtttggtagtgtgcttagtccagatcattttgtgtggatgcctgtagtttattccttgtgtaggtagggtgttgttttctttgagttttttttttttggttgtaataatagtgtttatcactgctttttgtgaattgtgatgttggcttggcgtcatttatgttggggtttctcttgtgtcaaaatggggtgtcgtaatttggtcttctctttgtgagacttgtgcagtattagtgttaaagggcactccctacttaacacttttgtaagtgtcatattgttactaatacattatcggttgttaattagttttctttaataataattgtaaaaaactacttattatttatagaatgctatctatgttcggcaccctgtgccaaataacgaatacactaaattgtttaagtttcaacatatacatatccaatgtgaatgcataataatgatatatatataaattgttcatcacacattcttctctctatgtaaatctcacaaatgaaagaagttacaaaatctgctttggttaaatgcattagatattggatctcagtaaaaataaatctcagtaaagcctatgatactgtggattggggctttgttgaggatcttctcgtaggcttcaattttccttctaagtttgttgattggatcatgaaatgtctaaggggaacttcatattcgattatgttgaatggaagattgcatggtaactttcaagggagaaaagggcttcgacaaggggatccgatgtctcttctcttatttgtgctaataatggaatatctttcaaggag

SEQ ID NO: 297543 - DNA, 2410 bp, Cannabis indica
attaaatcaaaattcgataatttgatatttttaaaattatatagttaaatttgtttagtaaccattcttgagtaataaccattaagaagtgttctttatatatatgtatagtctatatcatatattatctaaaaattaaatttatgtatctcacccaattttatcatatctttgtattgaagttttattttttttaacaatgtttatattaaattttgaattaatagtataccaataattatcattgtttcaacaattatttttggcaaaataaattaaaaataattctcttttaacatttttttcttctttttactttgacacctatgacaccccataaatattacattaaaacttgttaaaagttaattcaattatatgaagtattataaatttatttgtaaaaacattttaataattaattcttgctaaaaaaaatattgacatttttaggaacattattaatattttatgataaaaaatatttcttagggattctcttcataggcccaataactctaggcattgtgactctacaaaggggaataaacctacaataacccttaggggagagacccggagactatcataaaattgggggtatgagattgaagggtaaggaccaacgaaccactccaaactcataagtatttatgtgatgaatggtgtattttgtgcagtagtttgctcatagtcttgatggtcagcattacgagtacttctctcagatacatggggaataattaaatatgagcaataagtttgattccctctgcagttgtgacacaacaaaagactattttgaaggaaataatcggtgtagtgcttcggacaattattctcacaacaatcagtccaaggaagactatcgtcatatgagagaaatccccacatttccactacgaccctgtggttagaaggctacaggtaaacccaagtcgacgaattttttcaaaaggttgttgctgcagaagataaggggactaactcatttaatattctgcaagctcaagagggcagtgagataattgacaattttgttgcttatactgctaatggatagttgaaacattttgagctggaacattaagggccttaacagtaataagaagcaataggttgtgattgatgtgtgtcgaatacagaatattagattaggggctattcttgaaacaaaaatgagaggctctaaagttagtgaaactatgataaataaattcattggttggaatttttacacaagtccaatcattaaaggaagaattttgtcaaggtgaaggttttagaagaaactaatcaattcatacactgctagatcaaaatggcttgtcacagtagtgatttttttgccacttttgtgtatggagcaaatggggtggaatatagaaaaaacttgtggaatggcttatccaagctctctattatgtccaaaccgtggataataatgagagattttaatgcagatgctgattttggagataggagtgggggaaacagatcattagagttgaagtagaagatgcaaataattggttggctttaggaatggcagatggcttacgaagaacgggatcccattttacctggtctaacaaccaagatgggaaggaaaaaatttactcaagaattgaccatgttttcaaaaatgaataatggattgacatgtttcctaattcttttgctaacatgaattgggagacaatgtctgatcattgttcttgtgttgtttcttcatttatcattcaagacataggaattaaaccttttaggtttaacaacttatggactgatcatgaagaattcaaaaggactagtactggaaagttggggtcagtaccgatttaggctacaggttttaaaagcgaattcatctcaaaagtctaaggttgaagcattagctcagaggttttaacaaaaagacttagagatgtggaagattaattattagcatgccaaggatcagttgctgagaactaagttagctgctcaagctaactcgggggatcttactatgctggaaataaaagagctgcagctgctagtttcagtagaaaaagataaaatgcttcacagctttcttctgcaaagaagtaaagtaaattggactaaaaaaaaagtgatgagaataatgtgtattcctatgtctatgtacaataaggccttagtaggctttatctcgattatagttaccgagtttaacctgattatgccttgctcgcataaccctattcatatttatacgtaatccatacattacgttccttcgatggtttatcctagtgatacataccaggtctaacccagttacgtcttatacacataactcgtaatatacatgcatgcattcaatatataccataacatataaaatcttttggtaataaccctaacttgcatactaagtaattac

SEQ ID NO: 297544 - DNA, 2218 bp, Cannabis indica
aatggttcacttcgcataaatcagagccctgtgtcaataacagattttgatgagaacacttggttggatttctgagtttcttattacattatatttaaacgtgcaggcttcttcactactacagcgtctgaagtatagagttctatttgctaatgtatatatatatgtgtgtgtgtgtgtgtgtgtgtgtgtgaaatatggatttatggttttgtttgcaactttagcttatacgactaaggttcttatcaactttaatcttactttatgtatctaacttatgtgcttgctgaagtttaacggcttgtgttttcaaaagttaatttaattccattttttacctctaactcgttttttttttcctattctttagatggctcatggccaggtgtctctattccatctgagttcttctccctttcaaagatttggttttgcttcttctgcgtcccctgagacttctgaaaaagagcaggggaataattcagagaataatggagatgctaaagtctccagtgaagctgcctctgggcagagtgatgtcgatgatcagacaaaagattcaggttctatatctgattctcagtcttctatgtctaataatgtcaaaacaaggagaagaactaaacgaactgcattttctgattcagattccgacgaggatttgagcatagatgatctggtgaaacttgtggctgagaaggaagagcttttgaagcaaaagcataaagagattgagaaaatgcaagacaaagtcctgagaagctatgccgaaatggagaatgtcatggacaggactcggcgtgaagcagagaactcaaagaaatttgccattcaggtttggtaccaaatcctttttgcatttacatattgttttcacattatagtttccttgttaaaaataatagtttggttcacctgttttaagtctgcctgacaaattgcttaaaatcttgttgcagaattttgcaaagagtctacttgatgttgcagacaatttggaacgagcttcttcagttgtcaaagaaagtttttcaaagattgacacatctaaggattcatctggggctactccacttttaaaaacacttctagagggtgttgaaatgacagaaaaacaacttctagaggtaactgatatcatcttaagcacaatacatctccctttatcaaattatttattgaagaagtctcttgtttttttatttttaagttcaggggacctagtgttaaatgttagaatatgttgtgttttcattaaatgaaaatgaaaatttgggaccttacactctgaaaatgaaaatggtaattgacatcacatttcttatagttatcaagtccatattgttggtatgtacacaaattccgtgaattaaactcatcttcaagtaaagtgcctgaatgctaaacttagttatatcattgatggttgcaggataactaacaagttccttttgctttcaggtatttaggaagtatggactagaaaaatatgaccctactaatgagccatttgatccacatagacataatgcggtcttccaacttcaagatgcttctaagcctccaggaactgtagctgtggttctgaaggtaatatctccatttcaaattgttatgggctattagtactgttactactgttatttctaattttcgggatgacggggtttgtattaaattctgtcagatagttaaaagtgggatttgtaagtgacgatttggttgaatgtttttgtattgcagtcgggttacatgctttatgatagagttattcggccagctgaagttggtgtaactcaagaagcagagaatgaatgattatgcaaagatagagctttgccgaagaggattctcatctcaagcttcacttggcttacgggtgtcaacaagaaaattttgcaatgtttcgagaattgtatcaagtacaataaacaataaatttttctagttagaatttctatcacagtatagaaccatttatttcttccctggctgccctgttatttattgtttcgttgtaaaaacagtgagacactttttattttcactaacacaccttcgagggttgtaaacacctaaaacaatgaagcgctgtttgttgcttaaaaatgtatatttgatgggattggttatatatgccaagttgggtaagtaagattgtatttaattggaaggaatgaaaatataagaacagaaattgaatgaaataaaattt

SEQ ID NO: 297545 - DNA, 2539 bp, Cannabis indica
agtgttttggagggaatacaatagtatatatagaatattgaggggaattggggggtatgcaatgtttgagtaaatctctatttgcaccaaaggggcctaagggctcctattctttgtaattgggtttctcatacattcaatatacatttcctattgtttgctactgttttactcctattattgctactgttttattgtgttctagagttggagttctcgggtcttatcattcatacacaaggccgaacttctatgtatcagcgcaatagtctaccttttggaatagatttatgcattgtcatatttttaaaaccattcgtgcatttatcattgaaaacaaattagttcatacacaaaattatgcatgccaacatagttactaaaccagcacgaaaaaaagacagctatcaaggcataaccactcaaattcagttgactggtatagaccaaaattaattacatccaaactgaattagtatatagtttgttgctacagtggggatacctttaatatcacacaattcaattctaacacttccactggaaacaagaaataatgacaagaaaaaaaacatatataactcgtgttacttacgttgtcataagaacagatagtgctacatttcccttagatatataagtagcaacgtttgatgcctgacctccagggcagcatgagacaaggatgagaccagttgcaagaggtgcagaaagttttagagtctgaagctcatattgaaaattgttagacatatataagatatagtaatttgttcacatgtctagcaaaaaattgagttaccatcctcaatagaatagtcaaaatcgaaatccacaaatcgtaaattttcccacatgtcctcttgttctagtagaggatggggttctcacaacttagaactagggtagtataagtaatcaaacactacacatgcttaggaagtgactgaacaatgttagcttttaagatacattaatcctccgtcactaaatagaaaagtatattatataatatctatggattgatctatataagcctaccgtagttcttgcatctaatttacagtagcatgctgcatattcaccccttttcattaagtttaaaatcccactacaataatagcaacaggacaggacaagtatttacacttcctcaaccatcatcttttcgtcatttaatcttgagttataaaacactatttttagactagaacatgaaaagatggaaatacaggagcagtttcccttcactttaaaatatcaataattaaaacgttgatgaggcaagataagggcatttaagaaatgttgacaaagaagaatgacaagatactaaaaaacataacagaaaaaagatgattgatgctgtcagtcatatcttggtttccagtggaattaaaaaaggggatttaaatcaaagggtacatacaaaattattgctacacaacaatcaacacacaataagctaaaactcttgatgaagaagaattaccattgcaatagcaaagcctaacataggtttgattaaatactgagcaagaaatcccacaccaaccagaaatacaaaagttataaaataattatataccaaattcagcacagaagaaaattcatcaatgtgaatgttacttacagtccaaggatttcgcaaacatcttttgaaatcctcaaaagtcaaggtcaatcccatagatagcataaggaaaccaaggccaacagtgaaaagatctgtctccaaccaagttacctgtaggttgaactaattagacaacagttgatatgcaagccaacaaggtagcagataaagaaagagagagagattacagcagaaggcttgtagatgccaataatggttcccagtatgacctgtcattgcaagtagcacatcttaagaaattaacttcaaaagtgccaaatataaaaaacatgtcaagagtaaagctgaaattaaactaaaaaaacatatgaacatataacatattacattatataccacctcagggagaaggagaaaggttattcatacccaaagaggaaaaagagtcgtcaaagtttcaattattttctcatacagattcatctcatttgaagaggaagaactgtttggaacatccccagatacatttgttgcagccttgcactgaacgtgggactgtctacaagtacaagtcagcaaaacatatacttcctttctcccattacattacatatacttccaatataaacataattcaatatgctgctaattccaatcgtagtctaatgcaaatgaacaatgtaccactatgtttgtttaacgtaagaagctcgtttaaaaacattaacataccttgaagttttgacgaataaccaaggagaacaaagagcagcaatgggactccgtggcttactttgaatagcataattccctccattcaaagttacacaattgccaactctcaaatctgaattaatatagcagtaatgaataagaaaacttccaacagtccaaaaaaattagaaaaagtggaaatagcccccccaaaaaaacgaaaagtac

SEQ ID NO: 297546 - DNA, 5285 bp, Cannabis indica
cggaccgtggataaaggttgaaggtccccgtggaaatttttcttcacttctagggttcgtcgtgacatggtggtttgtgatgagagctttaaagtgcgcgatggaaatcatcgtacaaaaggtgtctggaaacgtagatcagggggtcagtcggagttgaaaattggaaagagtgcaccagttgaagatgctgcaacggatagtggttgttttgaggtgaggcctgctggaatcgtacaggatggtacgattcatggtgttacctcaaccatgcaggatgacgaggccaatgccactactcatacagttgtcagtacagagggaattcgcaaggagaatgtctctttgcctccaattccaaacgtgccaggatcgattttgaagattccccgcaagaatattctccttgaattacctaaccctgatttcgctttccccagtgggcctaatgatggttgggaccttatccctgattttgggccatctctggtccagagcttggaaatacgacacatttggtcttgtaagtctcaaagacctcatgatttccctgagcccatttctttgaggtggcccagcaatgacccaaaattgcagaaagtgtattgtgtactcttgggccctgacattgttgatttatataaggcccaaccatctttaatttcaaatccaccaaacatctttgaactcattgtgcacctgctggggaatcgaaagaggaaggcccatacttggtatattccatctccggatgtttttgaagcttccccctttggaaaaatttgaatcctctggtgtcgtctggttgcagtaatggagttgagggtactcatatggaaagtgctaaattccaatcgagatcatgtgatggttgtgagacatctcgacggcaaggcagaaggggaagaccacggggggtttcttcttcttctcatgggaaatcaggagttaaaactcggaggaggaaacgtgctaaagaggacgagataaaagggaatataaaaggcattcttgctcagtgtgttgatgcagctattactttcatttcaaattttggagatggcgaggaggtggccaaatgcatgcccccacctgcgccatgaggtgtctagcttggaattaacgcggtcttcgtagaccggtggcagagagagccttacgaggcctctctcgaagagaaggactggatatggtattttcgactgagacaaaagtggagggaagtttgtgacaagtgtatgaattgttgggtttgcaaatgtctgatgcatcgatcctgatggccgggctgggggccttagtgtggcttagagaactggtttaaatgttcacattcagtggccttttgagatgggcttttgcatccaggttatgtcaattgctggtgaggggtcttggaatttgttttgtgtttacagcactccgtatgcacaccacaaagtggcattttgggattggttgactactgaaattctgaggtgtaattccccttaggcgttgattggtgatttgaatgctaatgaaaaatagggggacgttggttcggcagccatgaaggggatttgctgagtaattttcagttggatatcggtcggggttgatcttgagttcattagcccgaatttcacttggtataacgctagagatgcccagaacagaatcaagaagaggcttgatagagctattgcaagttcagattggtgtgtttagttccctaacgctggggtgattcatctgcctatttcctgctccgatcatgctccacttattctagatactcatctccgggttcaaagaatgagatgcctgttgggattcttagaagtctggtgctcggatcctcactgtggtaatgtcattgctaatgcctggaattctccttttactgggcattatagctacatgatgatgagaaaactttcacggactaagcaagccttgaaaatctggaatcgtgaaagtccacgacaggaagttacgtggactttacaacaaacttgcttgtattcaaaactccactatttctcagaaagtctgtcatgaggaggccctgctccaagtggagattttgaatttggagaaaaaaatggagcgaatatggcaacaaaagtcccgtgaattatgggtcacgaagggggattgtaacacgaagttttttcagacttctactgttgtgaggagaagaaggaatcacatttgggctataaatgatcaaggggattcgtagatacaaatcgggaggacataggcagatattttgtcgagaaattcaaaactttgcttgaaagctcaagccctgctattggtaatgacttggagtcgttgtttgatgccaaagttacctcggatgacaactcggagctttgcagagttcctactggctcagagattaaagatgttatttggaatcttcatcctcttaaggccctaggaccagatggcttttctggggttttcttccgaacgtattgggatgtggtgggaagggatatatgcaatatggttcagcatttctttgttaatgccaactttgtcatggaaatgaatcacaccctgatctgcctcattccaaagtgtgaaagcccaacgaattttgaccaatttaggcctataagtctctacaactttgggtataagattcttgcaaggctcttgactaaccgccttaagccgatcttggataagttgatcagtcctttacaaaatgctttcctcaaaggcagatggatagctgaatgttcgattcttgcttcttaagcgcttgatacgatgaaaaagacacgaggcaaatctggttttatggctgttaagactaatatgcacaaagcatacgacaggatcgagtggagtttcctactccgagttcttaaggcaaacaggttcaatgagcatgcgtgcagcttgattatgcaaagtgttaccacggtgagtttctcggttttgcttaatggtgctcctttgaaacctttctctccgaggcgtggccttagacaaggcgatcctttgtctccgtacttattcattttgtgcagcgaggttctttcaaaacttttatgtagagaggaggatcggtgtgagatcacaggtatcaaaattggtaagaatgcgatgcctatatcgcatttattctatgctgacgatgctattattttctgcaaagcaaatgagaaggaagctgcaaaattacttaactgtttggagaattatgaatgttggtctgatcagaaagttagtaaggctaagagtgggattattttctcccctaaagttaggctggataagaaagagtcaatcatggctactatgggaatgaagacgctaagtcaaaaggaaaatacttgggcagccccttcttgtttatgcccgtaagcggaatgattttccttcctgaagtccaaagtgctgaatcgtttggaaggatggaaggcaaagaatttgtctcaagtggggagattgaccctaatcaagtctgtaattcaaagtgtctcgtgttatactatgtctacttttcgaattcccattctgtctgtaatgagcttaatagtgtggtggcccatttctggtggaaaggatgcagtcaggaatctgataataatcgttacttggcgttgaagagctgggctgatatatgccagcctaaaagaaatgaaggacttggcctgacataattcagagatttcaatcttgccctgttggcagaattggcctggatggtgttagacaaatatgatcgtccttgggtcaaaattcttcttgcaaaatattgcaatacgttggatttctggaatgtggagaaaaacaacagagattcctttgtatggaagggcattctggatgcaagggacctctgtggctggcgcgggcttcttaattggcaatggtggtattgatatttggacgaagccttgggttcctgggcttagtcttgaagaggttaagcaaagttttacgcataagatcactcactcttttacttatgttgctgatctgtttttaccagggacacgtcgttggaatgaaccattgatttatcgatgcttctcacctgaagtggctaaggccatagttcctattcgacctttggatgaagctggggatactttattttggaaagtgagtcgtaaggggctgttcccagttaagaatgtctactggttttctcaacagctgaggtttatggtggaaaaagagtgctggaaggtcctttggaaactgaaaattcaccccacacaatcactcctgatatggaaaatactcagttactgtttgcctattaaaacaagactaggcttcatttcttcacaggatgtgcaatgctgtttttgcgatagtggagtggaatctgagcttcacttgttctgggattgctttttctctcgaagcttgtggttcttgagcctttgaggtttaagatcggataacattggatgccaacgttttgaagagtttttcttttggttatacaacaatggggaaattaagttaatgttgtttgctgcttgtctctttgaattagtgtggaaatgcgggaacgactatgttttctgtggtgaaccccctgatgtccatgatactctaagacagattctgtgcaaatgaaggaattttcagtgtaactgccttcttgtgatactcccaatcctgcagattctactactcattgtgggactcatgtctcgcatttcaaggtagatgcttttgtgctggattgtgccgcgggccttggcattgtgcaggttggatcccatggatgtggctatcatggcacagtcttttcgtgtggtgaacagtgtgctggaaacagaactggaggcagtccatctgtgtctggaggtggctttggaagagaagctcgtcgatgtgcttgtggaatctgattctatgattgttgttaatgccctcaactccaaggagcttccttatgcgtggggatcctatcctattttcataaaatgcattactcttattagatgctttaattttatttcctttaagtttattcctcgttctgagaattctgatgcaggtaagcttgctttgctagggtgaattctatttcgttaaagactgttggtagggaggcaggtccccttgtgactgcctaacattgttctggttttgttttgctatgcatcttcttattcaaacaaaaaaaaaaagatatttattactcatataattaaattattatttaactaaccaactattttaaaattttagggttgttaaaaataacctaaaatatattttcaaaaattaaaataaaaaatgaaactaatttaaaa

SEQ ID NO: 297547 - DNA, 2769 bp, Cannabis indica
aaaaaaatatattaaaatattaaatagtttaatattaaaaagtaactaatctaaaataatcgatccaacttgcatttttgtgagttaaattggatcggagttaatatacggattagattggatcttaattatgaaatccgcatttagtgcaattaatactagctacgaatgtgaaaggacttgcttgcttgtgaggccagggcaagtgcctttgttcttgcatccatcattgcccactccctctctgcccgccgctgatgttgcctgatattttttgctctttttggagccaatctgttgtccctttccacaaacgcaagtctaaatttttcagccatggacaattcaactgggcttgagagaagaggaggcatagcctttggaactgatccgtacaatacccatgttttaggatcgatatcctcaacagctggatcatcgagtgcaacatctggtaatgcttcccttggaactttggtccctctgaaaccaaaaggcgatggtttaggattcacaacaatccgtgggcactcggttgcatacatctccaaagtagccttatcaatttttggctgcaaaaaaattaggcagcgtgagaaaagttaaataaaactaaccaacaatatttatatctcaacatcagaagaaatatctttccagattcattaagtaaatacccaaacaagccaccgtaatgattttgcaccattaacaaattctgcagtaacaagttcttcccaagaatctccctccatgttatgtagttttggtttaaatatgtccaagcaccagcgtgcagtgtagtcactcctcgggcaccctctgcaacattaactttggttcatatcctgttattagatttgtaatactagtcaaaacaccatagaccccaactcattaaattccatagacaattattgaaacaaagagcagtttgtgatgttatttaaatatttaatcaatacgaatacaacacaatggtgggaaagggtaagtcaagtaggttctaaaaatggttaaagtaaaaaaaaaacttagttaatttcaagatgctagtttgttaattatatacctaaagacatgaaacaaaaagaaaaatttgaactatgtaataaaaagttctcattgtgtcagccaaagatagccaatatgtcacaaaaaaaaaacgattcatacaacaaatactgaaaatcaaacaaaagatattctgatttaaaaagagtacccgcatcttaacgtctccaacgaatgacaatgctgcactagatcagaaaccccacctgaagtaattctggtgcggctgcagaaaacctgttttagtattactgaactccaatgccaataaatttcttatatcaaatattctaatcatataaatccgcaaagtcagggaatcaaacataacccatatttaattgattacgcagttttaacaaagcagtaggaaagattaacagatttcacaccttatatctacagctcgtagaaacttgcagatttcagccacttttaccaacccaatatctgaaacatctgaaccagatatgtcaagaaactcccaggaactatcagctagagatacaataacctcatcgtttagcaacttccttcgtctggcaatggcagccattgcaatctgtcattcagaaaataatcttaagaatcaacccaactttgtttaacaacacatcaacacagagaattatcaaatgcaagctagtgtactaatcataccaacaacaaaaaacgaatgttcttttgaaccagtcacattaataaattttacttaagaagtatctgtttaagtacgaatgaactcaactgagacgcaaattctttcattaccaaccaaagtgctctcttgtatcttcaattaacaattttatcttaaatatccgaaagaaagggggtaaaaagtcttacatttaaagtagaaaagatataatgacaatataaaaatcatttaacataaattataataactataaaaccttaatatcagcaggaaaatttccggcaatttcatctaaatctagaattatatcctccaaatgctttccaataagtccaaggcacaagctcactaaactcgggggccttctcttctcccacgtttttcctgttatcaccgtaaatatacataacaacagttaagcacatatatatatatatgtatgtatataaatatatatatatattcatatagagagaaagagagagagatgtactggagacatgagaggtcgtgatggggtattgagaattggatccgacattaaaattgagtttcgttagagaatctgtaatagccgatagagctttccccttttccatcaaaagttaaaacttctcccaatttgcagacggaaggagctccttcttgccgactttgaataatagggtatgttatagagtcgagatccaagaaagtcatgtgtattttcggagcactgctgcaccaatgtgcctcttggtgatactttataattagagcggctaatttaattttttttttaagtattataacaaatagttatttaaaaatataattttaacatataataaaaaaattatattatcttattttatattattataaataatttatttattaaaaactaaatgcataattttattaaatattatttagaattatttattacgaaatttaaaatttattatagataattttttaaattgttttgttaaaagaaattatttttataaaaataaataaataagatgatatagaaaaaaattacggtgttt

SEQ ID NO: 297548 - DNA, 5373 bp, Cannabis indica
tttttgaagaaaaaaaagtcaaaggaagatttcttattctttcgaagctcagtcgcagccctctgtctacgagagtaaggcgcactaactaatattcatgtatcgttggcgtctcaagtcccatcggcggctcgaaacacagtccccacgtagttctctccttcccttactccatctccaccgcttcacatttagagcttctaaagcaagggttttcttttgaaccttgtatcacaaccatggtgttttggtggcctttgatcattcttgccttcgcttgctatttgtaagttcctcttgatgtttcgtcccttcaatgttccctccattgaggtcagtgcctgatggtacaattttctctcttagttgtaagaatatacttactatgtttgattcaatgcagtcgtggatgaccaaaatcaaattcaggagaacagtattatatgtgtgagttcttcgatgcatttcagttctattagacgtttttaatataaaaggttatccttcatttagtttgtctatttctcaggtgtacgtttattacactttgtaatgagtagaaattaattgtgaaatacttgaaaattccccttactaagaaataattggagtgttgtctttcttttggctgtgtgcatacttaagaggcaaattggcttgatttatgttttagttgatctgagttagattgattggctaaagaataatgttttggtttctgttttagtccaatttctattaccgctaagtgtctcaatctagcaaagtactcaatttaatttggatgtgacaagtcgagtgctagtttataatgagaatctaaaccaccatatcagcatattaatcctaatttacattaaccttgtctaatttattcaattatatgttccttgatctttcaagttctttaggttttttgcttgttgtcttgttgcagacttccaagatgatcctataaaatagaaagaattcttagttaatgaacttaaatgaaaattgatgggactccaacaggtgagagattataattgccaagtaaaataagtgtatgaagcatctaatgaagggtaaaatatatgaaggatttaagtaatatccgttggaggtttgttattaacatgctcatgttttgttcatttatcgcctggtaatctttgtagctggacaaatttttattccccatcagacttgttcatctcagagggattaacattaataataattgactttgtgaattttaaaatctgaattaatgatgatcaacttttgatttactcctgcatgcctagctaagtgtcccaatcttgcattcaattcacaaaattgtagtactgtacatatataaatatactgcatatttaacatataataaactgttttatttaaagttccatttctaaatccatttttgtcttgtcatcagaagctgagatctgattgattatgaaaatcttatcagccaaatggttataagatgaactggtaagaggactttctactacacttaattattattactacttctgccaataagaaattaaaggtaacactaacacatatgtagagaaatatgccatggcgtatttaacatttactaacattcaaaacttattttttgctttctttcatatgaccaacttttatactttagaaaaaaggatagaagttgaagaatagaataaacttttgcatgaactacaagaccgtatggcagagatagagatcaaagttattgaatgggaggtcgagtttgtgttggtcacttggtctgtgtaccatcatgaggccagtgaaggattctttataagctctcattgtgctctcttttctcttgctaatcattatctatgacttgtcattctcacgagcatatactcagtaagttggatcctttgctatatagtttgttaggccttaggatattaaataatgagagtaaatgagtcattgtaataggtattgaagtagtatatataagagtgtgttgaaaaaggttgagagggagaaaatgaattagttaatgagcagtagctcttgggactctcaaatacccagcaacattgttatcctcttcatctatatcaatatacgattcactatttagttatatttgctactgatatactaaattgatagaaaatccctatcaaatagtatcaaagcaatcaatctatggggcaaggtatgacggaaattcgatcgaaacaagcttttaatcaattggagttgatgaaatcattgttttaggcaacgattgaaaaaaccatcgacaaacatgtaggcttgatgatgaatcaacttactcaattgatatagaatgccagagaggcatgaaaccaatgacgaacaagtggtgattgaggatgaacaattgatgccaacaaaaagttgttcgaggatgttcctgccataagtaacaaaggcagcgaaaaccatagaggaggacaaaccacgcgacgaaggtcataaaggtgaagcaacgacgattttagatttgagaagtgtctcgctaacacttccagccaaacaccacgacatggttcttcgagatacgtcgtcaaagtcgaacggtaactcaccagagctagagaagatgatcgacactcaacaggaggataataacactggtattttctctgtcctacctggttgaagtttgtcggaggtctttggttgggtgagacacaacgccccttaacggtggaggagcagcgttctcgaccgctggcgttaagctcatgcgagttgcagtgtcgattggcgtcagagaagacattcttcattccattagacaccaaatgtgatcgatatcctctcagtttacctgctttgagttaggtaaaaattcttagctggcagggacagatttcgacacgaaacctcaacatggttgacgtggggaacactcaccactcctcgtcagaaatgcagcgccgtcgactgtcgagaaggtgccaggggagccatcggatctgaacgagtgtgctagagatgtttgaagcttcagtatagttgggattggagttgtaggctctgggctaaagactccttgtcatagtcaaaggcccactcactgtggcctaacccatgagggcctagtaagtaagaatatgggcttaatgtttgttttaggttatcatggattaaaaaaatggcatcctcgtcaggctttatcattttctaatcgcacgtggtaatatgaagggttgcgacttacaaaccttacttcaaggccgccagcgatggggcaactagggaggctggctagaacaaaggaaacatggttcaactttttattcgatcaagtgttcgctggatttttgatagaaggagaagagttaactttgtggtaaagagactaatccaactttacaatcacgtatctttagtaattgtttctttccttcatctatattttagacttgcttggtttatttggaggggttttcaaacaaacatcttcacaagagttggaccttagatgatcgtgcttcgacattgaacaaggtgatacatttcatatgcatgtattcttggcctggtattcgtgagatctcactggcaagggttagtgtagaatccattcactatgggttttatttacctgcgcactattctctcgaaatgttcactctatttattattgaagcacacaaatttgggttagtgaaagagaatagactatcgcaccaatttctataaatattaatttgagaataaagaacaaaaatgtgagagaacaagctttggacaagaatagccagtggagttaagaggtaagtccttgttgccactaaatttgcactttgaaattggaatacagttgtcatctaaagaaggtgcactcctcacagttagttttgaattaatttatataagctggccacatcttcttatccagtcagttacttaagctcattttgcttgggcagattaccttagtttatttgaaaggtttaagaggaacttcttgtacaacaaattgcagaagcatcacttacaaagctggaaatttaataataggtggtagacatttctcttttatggttgtgcaaccagtgtgtttcctttgcactaggcttcacttttagagttgaggaacttgttctgagaagggccataaggcgtttcaatggagaagacaagctttacaatgctcaattacaaatttaaacagctcggctggtgcaattcctagagtcgtatcgagatatatgccacatgcgaaatttggagatacatactgcagttaactatcgtagtggagtgccatttcgtaattggtttgttgatagaggaggagcgcatcaagagcaattagagtgcgccagctctatttagaccctattgtgtgtttttcatgctcaccattatcattatctggccctattaatgcagctagcgacttttttttgattgggggaccatcgagttacaaatttgaaaacgcctaaccttgctgccacatttcaatgatcacttgttcatcctaccaaaggcgggactacgactttactttgctagttttttgagcgaggtttgcttgttaaatggtgtcttcactttcgcattgcgaacaatgttcatctactgacttggttatttgatagaggatgaacaaagactgtcgtggaagcttgttgctattcaccttgagcacaaagtgaatttcggactactgctattggtaggccttaagatattaaataatgaaggtaaatgggttattgtaatagggtattaaagtagtatagataagagtgtattggaaatggatgagggggagactgaattagttaatgagcagtagctcttgggagagcactggatctctcgaatacctagcaacactgttatcttcttcatatatatcaatatacgaatcactattttgttatatttgctactgctaagttgatagaaaatccctattagagtcgatccttgttcattcataatactgtgtcaaatcacattgtcaacataccatttcaagtcaatgaggcaaatttccctagctatcatttaggagagcttcaaagttgtatttttttaattatgtcctaattaagggggcgtttggtaatatttttttaattagtttttgtttttataattagaaaagtgaaaatatttttcaaaaacatgttttgtaaaactgttttcactttttaatttttaattaagaatcaaaattttaaaaacaaaaaaaaaaagtcactttcaatatttttcaaaatattttaaactccgaccagaccggaccctaattcccctcccacggccctggcgctgaatccggcctctgagccgaatgcgaatccaactctagacctagacacgacttaaataaaatcaaaaaatgaaaatgaa

SEQ ID NO: 297549 - DNA, 5697 bp, Cannabis indica
ttttgtaaggttcacataccatatatttggccagtgtgagggtataaagtgtctaggtctggttgctgctttggtttagtaccagtttgctaatctctttagtaagtagagtttttggaaaggatttttatcttgtctgaatttcttatttgattttattttgagcagggtgagcttgtaaaggtttttgccaatgggaaggaaaaaatcacttgtggtgagtaattttctgctttgcttttcgatcaattagtctcgtggtaagtaaattgatatatattatgatatgcaaacattataaacgtccccagtttccgaattactgtgaatggattccctcttttctccaagtatatttggactgagtaaacaagaataatatatatttttttttatttgcatgttattatttgttctcagtttactacccctttgatatagatcctgatatgcaaaaccatatagagaagatccttcataatggccatgcttcttacaaagtcctgtattcggtatggcttcaatgagaatacctacaaagatattctattttacttctctttagctgctatttcctctctttaaaccactgcactaattgttttcttacattttttttttctagagtgggtatcttgatatatgggaaccagctacattggcaatcaagagggatgcctacagtattaagtccagtagcgccaatggtgttgtacttacagaaaagttttcgccgtccacaattgtattattctcactttggcttatactacctagtacttacaaatattataaagtatgccaaacagtcatcataaaactacagtcaccaaattagaaaacaatttcttttgaaatgtttactgtcaaatatacagtaaacaacataaaatttgaccatccttggattttcttctgattttaatctttattctaacaaaccagcaaatggccataacaacaacatgctgtacctttttgcttgatcaccctgtaccaaccttctattgaaccagtaacctctgtttgcaatgttgaggccaagctcataaagcttcaacttttttaagttggagagggtgctagatttatatattatttgatttctttttattttgttctatttttttttagtattggatggaaatcatggaactttttttatataaattacttgtgatactttcctggtccgggtgagctgtgtccaatttatttctgacatataagtattatatgcactgataatgagcatcatcagattatatatttgcacatcgtaatgcatgtgtgggtccataggtccccacattctaatcccaaaatttgtttgagcttgagcttctattgctgacataaaaacatttcttttcaaaacttcggaaacaacccataaagtcaaaatttcaaaatataaaagtatattaacatatagtaatgcaatattcaaattgtatatcaggtcaagcccacggtaggacatgtgctcatcctggacttgtctacgaattttaactaacatatgaaacaatgtattattattttgacaagctaagtcagttattctcttggaattattgaactacgtgatgttcttataggttgccttatttctttttatttttctcttttaaggttgcaattccttatggaagcctggcagaattcaatataactggccttggtggtgttgagcatctattgaaaatagataacaatgcagacattattaggtaagcaattgatgctattataagcttccaaatcaactacaaaaatcatctcacatggagtttattatgttttgtttggagtgaggggttcaaattatttagttattgagaatgttaaggatgagaatatacttgtgtttggttgtggcatatgaatctcgtgtgtgatttttggaattatagaagtgttttacataatgctatataggtcttattaattatgtcttaacattttttctaataacaaagtaaagatgggttaattgtagatgataggaagtaatctagattacatgctaggatgtgactatataaagtatactaaagcaacatgtaatacaaggctgttttgaagcctattatatcaccaatctgcctatcgaccgacaaggacaaccacatttcaaagtgtcttcctttgtcttcccattgcaatccacgaccccttatgcctccacgttacaaataatatgtcatgactagaattaggtcacacaccattaatcctcatttattatagtaactttcgagatagccctagaaaagtaactatgtaggcatagatgatcactagtaagaaatctttcggcacatcacacacaagttcagagaaacattgtaagctctcatatgtataagcttaatagagctgccaaccacctaaatatttgtctttgttggagcaaagattttccaaatgaattgatttggccctcaccaattttttttactcaaaagtagatttcaacaaaaagtctcataattgtcaggcttctttatccttctttctatcagccattgacactatctgtgaaagtagcattaataacaattctagagcatgtatcatctcgaattcctctaacaaattaattcatattgctccaccacaaaatcacaacaaaatcttcctaatgctccacccttccagttccccttgcatatgccaaaatagtcttgagagctagcaatacgataaagtaatgggagcctactagccatagtggttgctcccaaccaaaccttcgaaaatttgagtctcatgcgtagttcaaaagtgaagtgtttttaggtctcagtgaatcatgaaaaaatataattccaaaggttttctttcaaaaaataaaaaaaataaatagaaaacaattccaagggcttttgaatgtgaggttatcatcgagacatttacatttgacaccatgtcatatttaatcatcatgtcacaatgtcctttttcttttgggaatctccagaacaatttcataaataagctaatacgctttacaatatttatcatttcctaacaccaaactcattaggtctgaaaccttctcctatgctaccaaatgatcacctccatccccattgaccctctcccacgagaagattctcttttttgcttcattttgctctataaaccatcttatttacttggaaaagaaaaggaaactaggtatgttcaattaggggtgatggaatagaatggagtggaaaataatttattttctttcatttctttatttggtttcaatgtaatgcaatggaatactatttcaatttaatggtttttccactattttggcggaatatctattcattccaaaagtgggatgcaaaaccattccaaagaataataaaacaattttttttgttttgttttgtttttttttttaataattatatatattttcatcttcatttgaatttttatttcatttcattcatattcctattttaggaatattttatttagcacgaggcttcagagcttacaaaaaaaaaagtacattttgtttggttcaaaaacccaaggtaagatgggcacattgatctagtcaagaacaacaatatggtgaaattatactaaaatattacaataaacactcggtccgaggaagtaatatgtacaaaatacttgtttgcatgcaaccatagttattgtttgcttacctccatacctctccttccctcctaaattcccttctgccaaacataacgtaagtataaccctttgtaattagtatagccttgaacatatctaccgaatagtctgctttatgcttgacttaaagcacccatctctagcccattggtggtactctttttggtggctatagcgttttttcaaagaagtagtcacttcaacatgtttttgcaatatttgatcggctattgtggctcaaaaatttcaagtgtctgcatgggtaagcatttcaacaattttgacttccccaaatttgatggcattgatgtccacacgtgttgaaaaatgtttttctacacaacatatggcagatcacataaaagttttgtagccattggatctatgattgacggtacactcacttggtacataggaatagatctcgttaggcttgtttgtactttgcaaaagaatattcaaggtgacattcattcacaataactaatgcgtacatgatgggaggattgtcaaacaaactttgctaatgcgtacatggggaggattgtcagacaaactttggagttactaaactagagctaccaaagcaagattatattttggttaaagaagatattaacctgttgatgaaaatgactaacattgagtcaaaattggtctaagattgaatccaaagtacttaaaatttggttgtgtattggtagaaaagtcaccacaacaagagttcttttttagtcggggttggtttggcctttgtaggatcgtaaccatgtttgcattataataatcaatctagtgattgacaatctctttaatgactatggaagatgtttgctgtgtgactggtcttggcacacccatttctctgaagtgatcaccttaggattcagggtttacgccgtaatggtaatgtatatagactggcaccgcttgcacggtcataggaaatggtttcttgtcaattaacatctattttcccttcttgggaaactttggctagcctcctcttatcttgtattgtgtggcagaaggctacgcagtcaactgtggcatgactttacaggtgtgaaacttgcatacggggtccaatcactttagtgtgtctaagtggacttgatgctttggggaccctactttttccaagcaatcatacatctcaaacgttgagagttgcaattgacaactctcaattgagtattctccttgaacacgagagaatgtgaacagttatatatctttgctgatgtcaatttacacatcaaatgttccaataaagacctatcacgtaagacccaatcaattaaaccttgttcaaggtgcaacccaaataaaaaaaagatattgcccaattaatcaagatcatgccttgaccatatgggatttgggtaagatccaattacacatttcttttgctcatagtttgcttcctttgtcttgccagtcttcttgattcatcacccctcctataacccataaggaaattcaactaattcaccttccctccaccataaagcaagcacgaaaaatatctcctaagtcatacttcgcctaacaaaattgactccattggtattgtcgacatcgtgaagggaagtcatcatgggttgttgatatactcatgagttgctaaatttcaaaaactaaaagggttgaagattgtagaaggtgagaataggtttcttgatcgaggacgataacataaacatctaatggtggtgacgagcaagccattcgatcggtgaaaaaggtcatccattatgtgaagaactctttttgaatataaccaatcacgaatggcctattcaaccttagaatatgttgttcattggtgaacttccatgggacgttgacaacgtggattgtctgtgtgtttattgggttgccgtaggagtatttttgctttaatgaccgaaaacccagatgtgatttttcaatataaaatgaaaagaaagtttttagatatttagattcgttattttaagatgtaatcaatcgaaggggttgatccaatccaaacaaaaa

SEQ ID NO: 297550 - DNA, 3507 bp, Cannabis indica
agtttatgattttttttttttatatctataattttcaaggagattctttcataatttaaagactgatataaaaataatattttcttaaatatttgattagtattttttttaagagacaaaaagagtgaaaattttttttaacataacactttagttttttaatttaaattttaaatttaatttacctcaaatttgatttaaaatctaaaaataagtaaacataattgtgtatgttagaaaagatacggcataccaacttgtttaatttttaattgaattagatgattggttttaattagatgatttttatttgctacttaagatgcccaacatcatatcaacttggtttgctatactatttattaaataaaaatagtgtaaaatttaatattaaaatacactaataataatatattacctcttatagtgcttgacattttgagatccctaaaacattctctttttatttttttatttttttttaaggtaaacattctctttttatttactttacacttatttatagctcataattaatatttaaataatattattaagtaccagtggtgttcaattctttttaagaagtgtcgacttacgattagttaacaatatttactaaatgtgtatacattaaattatatgagattcgatatttaattacattaataacgatataacacataagaaggtgctactagcatttctcttaatattatgtctattatcatgataattaaattattgtattatatataatttgagcattctagttaagcacttgacctaacattacaataaaataatatcttatgagtggttaataattttttttataataattgataaattaaagtatataattctgatattaaattataatacttagtgttgcccctactagtgtccttgttgtccccactagtgtcctttaagaaattctctcataacctagtagattttgtcaactcattaatctcaattaatatgattattaaggcatcattgattacacgtgatcaccacgaagatctctacaaaaacttcatgaaagtgttatgcaatgccaacacctcagaagggttcaagcccacaagagatgtctcaataccagagtacaacctaaaggcattcgaactcggacctcctcaactcggtcagccaccaaataagcggccaatcttagcatttttcgcaggcgcagcccatggggacataaggagcaaactctttgaatattggaaagaaaaagatgacgaagttcttgtctatgaaaatctaccaaagaagtacaactaccaacaattaatgggacaaagcaagttttgcttatgccctagtggctcggaagttgcaagccctagagtggtggaggccatgtaccaaggttgtgtgcctgttctcatttctgatttttatgcaataccctttgatgatgttcttgattggagtaagttctctatacaaataccaccaaagagaatttcagagatcaaaactatcttgaaaggtattccatactcaaagtatttgactttgcaaaagagagtgtggaaagttaggagacatttcatgttgaataggcctgccaagccctttgatgtattccacatggtgcttcattcaatttggcttagaaggcttaactttaggttgccattcaattaattaattagtattgttattttatgcagctttatggtataatcttacgtgatattatattattattagtttcaggctcagctttgtgatacgaactggttttttatttttttaagctcaattatgacatgtttgtattgctattaattgcataatgttgctttctctacttggttttggtcagctatcgaaacttttgagacaaaaagaatcccaaaaaatcagcaaatgttgttgagaggaaacaaagtttgctctcgtcttaataaccaagtgtaaattataagtatattctttatttgtgctactaacataaacaattaacgtcaaaaaagtataaagaattgctccaaagaaaagaaaaagaaaacaagtgattgattaagcatcaaaacaatatgaacactagtgcttgtctcccttgggaatatcttctttagaagcctttgattctagttccttaggaagccttttctctacagccctgaaatttcattcgatcaagagtaattgtcaagaagtgttatcaacagtaatggtcaaataataaaaatccaaaaaaaaaaccatctaattcaaccattacacttataaactattgttatatggtcattcttcgtgacttatactggtacctgtactaaagtatctaatgtccaaacacttgtgagatgttcaacaacaatatttctctaccttaaatatcatagccaagactataaataaagtaactaaactgcctaacaaacttctttagactggactagactagtaaatatctaaagtcctgacacttgagagattcgacaatgtcctaccttaagaatcatagccgagagttgaaactaagaaacaaactacctaataagtggttaaagctgtttattagggaccactccataaatctaacctgtcaactgtaatgaatgaataaagaagaacaagagaaaatagcttatcaaatatttcaagcatatcacttatttgggattttctatatcaatacggcatgcattcttttaaagaattccttaaaactaattcaagcatttttagcaacaaaagtgatacataatttacaacccaaagtaaccaagtatgtctagaagctctcactatcccatcaattctatggaaagtgctaatgtacccttacttgatccattaacactattcaattgagtaacattaacactactcaattttatgccaaacacacttatattaacaatcccatttcaagatacaagaacaatttttgctctttaaatattgaatgaattggcctaaaatcatcatatttcagtgccaaacatacatacatatatatatactagaggcaacctacttgcgatgcacttttgttttgttgttcttttgtatttttatttaggcaattgtgtgtaaaactatggttttaaaaaaaccacttacaatcaaatataattttacaatcataaataattaaattgagcataagaacaaattctatgataaaaatgaaaacagttgctcttagggaagacttaattggtttaatcttccatttgtagaaatttagtttcagaaacaatacatgtatggtttcctctcagttccaaaacatagatcatgggattcaaatatgtttccaaactctattttccttgtgaaaatatcaaaataaatttgacttattttcgtaattaactaagcttaattaattgaggtctaagtgcttaacaatgttgggaaaaaaatgattgacaaaacttatgtgtattaaatatttatttatattattatcaaaatcatatgatatctttatatattaaaagtgtctatctaacggcatttcttggt

SEQ ID NO: 297551 - DNA, 4078 bp, Cannabis indica
aatcacgtaatacgcctatgctagttagggtgttacagcgaggccacatggaggtgatacgaaaaatcacttgcttgacaaattgaggcggtaagacctcccaaaaagcgataccaagaggctagaagagcaaattgctgccccaacaaagttggtaaataagcaaaggggagcattgttggattctgaagatgaggacctagaaccctgcgtcaaaaggatcacggagacccattttcccaaaaactttaagatgccacacatcaagttatatgagggaagaactgatttgcgaacacatttagccaaatacaaaaagatgatgcaagtcgctcgagtcagtgatgacacaaagagcctatgattttctttaaatttaactaagtctgcggagcactggtggaagcgactagctttaggatcaatcgatagatggaaggatttacagtccatgttttgcaagcaattttatgccgcttgtaaaaagacatggaaatcgattccttgaccaatgtcaaacagtagcctaacgaaagcttaaaggcttttattcaaaggatgatagaggcggccgcgaagaccaaggtcagtgacgatttgaagttgatggctctccaatcaggattggctgcgggttccttattgtggggagagatgcaaaggaaaagagctgaaacactaagtggttcatgtccaaggcacatggcataattaaccttgaggatgcatacactcaggcattcggggttcctccggcaccaatgcctgcgatagccactccaagttttacctctcacactcctaccccatctttgtctcttcccgaatctcaattctccccaatcgtttatggacctaccacattcggccttgtcccaatacagacccatttctcttggtacgaaatggcacaaactggatatagtgtggcccctggacagtttaagtctgaggttctggactctagtgcgggtcattcgcggggaaagaggggatgacagagccacagtcaaaatgattcggtgaaaaaaccctagaaagattacgatccaaagtacaacgagtatacaagtttgatagacacttaggagaatgtctacaaagcaacatgtaacatcattcattaccggaagcccccacgcatgtcaaatggcgggaggaacaggcgatatcaaagcaatgtgagtatcatggggagaagggccacactacgaatgagtgtgagtacttaaaaaacgagatcgagatgttggtctcagctggacatttgggcaatggtttcgtatcccaattatctatctcggacaggggttagtccaaggacacatgatgcttccccgacagcagggtgcagtcaatcccccacagggggttgcgcgcccttaagctcctagaacatctttacctgctcttcctgctccgccagctccggatggggtggccctattggctccaagactaggaacctcgtatcctcctagagtggctccaccacctatggacggacatgttgcaatagtattgggcggacccaatctcactggaagtactaggaacgcacaaaagtgatatttaaaaaaagtgaaagaaggggaagtgtgtgcactggtacaatctcccacacagcatctaaggacgatgaatctcccaaaaaccttcacagaagatgaccctaaaaatgcacgcttcccccacaacgagcctttggtaatcgatgcacagattgccaataaaagagtttccaaaatcctagttgacaatggaagttccgttaatattttgttaatgtccgcattccaagcgattggacttactgaagcggatctaactccatgctcagtccagttacaaggcttcaatggtgatgccttaatgcccatgcgaaaaatctaactaccaatcacccttaaaggagacagcgaggctagtgcgtttaaacactcaaccttcgtggtagttgactgtcccacatcttacaatgccatatttggccgaccaactctagtggacttgggtgcataggcaccattaagggaaacaagcagagcgcgagaaactgttataatgtatcaacctgagccatgtacacggttagggaagaagcacttgaagcacttgggtcagaggatccaatggacacagaggttgtacaggagggataagaagacaagttagatgcaagagttagatgagcagaatttagaacagatggaggaaattaaggaagtgagcatctacaaagaagaccctaccaaaaccattagggctccccccgaccataaaagaagatgtaatcaacacagttgaggaaaaccaagatataatagcctggagtcattctgacatgactggaattaattagaatattattttccatgccttgaacatccatgaagatgtaactccgattcgttagaaaagaagacctctagatcatgtcatatctgatgcggtaagaatggaggttgacaagctgactgccaatgacttccttcgagagtcattatatcccatctggcttgcaaacattgtcgtagtcccgatgcccaatgacacatggagaatgtgtaaaaaatttcacggacctaaataaggcctgtccaaaagattatttcccgctatcacggattgatcagatagtggatgccacgtcagggttcaagttgctcacattcatggatgtttactctggatataaccagatcaaaatgcatattgccgacgtagaacacaccagtttccaaactaacaaaggcatttactgctacaggtgatgccagtcagacttaaaaacacaggagcaacataccaaagaatggtgaattggatgttcaaagaccaattaggccaaaatattgaaatgtatggggacgacatactagtgaaatccaaaacatctgaagagcacgaccaagatctggaagaggcattttcggtcataagaaagtatgggatgaagttgaatcccaaaaagtgcacctttggggtctcttctaggaagttcttagggtacattgtcagtgcccaggggatagaagcaaatctagagaaaattaaggccatccttaacatgccctctcccaagaagcaaaaggatgtctagagtgttacagggtgtgttgctgcccttagtcggttcatctcgaaatctatcgataaatgtatcccattctttaatgtgttgcaaggcaacaaaaagttcgtgtggactgaagagtgtgaggactcttttcagaagttaaaagagcatctcaccaaggctcatatcttgtcgaaacctgtagaaggagaaaatttgtttctgtacttggtagtgtcagatcactctattagcaccgcactcgtgcacgaggaagagaaagtctagtatccagtatattacgtgagcaaacgattgctgggtgcggagtctagataccctatgattgaaaaattttaacccttttgtcttactaatagcattgcacgaggtgagaccatacttcaaggctcatgccattagagtactcaggaatcatcccttgcgacaagtactatagaagccagaatcttctggcagattattgaagtggccaatgaaacttagccaattcgacattcattaccagccccgggtgtcaataaaaggataggccctcgctgactttgtagcggagtgcacaagttttgatgatctcctagaggagctagttccaaagcaccatacgctttgggttccgtgcctcgaataatgaagcagaatatgaacctatgttggcaggcttggagttaggaaaagaagttggggcccaataggtggatatttatagtgattcccaacttgtggtgaaccagatctctggtgagtatcaaataaaaggtgagaaaatggtttcctatgttctaatgttgggtgaattattacagggatttaagagttataatatatgacaagtcctgagagaacaaaattcatttgttgacatgttggctaaattggccacagattcggaaattgtaaaacacggtatagtcctgttagtcacttgcaaaaatccagcattaatgtccaaggggtgaattgttggaaattatttta

SEQ ID NO: 297552 - DNA, 1488 bp, Cannabis indica
attccgctgcaaccactgtaagatttttcataccttttatgtgtttattttcattgttttagaaattcatattaggatgttaaaaacatactagttagtaaatctagatcctggtaaaatatatttcaacacttaacctcccattgttgaagaagcgcttgcacatccagattggaataaagccatgcaagatgaaaacattcctctaaaaaacaacacttgggtacttgtaccaccaacatcagacaaaaactcgattggaaataaatggattttttgtgaaaaattcaactgcgatagatagttttcaaaggtatgaagcctgattagttgccaaaatattctattagagacatggcattgatttcgttgagatatttagtccagtaattaaagcttcaactgttaggaatattctaaccattactgcagctcgaggttgggagattaaataattggatattgacaatgttttttaaatggcacattggaggaggatgtgtatatgttgcaacctaagggatttgaggaacctagaaaaaaagactatgtttacaagctgagtaagtcattgtatggcttaatataggcccctagagcaatgagacatcttaagattacatatcagttgtgatgaacaattaaacattacagggtactcaaatgcagattgagtatgttgccctgatgatagaagaatagtggcaggatattgtgtattttgaaaacactctaatgtcacggtcatcaaagaagcaggttgtggttgcaagagcaagtactgaatctgagtatatatcgagccttggcgtatgttgcagctaaaattgcaaggattgaattcctcgtgaaagaacttgaatttccaacacctacaactgttacttggtgtgacaacataggagctagtgctctagcatctaactcagtttttcatgctcgaactaaacatatagaagtggacatacaattcattcgtgacaatgctttgaacaagaagtttgacataagatatgttccctcctcagttcaagtggcagattgtttaaccaaaggtctatcaagctccaaattttatttcttaattgacaaactaggactgattgttgcatttaagaggggttgtgaagaaatgaattgaaaagtttttctccccttgttttgtattttgttatgttttgtggttctgattagacaggtgttaaatattttgatccctaggcagattgtgtcattagtactacaatgatgattgcattataaaatattttgtgattcctttttctgttaaaattagtgccaactgtatttgagcattgtggttttttttttttttatttttgaaattaaatatttatatattacaatgtataatttagactcaaactcaagacctccaatacacacgtactctattatagtcatttgaactagcctcaagtagttgagtctttgtagctctagattattttgtaattggctatttat

SEQ ID NO: 297553 - DNA, 1267 bp, Cannabis indica
caactaagtcttcctccctagatctctaaatcagaagcagtttgttttatctgattatcaaaaggtatacaattgtgatgagacaatatgtatttatagagttagggaggggacttagctacaaaaccctagttgggctgggcctgctcatcaaaggctttagtcaactagaaaagcccacacttctgcttcacctagactttactcacagatgctaagcccattaacaattgatcaccaacaacatgggctaacacagcaaagaactatccaatcaacccaagttttaataaaaccaataaaatttaatgtaagcccaaataaaagtctaacatgacaacctaacaagaacaccctcttcccagcccaaactacaagttttgacaagccctcgacacaaataagaaataaataggaagaaagtgggcaaccttgtcttaaattgtgagttgaaacaacatggcccccagaagtaccattaatgatgaaagaaaactgaggacttttaatacttctaagaataaattcgcgccaaactgcatagaaccccatagcctccatcatagagtccaagaaagaccactctaccctatcataagtcttactcatatccaacttaacactcatccacaatttatcaccattattatgcttcttcatagaatagagagtctcaaatttcatgatggtattatcaaaaaactaatcgtccaggcacaaaggcacttcgagtcttagaaataactaaatgaatggttgctttgaactagaaagccaaggccttagtaatcactttgacattgcaaagactaatcaaacgatactcaaaaatcttggatggatgagtaactttaggaatgagaaccacatttgtcttttttaaatttcccatctcaacaccattattaagaacattcacacacaacaccaccacaaaattctttactgtctcccaattagactggtaaacactagcatgaaaaccatcaaggcatggcgccttggtaccaacaaagaacatttgaggtgtgtctatatttgggtgaaaatgatacactgtcagttattgtttctgctcatttgttttgtgcggagttagaaaaattgttgagagtgctaagagcccacaagcttgctattgggtggactcttgttgatattaaaggaatcagtccctctattccgatgcacaagatccacctaaaacctgatagcaaaccttctattgatgctcaatggaggttgaatctgttggaaatattttacc

SEQ ID NO: 297554 - DNA, 3929 bp, Cannabis indica
tgaagacattgttttttgttgaggccaaatttatattgtttgtcaattagtttctttgcaaaagttagattacaacatgtgtttattgtttcaggatgcagaggcaaattttaaagtgaattggaaacgagtagcgatcacaagttcgtttggttttggttttgttggacctgttggccacttctggttcgtgtttcctatcttttcactgggggtcagttattcatctttgtttgttaactgctgcgactgccttcccacagccgttaaaagcatctgtgcatgtgatttttgctgataggaaagaaaatccatatatcaattctcagttcaggcaacatgtagtttctgttttcttgataaattgttttgaattgcaaaaattattctctatgctgcattttttgctatttacaagaatgagggcaatgctatcaaatttgccgggcacgtgatattctaaccataaatgtgcaaaaagagctttagtttaagatgagtatttttcatactgaaattcttaggggttactcaattaaaccttgtaggtacgaaggcttggacaagtttttaaggttgaagcttcttcaacagccaaagtcattgcggtttgtggccactaaggttgcaatggatgctatcatctttggccctcttgatctgtttgtctttttcacatacatgggcttttctatggggaagagtgttcaacaagtgaaggaagatgtgaagagggatttcatcccagccttgattttggagggcggtatatggccaattgttcaggtggtgaatttccggtatgtcccagtaaggtatcagctactctatgtcaatatcttctgcttgttggatagtgcttttctgtcatgggttgagcagcaaaaggatgctgcttggaagcaatggttgtcttggaactctttcaaagaacgaggaggctcgggaagattgtgattcttcttcctatcctcttgcactattaccccccctttcattgtattacaccaaaaaagattgtatcagagtgtttgatcgagggtgaaataattggcccctcctaaaattactggcttcgattttcaagccagcatctcgggaatgatactgttcttttctttgttactttttttgttcccatcttgtaaacagacttcatgtctaatgactaataccaaaaaaaaaaaaggaaaattttccatttggcaaagaacatacaaccatttagttagtgtcattaagctttgtataatcataatggtttaaatgacagggagaataagctgtacaggaaatgtagttggaatattattataccaacagcagaattgtggtttacaactacaaaatactaacttatcaaaaaaaaaactacaaaatactaactgatgttctggggagtaataaaatccatgatcgcattggaagataaacaccattatttatatgaaaatttgccactgttgatgaagactggagggatagccgataggactttgctattcacttccaaaaacactttttaaagaacctctatattttttttcatttaattatatatttcaatattaagtttctatcaagcaggtggctcatgttgcagtataatccaatttcacatggaattatcttaacctttttaactatgaaaaaaaatgtacacaccactgtttcccatgaaagttgagtctagctttattttggtaggaaaaagtaacaggacatgacagaataaaaaaaattacaacttgttaacataaatgagattctgaaatctattgctagatgacctatgttacaaaacaatttacagagcaggaagcctaaaaaacaaaattactctcaatgaaagagacgggtggttggagcttgcagagagattgtgcaccagtcatgtcattcataccaacaaatgatgttgacaatgattggtttaatattatagcctgatttcgaattcatgatcttgttttgaagcaatgtaaccaatttttactggaggaaaatggtctattaggtgaagaagctgctcttaggcaaatcatttccggagtgctagctgttcgcttctgtgttttcataacccagactgaatttacagttgctagatgaacaaactatgacctccgccaagaggaactcttggcttgaataccgcagttacatctaagcaaggacagtatttgaagccaatgctctgtcaagaaattagggcttgttagagctttgaatacattgtaaagacaattcaaatcccagacaaaaaaagaacaattaatagaaactaataaattaaataacatgtggctgaaatataaggacaatggagacttgtgtctctgagggctgaaaggggaaaggactagaaataataccgggatgctcaatagaagcccttgatcatttactaagacaggtaaacctcttcttgcggcagctgggatagattttaggatcagaagagctctttgtgctgaaacccttgcgtgatttaaacaagtgcttgtactgtctgttgaagatgtatctttcagttgagaattttctgaagtgggacacttcaacaagtcagcaagatatagccagtcagattcacacatgtggcgcacctcaggtaccatgtcattaccaaacacacaagaattgcaatgacagcacaaagttccccctcccatatagtcatggctatcagcttccccagatatcgcactgacaggaatttctttctctagtttccatgcgacaaagaagcgattcatgaaagaacaaattttcccatggaaaagtggttcagaatacatactaatagattttactttgtcttttgattcactttctggtattactttctttttcgtcctgaaatgcttgacttcttccctttgcaataacattatgttcttgtacgtcgactcgctaagcatttcaagccttctagctttacttagaactgattcagaggtagtgtccaaaaaatgcacttctgatgcatctggaacaagacgattaaaatgcgatttgctatctgctataatttgctctatatcatttgcagtatgatgttgatgatctgtatatgacagtgcatcgaggaacttgactgtttgaggcagaggacaatcaacagaacagcaaaccagggctttggtgcctctagatgcaggtgctggacaaatgtagcaaccagctgctgtaagagatgtctgtgcatatccaaaacaaaataaaaagaaaaatgaattagaaaagggaaagacagcaaaaaattagagtaatattcggtacagatgtttgcacaccaaaagctaacatgacaacctaatagtaaaatactgcttgagccttaaacaaacaagaactaaaaatataagaaggaaaaataatatttgagaaacaactttttcagtaatgcacaaaggaaaaactagagtgatggaacaagcagtaccctgcatgggaaagtacgcatgtagtccagcagcaattttgaggtactgcctctaattggcctgttcctttgcgagatgaactacagaatcaaagaacagcaccgagaagtgaattgttatttccaaaatctttatttattgtattaagaaaacagataagatatgattaaccttataaagttagctttacctgcaaaatcaaagcaataaacttcgagaggcatatgtcttcaatttttgaagggtttaagatctctaaatcaatgacagcatagccaaactgaaacagaaagcccaaatgaatcttcttcgaggtgttttaaaatgttcgtcttaaaataaggcatcatggtttacacgaacagttaaggaggcttacatctgttacagtgactgctttattcatcaaattggagcaaacattatcaacatataaccgggtttgttgacaagcagaaataactgcttgcagctcagaat

SEQ ID NO: 297555 - DNA, 1491 bp, Cannabis indica
gttatattgtaatagcattcttatttgtaattaaaggtgttcaacactatacaaaattagttaatggtaaattatattatttattaaattaaatatacgaaattcaatattaaaatcattaataaaaactgctcatatggttataataatagagcatgtggggtattcattcattttgttgttatattcaaagtcggctccaggtataagcgggctataggtccgcgcttaaggcccactgagctcaaataaaaaaatacttttcaagaaatatacatatttttttaataatttttaaaaatatcatttatctttataataaaagctcaatttttttttttttttttttgcctatgatctacttcaattcaaggccgggtctggttatattcatacgagtagatcatgcagttaaaacaaattgcatgaaagaagatttgaattttgataacattttttttttctttttcttcatggtttcatattttatttgtgaagggtgattgaagccatcataggattctagaaacacaaaatgtcaaaaactatttgacgtacaagcaacttctttcatcttcttcttatttaattctgataaaattaataagttggagggtgacttttacaatggcagtttatttggtttgcatatctttccaagtctcttgaaagctaaacaaagtatttatttatttatttattttttgttttcttgtttcttgtttcttccagactaattctgagttgcatacacctttttattcttcttaattttgacatgttcatgattaatccggatttatgcccttgatttgctctaagattaatgaaatggtcagatggggttttattttatttttggcttttgcagagtgtaatttagtatatgtatgtaccttctactttgatggattaattttaatatttacagtttcttgtttacgttcaaactcaaacattaactattaaagattttcaagcactttttaatataaacttgttgtactcttgtaccattaactttttattacaattttttagtcaatttttatttttaaaaatatatgttagaatattttttttccaaaaatattttcatggctttataaatttttaaaattttttaaataattaccgtgacgaaaaataaatgtaaagttttttaaatacacatagtaaattagaatatcaaaattttatttttaattatgtaaactattcaaaaaattacaagaataatattgaaactataacgaatataactatataaaaaatattttaatatataattttgaatatgaaaattaactaaaatattgtaattagaacttcctctccctaatgacattactctagtaggtttggtgtttggcgtcatagcatttaaataaaccaacgagaaagttgaagtaattaaggtgccgtttggtaacacttttgttttctaattttaaaaacagaaaacaaaaatgtgttctgtaaagttcattt

SEQ ID NO: 297556 - DNA, 5535 bp, Cannabis indica
tttttctttcttttttctttttcttctttgaatggaactactattgcatctgtaggtttactgtggataattttgtgtggattaagcattttgtgaagatggaagaatgtactagcaccaccaccaccaccacctatactgaattctctatatatctaatttaatcttcgcaaagaagcccttttcttcatttgttttattggaatatatatctgatctgatttattgtttgtaccaatggctcggcaatacttttatacttgcccaaactacttaaaatataccaataattaagcacacattctccaatagtcatttcactgaccacaaagaaaatcacaaattaagaccgttgtaaattcatttttactacgtttaaaattctttaaatattgtactcgtacggaaagtctcattataatcatcatggaagtaatgcctttattaatatatggagattttaatagaaatatattattttgttaaatataattcttaaaaatggtattattaaatatacacattgcttgtgtggcattgcgctttaaaattgcaaaattagagaggagtgacacaagatgtcacctttcggctagaaattctctcaatgaaagagaagtattggagagaaatgttttgggatgacacttctcgttcatgatgtcacatgggctgtggtatagctctcccaacatcccattatagttcacatttaataaaactaattaattttcgagtaaagtgtatcatcttgacttgtgagccaattttgagcttgataacttcaaaatagagctatgactatgggacaaacttagatccgccttgaaattattttttcaatgcaagttgaaccaagtcgtttggataaaattgagagagttatgcgtgttttactgaagggtagtatgtactttttagctctaaatctaacctgtgctatgtcatcatgattcgtaacacctcattatggcccaggtcagtcgtgcatgctcctggatacctaggggtgtgttttgccttattttttatggtgagtcatattttggaggtcttgggaccccaaaatctcatttcaacgtctgaaaccctaacatgagacctgtgccatctttttgtatcaaaagatggcagtcggctagggcatgtgggaagcccttgatggtatttctcgcttgccattttttgggacataaagatggcaatggtcggctatggggttacacacccattggtgacttttctcacttatatttgataccttgatgttggaaattattagtgaatatggttaggtgttagttagttatgcaagctgtgtgtgtaggatggagtttgttactcttcacagctggccaattagttttctaacaatcttccttttcatgccttgtattttcacttaattcatataaatacaattcattattcagagctgagcaacaattcactcaagctcatttcatctcttttatgttctcaacatggtatcagaactttggttccaatttcttgtcctttctttgttcatcgtggttcttgaagcttttaacaatagcgtcctcctttgctgctcctcgatctgaaggctcgacttccgctactactgttcttcctctagtcgtagtagagcatgtgattccacaaaacctagtccctctcaatctacgtatcgatcgcacaaattatgtctactggcgatctcaagtgctatccaccgctcgtgctcatcgacttgaaggatttctactagctctcttcctcaagctcttgcaacaattcctgatcctcttgatgccacgagatcagtgccaaatcttaccttcgatgactggatgcgtctagatcaattcctcatgatctggttattcaattcaatctcaaaagccatgctagaacatgaaacttgatgcacctcctctgttgaactctggaatgtgttgatacaactcctttccaacatatctcgagcaagaattattcaaatccaaggcatgcttcagtcgacaaagaaaggatctacacaaatcgatgaatacattctcaagatgcaatgcctagctgatgctctacttgtagtaggacatcaaattagtgatgatgagcttatcttctacattcttggaggtttatgtaatgaatatgactttgctattatcactcttacctcaaaagaattcattatcttgcaggatggtcaattattgcttcaaactcaagaacggcgacttgagcaacaacattcccctattgccttggatcttcacaatccaatagccaattatgcctccaagaaaggctcctttacatcctctaactctagcaattccaatcgtggttgaggtgcttaccgtggcagaggtggtaggacaaaccacaacaatcgaggtggaaacaaaccaatttgtcaagtttgtggcaggtctggtcatactgcaatcaaatgtcatcacagatttgatttgagttatcaaggagaaggcaactccactccatctgaacctacttcagagaaaccttaggcacttcttgcatctacaaccataatggttgatcctcaatggtaccttgacagtggagtatctcatcatgttgtgtttggtgctgcaacattgagtgaggcagtggactacaaaggaaaaggaaaattggtaataggtaatggtgattctctcacatttcttgctattggttcttgctcaatttttacatataaatcattgcatttacacaaagtcttaggtgttccatacatacacataaaaatcatcagtgtttctgaatttactcttgataatgatattgatatcttgtttaactcttctcactgttttgtgttggataagattacaaggaaggttcttcttaaaggaacacttaatcaaggtctatatcaactttctttcccttctttagattcatggaatttgccttctccctctattcacttaatcgtaaataaaagtgatgtaactttcaattcaaatcagtcttataatgtttctagctatcatatcagttctaaacactataaggagtccacttaaattgttgctttatgacataattgacttggacatccatctcatataattgtaaataaagttttacactccaatgaataaaaaatattcaaaatctgattcgcctttttgtgatgcatgttaatatggtgaaaatcatttaatgcattttttaagcgttcctctaaaaacaacacaatttctttaactcattcactctgatgtttggggaccttcaccatatccaacacatgaaggttataagtactacatcttgtttgtagatgatttcaccaaatacaactggatttacccaatgtaaaccaaaacagaagttgttcctatctttctaaccttcaaaacatttgttgagaaccaatttaaccttaaattcaaatgtataaaaattgattggggaggagagtatagaaatttacaaccaatcttacaaaaactaggtattctatttagacatccatgcccacatactcatccacaacaagaaagagtagaaaggaaacataaacatgtcacagaaatgggtttaactatgctagcacaagccaaaatgcctctaaaatttggtgggatgcctttttctcagttatttttcttattaataggcttcctacaattgtcaatcaatacaaatcgccctatgaaagcctatacaaatctgtcccagattatcaaattctaaaagtttttggatgtgcaggctttccttttcttagaccctataacacacataaatttgagttcaaaacttccaagtttgtttttcttggctacaacccttttcataaaggttatagatgtctacactcaactggtcgaatctatattgctagaagtatcaactttaatgagtctaaaattccatatttctccatgtttaccgtcgaatcacaagactccacttcatattcataaaaatcgtctagccccaacatttggtataccagttctgcctagtgattctcaaccaaatctacctatacagtttggttctctacccaatcaatcaaatgaaacagaactttagcaacatacctctcacagttctactccatcattttttatcatgataattctgctcccttatacaacattcaatctgttaattttgattttaattgagatatatgatgacaccactatacttgctatcaacattcctctctctccacctcagttacctcaaagatatcatatgcaaaccagatctaaatctggtatccataaatccaaaagtttatatgctaacaacctcttaataacagatttataagacgttttagaactgtcaaataggctcttagtttgcctcaatggagaaatgctatggatctgagaacacaactcttaaaaagaaaaagacatggatattggtaccttattcccctgacatgaatctcttaagcaataaatggatttttagaactaagtattacaaagatagaagtatagacaaattcaagtcaaggttagtacaagggcttttcaacaaactcctagaatagattttaaagacactttcagtccagttataaaagcatctacaataagaattattttttgtcttgttgtcactttttaatgggatattcagcatattgatgttaatgaggccttctgttaacgcagattttttttaaactaaataattagctttttttgtaataaataaactacataattaattgtattgtaattaataatatgaacaacaataaataacaagaaatatttacgtagtttttgaagttaaatcttcatagtccacgagtccattttattatgggtttatatgtttgaatacataatacaatgatgctgtttttcaagaataaataataacatttttatctatttctcccaagattggccatcccctattccctgggttctatccctatttatagatgcatagggtgacaattattcctttagtatctgattattcgtaattgctcatgaaacgtggacattctccacgtttcatatttgtgcacatgaaataattataaataaccgtctaaccgctctttgtctttatctatagacagttatgctgactgtgctcaattgttctcgccattttaatgagatcttttttaaagatcttcatagaaaaatgttaagtactaagttatgatgcatctcgtagccttccttaaccgttgagagaggtattagcgaggtggttacttcaacgcgttaagagcgaggtggttacttcaacgcgttaagagcaaggtgattacttcaacgccttaagagcgaggtgagtgaatgttgaagttgttttcatttcttgaacaaacgagtatgtggatcaatgagctacaaacacacactcccatgtatgtgaatcaatgagctgcaaacacatactcatgagtatgtggatcaatgagctacaaactcattatctactcgttccaaacaatttaattttataatctgtctatctcgagatggacctattcatctcgctggtctcatcagt

SEQ ID NO: 297557 - DNA, 5237 bp, Cannabis indica
acatttttatttttcaatagtttatgttcaagtagggccttatatttccagccattacagtttgaccttacattttaacaatttcattttcaagcagtacattcgagtactttgatcaccaagtttcatttcttccaccaaactaagttccccaaatcaaacttttcagtaattgtagacagtgatggggaatttccaacagttggttgccatacttccatgcatatgtattgcacaaagatatggtgttccttgaaagaaaccctgaacactaacatattttgaaacaaaacaacactactcgcattattgagaaaataatacccctgaacactaacacatgaaaataattgcaaaatagactaccacgttacatattgattacacctagttgtagaaactactctatgattgaccattaataatcatttatctatatgcacaaaccaaaactcaaaagaatccaccctaccatagtagctgcttccatggatttgttggatagattatatctagattccccttctgaataccttcctgcaagataaagaagatcacaaaactgagacgtcagcaacagactagttttccacatatctaatgattaaccaaacaatctaataaaagacctctaaaaatattcaaccgagcatctcctggacttgcatcaggcgagaagtacttcccagagagtatacccattgcaagtgggctgtaggccaataaggcaatcctgaaaacacacaacaaatgaacattagttatcactggacgaaatacctgaacggtacttcaacaaaaacgttgtacaatcaaattagaatgtggagctaagcatagaatagttaacacagttgaaagcattcatgttggaaataaagtcaagtttaacccaaatccgcacaggatatagaaacattcctcaaagttccattgattttctaatttatctagctcaagctattgattataattttatcccaaacatcagaactttttagatatccacatttcagaatctgactcgccttttgttgttgatatatatctatgtgtgtgtgtgtgtgtcagcaaaaagttccattggcacctctaccatgtaattacagaaataatatttctgcttctatcaaaattaagacctggaaaatgatataaaatcgtcaaatacctttcgtggtgacaacattcagcaagtccagaatcaaaagttcggcagagcaggctgtatgagttctatcacaaacaaaaaccactgcatcagcccaaaactaaagctactaagctgtagagtgagaaggaaaaaaccctcagagttctgaactagaatgcttaagaaaacctgtaaagatatgatttttggaaggcaaggatctctttgagctgcctgagcaaacttcataaccccatatggtgtttcattgctgagaccaacatatctgatctgcaaacataacattcttccttagttgaaattgacatgacctaaaatggtaaggcacaaaccataatatcaaatttacctttccctcaacaacggctctgccaagtgcaccgagttgttcttcaatactaatcgaacaaaactgacgggttgggtcatactcagtttctccaaacatgggaacataactagttaaaaaagaaacttaagtgttatccacggccaagaagcacaaatcaaaatgatctctttagtataaggcacaaagcttccatccctaattcaaataaaagggtgggcctacatacaaaccgatcaggccagtgaatctgataaagatcaatgtagtctgtccggagtcttaacaaactgcatccaaccaaataaataaaattcatcaaatgtccatatcttttctccaaaaaaagaaaaaaagaaagaaagaaggtaaagatcaaatgcccacgtgtgaacagaaggtttgtgcatgcttgatgggaactggtaataacaagaatagctcaattatttgaacaaaagttgtacatactacactaacaacttcacatttccatgatcgatatgagcttaaaccactataaaacaaccagagaatagaatagttcgcataatatgtatatgctagtacctgttgtcaatggcttcagtgatatttgtagcatccaagcacaacggtccacctcgaatccaagtcatctgccctgatggtccagcaacctacaattacatattctaggttatacaaaacaaacacactgcaaaagatttagaatctaagagctcccaaattctcaccgtcccaactcccaacggtttggagttgagtacagactgaaaaaatacgagtgacggaaagagcataccttagtggctaagaagattcgatcacgtgaaatcttcctatcccgaatccaacggccaagatactcttcgctccttccatgagttacggctcgctgaggaactgggtacctgaaatcatcgaaccccatataatacaaagatgaatgaatagtaagtaagatgtgaataaatacatttcggcagaatcgaagaagttaactccggcgttgaaagcttggtcgaggagacgaaaagagtcggataaagtgttctgctcgcccaaagtcatggttcctgaggagtgagttgaaggttttaacgcagctgatgaaatcatagcaataaataaaaaaaaaatgcagtggaagtgaaaagttgaattagaaattgatcgaaccaaagcagagccttgaaactgagaggttgggagctagattgaacagtggaaccgccattgtcctcaaaactaatccactactgagtttggcgggcaagctttggataataacagaaaaaatatgaatataagaaagtggagatgcagggtatcgaaccctgtacctctcgcatgcaaagcgagcgctctaccatttgagctacatccccaacatggcatttgtgactagaatattgtaattatatatttaaaacactttactcaaaaccaaaattttacaccttcttatctcagttgatctatttttaaaaacagtgtagacatggccttttaagtactaaagatacaaatttaaataatttattaaagactacttgaagatactacatgtactatggtctaaacgaccaagttttctctctatgatctagaggactcttgttgaatgattgggattgtggttatttgtgtactggctctcatggatactagggatgcagtaaacgatatagtaaatatgattaacaaattggtggtggagaatgaggaagattgggaagttgatgagggggaggctatgcagttcagtgaaaaaactttggtcggaagagtcatttcttggagatatattaatgtgaatttctttaaaatagtttttggacacacggggaagacgattttaggttggaaagtgaaaatattggaagttcaagatgatcatacatttgccaaaatctcttttgacaaccgtcaagataccaagtggtactcaatcatagggtgtaaggctgtgaagaatctagactcatgagaaggagattcgggctcagatcttggtgatactctactacagacaggatacaagggttagaaatctgagtggaaggagccattattattccgctgcacccactttaaggtttctgaaactttatatgtgtttatttatattgttttagaaatttatatttagtatgttaaataacatacatggtagtaaatctagatcctggtaaaacatattccaacaagatgtactgtcctttctcatgagaatttcttgagcatggaagcgggaagagtttgagttttttttggtcttatcgtgggatttatggtatatttgtaatagtgttgctcatgggggacatcaaccaccaattggaaaagttattgattagtgatatcgtttgttgacaggttatagaggtagccaaatcacaaccagataaggaaatgagcgggagcctactacttggaaaccaccggagactagcatattaaagttgaatgttgatgtcgaggttaaagtgggtataggaaaggctagtgtaagtatggtggtgcgtgaccataggggctaagtctagtatgcgaatttcttgggcatggtagcgggaagagtttgagatttttttgtggtcttatcgtgggatttatggtacattcgtaatagcattgctcatgggggacatcaacgaccagctggggaagttgttgattggtactgtcgtttcttgtcagattatagagttagccaaatcacggccaaagaagcgaatgttgaagctgacttggaaaccaccggaggctgacttattgaagctgaatgttgatgtcagtgttaaagcaggtaaaggagaggctagtgtaagtatggtggtgagtgaccacaggggccaagtccagtatgctgtcgcaacctttctagctagggaaatgacacaattgtaagtggaattacatattattgcagttgggattcaaactgaaatacaaagaaattgtcaatgtttttgggttgagactaattgtcttcaagctgtcaacttaatttagagagatggagggtgctaggatgttgaaggtttaatatgtcacattaagcacttgatgaagaatgaaagagttattcggggaattttatttatagaaaatctaatcaagttgctcatgtattagctaacgaaactttgcataacaaagttagtgccatgtagattgaggctaatcctctttgtacaaaccatgtgttacaaaataactcgccaaatccttcataatattttctaaattaatgaattcttattaaaaaaagtactaaagacacctactttgcgaaaaaaatattactaaagacacatgttaactatggtctgaaaaaataaaaaaaaaaactacatggaagaaaaacactggtgagtccatttttcttctatcttttaaaatatttaaatcaaaaatctgaaaccaaattttctttattaaactcacacttttcacttttatattacactacacatatctaatgaacatacttaaactaaacaaattatattctaataaaaaaattataattaaataaaattacactacaaattaaaacaacaaaaaaatagaaatataataacaataaacaacttttaataccataataaaattattttttaaataagtataatttttaaatgtatattataatttaaaataaaattattaattttacataaataaatttataaactactatat

SEQ ID NO: 297558 - DNA, 4045 bp, Cannabis indica
tataatcaaaccacaaaagaaagaaagaaaaaaaaagttgtcttttttgccacaacaaattatcatcatactcactcactcactcaccactctatctttctttctttctttctttgtttctctctatcaatggagaacaaccaaccagttcagctttttcttttgatgataatggtagttcttgtttcattttccatggctgaacaaggagttttttcagccaaaacagatgcagtagctcttatcaacttcaagaagatgattgagaatgacccagatggagttttgtcaggttggcaactgaataagaacacatgcaactggagaggtgttacatgttctttggggagagtaactgagcttgatcttagtgcaactcgtcttcaagggatcatatctatggaccctttggcttcactcaacatgttatctgttctaaatcttggttcaaattcatttagtataaatacagcttctctgcctcaacttccatatggtttgaaacagcttgacttgtctttaaacaaacttgtgggttcattcccagagaatctcttcttcaaatgtccaaatcttgttaatgtgaatcttgcttttacaaatttaactggttttttacctgagaatttcttgttgagtgctgataatcttcagtctcttgacctttcttataacaacataacagggtccatctctggtttgaaaatcatggccaattcttgtacttctttgttggttattaatttttcagggaacaaagtactaaagggatcccttccttcatcactttccaactgcacaaatctccaatctattgacttttcaatcaattctcttactggagaaatcccaaaagcttttggggagttaaagagcttacaaacattagatctctctgaaaaccaaatcactggttggatcccttctgaactaggaaacacctgtaattcacttcaggaacttaggctttcaaataacaatatttcaggccttattccttcatctttttcatcatgttcttctctccaagttcttgatatttcaaacaataacatatcaggtccacttcctgatactttgtttctgaatctaagctctttagagagcttgcttttgagtaacaacatcatctctggacagtttccttcttccatgtcttcttgtaagaacttaaaggtcatagatttaagctctaataagatatctggattcatcccaagagagttatgtcctggtgcagcatctcttgaggagctaagaatgcctgataatctctttgttggagaaattccaggggaactttcacaatgctctcagctgaagagaatagatgtgagtctgaactatctcaatggatcaattccagcagagttgggacaacttgagaatctagagaagttgatagcttggttcaatggattggagggaaaaatcccaccagaattggggaaatgcaagaatctaaaggatctcattctcaacaacaacaagctaactggtgaaattccacaggagctgtttcagtgcagtaatcttgaatggatatcactcacaagtaacaagcttagtggcgaaatccctcctcagtttgggcaattgacaaggctagctgttttgcagctggggaataacaccttgagtggtcaaataccaggagagctagccaattgcagcagtttggtttggttggacctcaacagcaacaggctcaccggtgagatcccaccccggcttggaaggcagcaaggcgcgaaagccttgtctggtatcctttctgggaacactttggtgtttgttcgaaatgtggggagctcttgtagaggagcaggaggtttgctagagtttgctggtataaggcctgataggctctatcaggtgcctacattgaagacttgtcaattcactagaatgtattctggagcagttctaagcatgtttacacagtatcagactctggaatatcttgatctttcttacaatcaacttcgtggtaagatacctgaagattttggtgacatgatagctttacaagttcttgaattggctcacaatcaattatctggtgagattcctttctcacttggaaagcttaagaacttgggtgtttttgatgcttcacataacagattgcaaggtcaaatcccagattcattctccaacctttcattcttagtggaaattgatctatcaagcaatgaattaactggtcaaattccaacaagaggtcagcttagcacactgccagcaagccagtatgccaacaacccgggactttgcggggttccattgcccgagtgcacaagcaatagccaaccaaccacaacagacccaagtgcagatatgggcagaggtgccagaaagtcctcagctgcttcttgggctaacagcattgtcctgggaattctcatttccattgcttccatttgcatactgattgtgtgggcgatcgcgatgagggcaaggcgaaaggaggcagaagaagtgaagatgcttagtagtttacaagcatgtcatgcagccactacatggaagattgagaaagaaaaagaacctctgagcattaatgttgctacttttcaaagacagctcaggaaactgaaattctcccaactcattgaggccaccaatggcttctcagctgaaagccttattggatgtggagggtttggagaagtgttcaaggcaacacttaaagatggttcaagtgttgctataaagaagcttatcagattgagctgccaaggtgaccgcgaattcatggccgagatggaaactttgggaaagataaaacacaaaaatcttgtacctttgctgggatactgcaaagttggtgaagagagactccttgtctatgaattcatggagtatggtagccttgacgaaatgctccacgggagaaccaagctcagggacaggaaaatgctaacatgggaagagaggaaaaaaaattgcaagaggtgcagccaagggactatgtttcctccaccacaattgcattcctcacattatccatagagacatgaagtcgagcaatgtactactagaccacgaaatggaagcaagagtgtctgattttggcatggctcggctcataagcgcgctagacacgcatctaagcgtaagcactttggctggtacacccggctatgttcctcctgagtactaccaaagcttcaggtgcacagccaaaggagatgtctactcctttggagtcattttactcgaaatccttacaggaaaacgtcctacagatacaaaagatttcggggacacaaacttggtaggatgggtgaaaatgaaagtaagagaaggtaaacaaatggaagtaatagactctgagttgctaatggtaacaaaaggaacagctgaagcagaagttgaagaagttaaagagatgataaggtaccttgaaataagtcttcaatgtgttgatgatttcccatcaaaaaggccaagcatgttgcaggttgtggctatgttgagagagttaatacctggttcaacaccaggaagcagcaacagtgcttgaattgacatacccttcagttaatttgtttgtaagaacataaaaaagttttctttttttaattaatataaaattataagaagttttgtttgtcagattttgaaagattttcatgtatgtattctctgcaaatattttgatgttcttggttattatatgtgtgagtgaccattatctaactaacatacaggatggcttgatttgcaaatgttggaagaaatttctattgtaaaacaccaagatatataatatgattaagtacagttttatgtaggtttaagaaactcagttagacattttatcgaacataggaagtgcttaccaattagtacgacattaaaaacatggtgttgcttatatgattaatcaatcttgtaattgtaggtaatctttccattaatctttctccattttggtatgatgtgattaaagattgcaacaaaagaattaatttctcccatgcattcctatttacaaactaataccataaaggtttcctcaatggttttatggctaata

SEQ ID NO: 297559 - DNA, 8987 bp, Cannabis indica
ctctactctctctctctctctctctctctctctctctctctctctctctctctctctctctctctctctcgcaaaaccaattctgtccaagcccattcctgttagattacaagaaaccccacataattattttcatcctaatatttatcacaacccaaaaccatcagatcgcctactttctgctgttgattcagaaatatcagtttcagttccatgactctttttcaactttgccacaagacccacatgtggcaagctcgtttctaggtaagcttcttctgcttcgattcctcaaccatttttttgaagctcagcctctctttgttccttctccacaaaagcagcttcgtatgaaagctctctttcacgacttatggccagttctctcttgaattcagcaacagacccaccttgatcattccgcttgttcatactctctcttcgcccattcttgaccatactgccacttttgcgctgagtgggggagttcttggatgcggctagatcagctgctagtctctcattatggttcatcagtttggcaacttcttcagataatgccttcagttcaacagcagcagctgaagctaaacctttggcatatgaactctcctctgccaatttctggtttcgaacttctagatgttcctttgccaatgttacttcagacaacttttgtttcatttcttcaatctcagcctcctggtttcgacaagtcaaaagcaacaatttattcactttgacaattgacagagccataactggatagtaattatacttcagaaactaattaatgatactgcattaaaaggaaaacaagactaataatagtccaagtcttggaattaatatttttattcaccgaaagaatagtcttaaattcaccaacaaggtttgcttcaattgctaatggtctaaacatataataatttcatatagcagtgtcatttgggaattttaatctgtttcaaagtagtaacccatttttgtgcctcatatttccaagagggaggaagagaagagagtgtgagaaaaggatttataatcatagttcatttgaatttcacatctactcaagcccaaaagggatggaggaaaaacctgggcttgtagaagtaacccatcaattttttcttttgatgtcgtgttcctgttgtctgtgctatgttctccattgctgctctttgtttcagttgctcgattttctagtgcctcagagagctgctggtttagagaagaaacctcttgttttagagaggctactgcttcgtgcaattcttcacattcagaaacctgaaaggaagagatatatcaaggatcaagactcaaaaaaaaactaaatgaatttaacaagaatttgagtgagtggttaccttttggttcagctgatcctgaattacgcgattatcagcagttttaacctgtaacaaggggataacaatgctagacttgtcaggaataactacattatcatatcaaaaacttcagaaatgaccaacaagaaatttatgacttctttagtcccattctgcagctaagaatcctgaaaattgtaaacttaagtggaaacggtgacaagaacagatgcatgattttataagttgcactacttatttaatacaccaattatcatccacaattgatgttctattaccagacttattctaaacaacaacaaaaagaaattattgtgcttcttcaagagataattaattttctcaaacgaaaaagagagagggagagagacagagagaatcaattaagcttggaggtgtggaataatcaacttatgatatacatatatctgcatgcatgcatgtctacgcagattaaagtgtgtacacataatcacctcgagttcaaaagatttctcattcaactgtgccttcagttctgcaataatagtagactgcaatatgaagaaacaaaaaaatagtcaattaaaacaaataatacttcatataaaactacactaccaacctattgggagaacaggtaaacttacagttgatacttcaaaacaatccattttattttgtggagaaaggatggaatccccaatttgcttttctagcaaagctatttgttcgtttttagccatcatttcatctttcagcttcctcatctcgtccttaataacagaaatagcataacagtgaagatctaagaaaaattaagagcatttgaatagagataagacaacaaatacatacattgatttgatccttctgtggacttctagcagcctcctcagacaaccgcttcaaagcactagagtgaagtgctagctctccagtcaagatcttttgctgctcccttagaagatctatctggtcaattgattttatgctggtctgggaaagaaaacaaaaaagagaggaaagagatctaaataaaggaaaatagaataaattgcaagtatcaaattaagccagcatagtagctggatattattttgacatcttcctgcttacaacaatgctggtaattttccaagcctacatattgtcaactactttagagatcaaaacgtgctcagataagtgtaagatttaatcaacatatggaattcatgtccaaaaagaagaaagaaaagccatgacaatacaagaacaatacaaaaaatatggatacgcagagtcaagacaagctaatcgcataccagaggtgtctcctggcccaacaaattatcctcatcttctctgtcatctcttgacacagataaaagatccccagacatagggctctccataggtatggaatgggagtttcttggttctgagtgaaagtttccgcttactgcttgaggtgttgagggcgtactgacagacttcactccactagatttatcactggtatttgtcaaagttcccacaccactatctcgtttctgataataaagtacaaagctttaaatttatgttaaatatcaccaaacagaaaatttagttgtttgtagtatatgcataaaacagattcaaaataaagcaaaaaaataatatgtaatgtaacataatgtttatataagggacacagttaaacaacaaaacaactgaattggttatagctaacaagcaaactaaaaaagaaccataaaatgaaacaacacatactcgtagctttaaccaatttaataatccatgcttccgagtctttttttcctttaaagtatcatcaagtgattcagcatttccctcaactggcacatacgagtcaatattttcatcatctaagatcaagtctcgtcttttgtgtggcaggtatgcaagctgtaaggtgtaagttaatagttacactgtactcatccaagtgaaatcccggtaaaataaaatataaacaaactttttgaataacataatcacacctcctcttcgccaaaggaatgtcttctcctaggaccaggtcggtgtgaaaatcttgatgattgggatgtttttgttgagaccaggatcaattttgtcaatcgttgaattctccctaataaagcagctttttggtcttcctcttgttccaatctagactgtagcttgacttgaccatcttctagctaaaacatcgcaccaaagaacggggttcaagccacatgacattgttaattagaagataatataacacactctagacataaacagacaacttcaacagtttctccatgaaggttattcttgaatgcaccttttgtttcaacaagatgaggtcctcttctccaatatctttcagatgaggaactgaaactatacctctctttaattgttccaattcttcttttaaacaacgtatctcattttgatacttcttgataagcgatttctcatcaataatctgcagacacagaagcttccaaaaatgacaaaagagaggaaaaaagtttgaaaaatacactcccaaggaagaaacaataaaacaaactttattttgtgctgcttgaatttcgatgtgtttagctcgatgtgcaaatttcaacgtattgtgagtctcttctgaattgcttgatgaaggagtaacagtacaaatgagctgtagattcgaccataaagatatataagaaaattatatattacatagagcactagaggtgacaataatcatcatcccctcacaatgcaagttgtaggcacgttgaatttgaactaatataaagaagaaatcttacagaaacacgcccatgaccacttaatgaagactggaggagtctggtcaatttagagtctctgtatggtacatgggtggcccttgcatctgttaactttgatataacctatgtcaacacaagtgatttcttttagaattctgtgtattaatattaaactttaactagaaacacagattattttcttttcaacaatttattagctatgttagtgcaagttcaaaaggacccctagaaacagaaaaagaaaattgttaaggctaagtttgttaggaagaggggaagtaagaaggatgagaagctaaggatggagcgagagtgagaaaaaaagcaagaaggatgacaatcccgccaattgtaaaacaaaaggtaaaactaaaataaataagcaaaagcaggtacacttttgtttatttttttaatttgtccctggcagttcaactagaagatctcccagtggccggaagattttttttgagcctataggggataaaaaccttgaaacaaatgcctaccagcactttccaaggctccaccttaccactacaccagcccttgggttaaaagggggtacattgagtttgttctacttaaccagattatcagaactgcatttcctaacattggtttctcctgctcgacctaggcataagactaatctgatgcaagcaataaccataatcagtcgttaaaatgacaagtgtggttatccaatccaggaaatatgggaggtggatcaaccatgacaagaagaatggacttctccatgttgtaatgttatgtaatagaagagttagagtccaatgcccctggggtttctccctcatattagatacaactaaagtacttgatttaagttgtttaggagggatggtttagtataaatcatcatataagtcgcatgaaaaatgatttattaatattcatttgaacatatgataaggtaataaagctaaactcagcaataaagtaaggaggatcccaaactcatgctttccaaagtatatagcataggcagcataatagctgcagttcagggcaatgtctcttccctcaccaaacaacattacatagagtattcaaccaatgatattatccacacattcccttattccattctctattattctaatttctaagatagcagtatgctttttctactgatttttaacaaaacctgtatggaagaatatcttagtataactgataaaagtatatgatatatacacctaactctggaattctttgtgttaagctaacgatatggaagatgagaaccagttgagatacaaactgaaaattgtgctttcttaaatgtatgccattgaccatatgaaaacttaaaatataaatattaacagtggtagcctcaccgtcccaagagttagtagactcttattgatgtaagatccttctttccgtctcataccagtagtttccgctttagagctctcagaacctgccagatcaatgaggttctgcaagcataagaaagatataaaaaagagttacggaagaatcgtggacatatactgtaaacagtattatgatcatcaacttcagtaaaatatgaatatgaaagaagcttagtagggtttatttcaagcctgttaggaatttaaagagatattgcaggcataaatggaagtgttgcatatttaccagttgtgacaaattcacagcttccccttcacaattttcaccgcagggactactctctattgtctgttacaaaaagagtgaaagagtcacatttagaggagggggcggaattggaccgataaacatgcatgcaaactaaaattcatgggaacagacggtaatagtcataagtataacaaattttaagaccaaagagagacgaggcaagggatacttcaaaatactggctaaggcattagatgggtacactacaaagaaaacagacgattaagcattggaaatccaatcatttaatgtgacattgtgtgtgtcaaaggaaaaatgatagaaaaattgataagcatttaatatgataaccatgaaacagaaagagattaaatatattaaaacaaatcaaaaagctgcctcgggattcaattaagattgaaagaagataccagtgtaaatattgtatggctcctgctactctgtaaattgaagtttgtagacccgacatgtcgatgctctgttgttcacaaattgaaatgtacaacaaagtcaaatgagtatccgaccttgaacaaaacaagtactaagcaagacattacaaatgatgtaggtgctctgccaagattgcatgttatctcagataatgaccaagtagctaataacagctaatcatgcattaatattttacatctactcctattagacatgtggcaacataatatccgtattttattttctactggccaaacatgtttaaaaatcttgtgatcgttgttccatcagttaaataactaactgtgaaaaaagttatttaagatacaaaatatacacatgatacaagcataaatacgtgtaataaaacacactatgacaatgaaacctaacgatcattaattgttgagttagtagtatagcatacgtgcataaaaattacacaaaaccagattaatcactgtgtaccttctccagctgctatcaatgaaagggcatgagctggggaaagtacaacttcttcctttatcccttcaacaaacgttccctacagcaaacaattgaacaattaaaaaaatatatatatatggaaaaaaggttaataaggaattggaaattgatactccccaaagtagtaaatatttcataataagagaaacggaaactttataatctttccttgctagaggaagacaggaaaccaaagagttgtctttatttataagaaagaacatccatcaggattcttcaaataatgtagcaattgaaaattttcgtaaatattttatcaatactgcatgatgtcatttcctgaagctaaagattacaaaattcaatctcattggaaatcattgataagtgtatcaactaagcatcaatatataatggatgagatgagataaagctagaagtgacatagacaaatctaactccaataatagtaacaaatcaacctaaaacatgaatcagaaggctttctaatgaatataggtacctgagcatcctctctaattcttaaattttgtcctgctggattcaacaaatcattaacaacctgaaatgaaaacaaaaaacaaaaaagtcttacaagatagtaaagcatctgaagtgcaagaaatagaataaccaattttgtttagaacagtgaattcagttagatatgtatgccttggtccctgtacacgtgcccctagtctttaagtcaatatattagttagtttagttagtagtcaactaactatcagtagttagttaagtctgtcatcttaacggacgtatcttgatgtctaagtccattgtcaactgaggcatttacttataaatacctctgtttctatccattgtaatacaatagacatttttcagatcaataaagctaaataactttcagattaatttgccttgtgcattagtgcttttgttttgtgagttatgagtgttctcggattgttcttggagccattcctggcatctgggattgagttcgagattcaacaggtggtatcagagcttggagatcgaagaagaatcttgtttggctcgaaggttcaagattttggtgatcgagcaagaaaatggaaaatgctaaattcgatcttgaaaagtttacagggaagaacaattttggtttgtggcgtgtgaaaatgagagccttgctagttcaacagggtttgcaatcagctttgtagggagagaagggtatgcctgaaggtctcaccgagaaagaaaagacagaaattctcgagaaggcacatagtgccataattccgagtcttggtgacaaagtcttaagggaagtgtcgaaggaagactcaaaatgcagggatatggttgaaactggaaagtctttatatgacaaaatcattggcaaacaaattgtttcttaagcaaaaactgtattcttttaagatgatgccaggaaaggaaattgaagatcaccttaatgatttcaataaggtgatcctcgacttagaaaacattggaattagagtgggggatgaggatcaggccatcattgtgctaaattttcttcccacagagagttatgaacaccatgatgtatggtaaggattcattgacattagaggaagtccaaaatgcattaatgtcaaaggaattgaagagaaaaacatagaagcaagatgaaggtgctggagatgggttactaaatcaaggaaaagggtccaagaaggagaacaagggtcagaacaacactgggaaagacaaatccaaattcaagttttagagaaggtttttcatctacaacaaaccatcacacctgaaaaatgactgtccaatcttgaaagattacaaattcaagaaagatggaaatgttgacattgtcttagatgcagaagacaatgatggctatgatagtgccagtgtgttagccatctcagagaccaagatagaagtagattggatcattgattccggatgttctttccacatctgacctgttaaagaacattttattaaagggtaatttgcggcaaaacctcctaaagtggacaggtttttgcaactaaccccctaatctaaaattttggtggtaaaactacctaaaccactagtccgttagcagttagccctttccatccatttttgactgttaagtgccagattggaatgtccacgtgtacatagtgtacacgtggcgcaattttattagtccacataaataaatatttaaaaa

SEQ ID NO: 297560 - DNA, 1015 bp, Cannabis indica
caaatattaaatgttatgtgtgttttaaaaaaaaaatattaagtataggtaagtatagaaaatcaaatttccctattaataaaacatataaagtaaatagagcaatgttataccttgtatcatctaccacatttgtctccctgctccatactttctcaatccaaacatctgaaatcagaactcatactactacaacagtgaaaaacaaaagtggcaggacattagaaagaaagaatgaaaggaataattaaaatagtaagttcccttgatcattaagtagcacaagtgtgtacttagttgatttttcttgctataaacttgtacatatactactcattcaataaaacaaaattcttcaatgtttatttctaatatgaacaaaataatacaaagacaaaccttcattttgcaaacctgaaaacataatgaaagtagacatgatagaaaatagattagaggaatgcaaaataattacattcttgcatcttataattgacttgaagcatagatgtgccaatctaaatgtacttatcatagcattgagccttagaagttctctggcagtagaacctggtcgtcagcccttctcatgataaaggccatctttggaccataaatatcatcatacaaagatgtttagaagcaactaatcactgtaatttttcacatccaattaaaagaaaaaattagaatccatcttatagtactgcttaagcctcaaggatactacaacatcaaacaatatgaattatcaccattcaacacaaaaaggaaggaaagagttttattataatgcatatggcatactataataaaattgaatagatggtgtacagagtagatgtctatggatcatctcatacagaattaagatgaaattaatctcttaccgtatctaattaagttttgtataagacctccatggagatgcttgggtgacatctcagccagggacggatctagtagtgttgatatgggggctatagcccccactaacaaaaatattgccttttaa

SEQ ID NO: 297561 - DNA, 3771 bp, Cannabis indica
tttaatattattattatttttatattaatagtacttaaatttaatattaattaaaacgtttatttttaaattaaaaatacgtttttaataatactaaaataaaaaactaattacacaattattattatacataactgaataaaattttaaaaaaaaataattaacaataggtgttatacgtgcgttgtgcgttggggtaatatattaagccagtatatattttacaaaatagaaagcaccatccaaaattaaacaaaagcaacttcatagatttaacctttatttatattacatatattatgataagataaactaactattcttattcattaaaagaaaacgactaaagaaaaccatattatattagagataaaatctctaatatttaaaagtattaatatattcttactacaaaccatattgctaattatatgcttaacttattctgattatttagaaagcagtagtacttctaacatatatatttaattaactaaagggaaaaaaagttaaagaaagggttatcacgatctgatgagcaaccaggttgatcaatttcagatgaacaaagacgcatgttttcttctttttcttgtagaaggcctgttgggctgactggaaagagtgaaagtgtctctttgttacattgattataatcataagtcggcacctctatcaatgaggtaattggagtgccccaagttccagcatagtagcgactagcaccgcaaccgatataagaagagttctttccaccattatgaagaatagacaccgctttatattctatagcagcagcaccaaaagggacagccctagcatttttatccatttcttctagactcggtatgctcgtgctgctacttgatggaacattactggaattgtggggttggtggataattcctgtatgttgctcatgatgcctctgcggaactactggtatgtaatatggaccgcaaaccactgaatcaaaacaacaatggaaatatatatattaataaacataagatactaaaagcgtaaagcatatacatgttttaactattattacatcacactgcataagctttgactactttcgaaagaaagtcaaagaatatgattggctataaaatatgtaaagatgatgggatgagtcaaaggaagaagagaaaactactatttctcgtcaactcatatcaaaaacctacagctagagtttacaacaaacattcgaataagtacgctataacacgtatatcgagtccatctgcatgaagagacagcgtggatgtcccagtctaagatcttactctcacacatatatgattatgtatccacatatatatatatatttatatttatatatatataccaacaaagtagtactcaaataaaacaacaaaacagaaatgatctgcagtaatcattttttcttttctttttactaatttatagaaaatacatataattaaacagttcagtaacaaagatatttaatcttgaaaaaagctttctattatctttatatatggttatgtatacacatatactagcatatgtttgtatacatatataccaactcagtcaaaataaaaagcaagaaaatagaaacgatcagtaatcatttttttatttcgttttacttttcttttttcttatatatagaaaatatataaacaattcaataacaaagaaatatttgatctcgaaaaagctttatattatctttatatatatggttacacatatactagcatatatttatatacatacatacaccaactcagtcaaataaaaagcaacaaaatagaaacgattagtaatcattttttttcgttttacttttgttttttcttatatatagaaaatatataaacaattcaataacaaagaaatatttgatattgaaaaggctttatattatctttatatatatggttatatatacacatatactattactatagcatatattatctacatatataccgactcagtcaaatgaaaaacaacgaaatagaaacgatcagtaatcatttttatttcgttttacttttttctttcttatgtatataaaatatagaaaaaattcaataaaagaaacatttgatcttgaaatagctttatattatctttattttttccatgataaatagtaataattccatagaaaagagtagtctaactgtgaagaaaattgcacagtatgggctcggttgtgatcccatgtactgaagaagcggataacacatacgtgaatataatcttttaaacagcagagatatataaagatatatagtaataataataataataagatcactacatatatgtactgagatagttgtatatatatattataccatttggggaattatttgtagggaaaattgggcgagggctcctatggatatatcggttaatataggccatggtctcttgcttcttcttctgtctttgcctggctttgtgattttgaaaccagtaaaagacattcttaccctcaatgtgaccaaaagctcttaaccttgcggttatctgctgtatttggtcagcagtgggagttcttattccttgcttatacaaactctcaagtaaattaatctgctccttcgtagggttccatcgagatgtgttgacctgaggcccactactactcccagtaccagattcgttaccatcacaaacagtaccgtcgttcagttccggtacataatcatgatcatcttccatatttgatattattgctagccaaggtttagtggtgtatacttaagagaaagactataagtactatatatataaaatgagaaaaagagaagaggagagaaggaaggatacaaacaaacaaataacaaatggggctaactcgtttgcatggcttttgcaccgttttatagagaaaagacagagagtcaaacaaatgagggagagcagagataagagtaagagttaaagagttaaagagttaaagagtaaaagggagatggacatgcgtattgttattggtgctacaaatctctgaaaacatggagggtagcggctaataaagattaaccgaagaggtggagttttaattattttttgccgtttggagtaaaacagtggaagtaaaatagagagaaggaaatgacaatggtaccctctggcaattatttatagaaatggagagagtagaaataaggcaagttgtagaaataatgttgagagtgaaaagggtattacgtacgtaagattcttgggaatgacatgttgatcagtgaggagagaattgggaaagggaaaacgacagccggttgggttataaggtgtaggtaataggtaggctttgggaattgaagttggaacagagagagagagagagaggagcacaggacaagaactgcgcaggtgatgaagatgaagaagctagtgtgaaggtgttgccgtgttgatacttggtaggggcttgggtggtgaacctcatggcccgcgcatggccttaacttgacttggcaccgaatatacaaagagatctaattacacccactctctcaaatcaatgaaaacctcatatattttactaatgatttgtaatgtataacaacagtataataatatccactttcagctgtttcatcaaaaaaaagtaaaagataatatccacttgtcatatatttaagaataagggtgtcaatgaagatgctgttagagattttataacaatggaagaaaatcaagatttattacaactctattgtaaaataatacaaggactaaaatcagagattgattaaatatatgtta

SEQ ID NO: 297562 - DNA, 2940 bp, Cannabis indica
aagttatttttcctctaacatgctttgacataatggtttacctagtgatgcatttgcctaaaatcgatacttgggggactagctcagtacaagtggatgtatccaattaaacgagaaatgtccgtgtacaaaaaatatgtcaaaaattattctcgagcggaaggatctatttgtgaggcttatgtggttaatgaggcgttaagcttttttttctatgtatttttcaaaagtttaaacttgactcaatggatcggacttaaatagtgatttcttcctaaataagcctgaaagagaattctctatattcaagcatgttaggaaacatattggtaagaggaccattgagtctctgccaatccaagaaaagataaaggctgagtgggacatatttgacaattttactgaaggggagaagtatatcatgtaagatatttttagttgactttatttaattgctctttattcacttcttcattcacaaccttgtcttacaaaaatatacttatgtgtagtgagtatatgaactagctactatttaggggtgatcaaaatcttcacacagttcaagagaatgagtttcccgattagttcaagtcttgagtaagtactactttgtactgattttgtcattaaatatgatctatgtttatattgattatatttttaattcaatgatagatcaatcaactctcaccagacaaccttagggaagtatcagatgaaatgtgtgccatcataaattcatctaatctcgctatctattgttatttgggatgtattgttaatagtgttaaattcctaattgaggaaagggatgacaatcacaaaacctaaaatagtagtattttggtgtcgggttaaggtggttagaatttttatggtattctccaacaaatctattaattgacttacttgaaggattataatgttataattttaagtgtaagtggtggacacaaatggtaacaagatagaaagtgatgctttttctactagcgtctgtgtcgcccatgaatggtgtcaaaataaattatttatacttgcatcctaactaaatttgatatgttatattctcaacctaaataatttagatgattggaagcttgtcgatgcttacaccccacgtaatgtgttagatttcccaaatgaggatgatgaagacacctcaaatgtataagaaaaaaattccttggaaatccaattagctgtataagtttcacaagtagatgatgtcaaatatgtctataatgatgttgaccaacatgaactttgtgcatcctgacaatcgagatttagatgattttattttcattcatattgatgattaaggaactagtgataatgatgataaaattaatgtaacctttaaagatgatgatgatgatgacgacgacttgtagactttaaaatattgtaatatcttaacccaccattaattatatcaaatacatattttttgttagttaattgattataattgtaattacttattttattattaaatatatgtttcttctatgtgtagaatgtatggcgcgtatgcaagaagcaataagaaaaaaggagtttgagtagcgcataaggggaaaaatattgaagatgcacttgcccagatgcatgtgcggtagaaattaaaatttcgatggcttatggagaatggggtccaaatagatgactatggaaataagtttaaaaatatggtcaaactctttgttcacaacaccattcccatgaataagttaacttggaagatcgttgatatagaagacattcaaactatcttggacagactagcaataacatttaatttttattgtaatacttcaaacaaaattattgtacaaataaaaatactagcactttaatatttatctttctgtagtataaatttgaatccccactttacaatcctaaattcgtggactacactttgttagcaatgtctaaagggctacgcgactggtgatcggacgcaaaaatgcgtggaaggataatattgccaaactgggagagatagaggcgaataggagacctccaaagggggtgacataggaggtgtgagcagagccaagaaaaatgcaaaaaaaattgaaataatatgaagattccaggtggatagggctccaaggtcattgttgggcacattgtcaacaaggtatattattataaatattattttctccaaattgatataagttctaaataatatattactaatttaagttttttaaacaaaaaaaataggttgatcctatgacaggagaactttccactgtcgtggataattttgagaagttccaccataagaacaatatttggcacaatgaatacacgcaaaaatcgcatgtaagttattttatatctttaattgtatcgttctatatttaatttctattcaattttaacagtttattaatattttttgtaggcccgaatggttgagagatgcaaaatgaaacctctgtcgagtaatttttgttgtcaatacgacatagatctcacttagtttcctgcaaatctgtctattacgacataggtgttagtgagcagtcacgccacttaagaggcattggccctttgcctagacttagggcaagggccaaaaaagtaattcccagggcaggtcgctccggaaaggttacagtcagatcccaagaagagtaggaagaacataataattatcaacaataaatgatgcagactcagaatcagtatttaaatacattgttggattgtgtgttaccaggatctagatttactaccatgtatgttatttaacatcctaaatatgaatttttaaaaaaatgtaatttaaacacatataaagtttgagaaaccttacattgggtgcagcggaattaattgacttcttccgttcaaatctctaacccttgtatcctttttgtagcagagtatcaccaagatctgagcccgattctc

SEQ ID NO: 297563 - DNA, 5235 bp, Cannabis indica
tatatatatatattttttttcatgttagtggttatttaactaatttgaacgtaagtgacttatttatttgccaaaattgtatgaaaaaattattgacgcagttttttatcaactgatctaagaagatactaaaagtaagataattatgttgattcaaactaggcaatggtcaggtggattgcgactattggcctggtcttctacaacacctccattgttgtcattattgccattattagccataaccacttcttgttcaaccctttcagtagctctttctagtctcttgtttcttctgtttcttctgcaggtcttttcaatctcaggatcaacagtcactcttgctcttggtccttgacgtcgcataaattataagtacctaaaataagatgagaaaaatttaagaaaaaaagttggtaagaagtagaaagataaaccaaagtagaatttaatttaattattgtaatatcaattttaacaaatccctcgacaacgacgctaaaaatttgttaatcaaaatcgtaaactacacaagtgtacgtatcaagtattactcacacaggtgaggtcgaaccacaaagaattaaaattaaatttcaccaaactagatttatatttctatttggttaatcaaaataattgtaacacggaaaataattaaacttgacaaaaaatttggaaacaatttttaatgttttcaaatacggatgagagattaggaatatgaatcatgttctttcaattacctaattgttaatgcaatttatttattttctttgtttaagtgatgatagaatatgaaataacactaactcttctcagatcattaaggtcctaaaccacatattacctattgcatctcttaaataaattaatatatgattttcattaagtaatcatctcaatgttatacaggttatgtaaatactctcgttttacatcaaaacttatatttgttctattagagcattcctaatatcacttctcagattttatattaggatcatgaatcatatttaagatggccaatctaaaatatgtattaaaataaataagaacaaatcacaattatctagagaagaaaactaacaaatcacattatctaaattgtgataacatcaatcaacatttatcatattcctaaattgagaaattagttcataatctctaaattcaaattcataatcaaactagaaataaaaataaccataaaaaaattgaaaagggaaaagaaagaactagatggtgaactttatctgggtcgccacactcacttccttagtctcctcctttatttttaaggttctatttctgaataatgtgcttgaaaattcgaaacccttttatagaaatcaaattttacaactcataatggtcaaattacgagactgtccaaaaatcaagttcgtggcctatggttgcgaccacaaaatgcctactcggaccataatgtaaagttgaatttcactgtctttgccagttggttagtcgtgattatgtaaggcttattcgcgaccaattaattctccgcgactatggttcttgttggtcgcgactagctaagaaaattaggcttgaattttttttcactttcagttcgtcccgtcctttcgtcacttgacagaatttgtactttaacacctcgagaacctaaaatcaaagaaatcaagcttaaaaccattccaaaagtattatcaaagaagaaaagctattctaaaattgacccaaaacttaaggtaaaaataatctaacatgtacccatcaagatcataggcacgagtggcggcaagcacaagtgatctctagactatgtaattgtttcgatctaatcagagattcagagggggaaggttgttgtttgggaagggaattttagcttctggttcttggtttgcagctctagcttgttgttgattgactctttcaccaacaggtggatcaattcggactccaatattactccattgtcactactgatcgacatgactctgataccatgtaagaactttgaatatcagagctctgtttgaacacagaaagggagatttaagcagatagagaagtaaaatgagggagaaagtgaattgttgaaatgaatgctcgacggctggcttctacagtatatttataagcatttttttttttttggaaaaatgcgtagatatattaaacaccaaataatttagacctcgcgatcattaaaaattaagttacttggaatggtggacggatccaccataccagtcacattacagttaaatgcccatttagccacattatgggcagcatagttataacttctagaaatatacgagaaattactttcagtcaaaagattcgagagctttttacaatgaggtgcataattagtaataccctaattggagggcatccccttcagagtattgatcaccgtctcagagtcgctcttaacgatcacaaatgaaagcttccctctaactactgattctagggccaataggcaatccgcttctccaataagcagatcagaaaaactgaggatattgcttgctacccataaaattgactccttatgatccctagccaaagccaccacacacattgagtcactaccaaccttaacgtcacaattgattttgacccaatcgtccagcgagggagaccatatcgacatcgtacaaattaccgacgtgggaaataaacaaaagttataatctacgtaataagtagaaatatagttaatacagtgattaatgttacaaatgtaattagtggtatgaatcttgtcatttcgtgttcgccagatcgtatccactataattgacgcatacaggaagacctcattgacatctactcttttgtcctctaggccccataggaacttgacccaattccacatccatccccttgactcgggcacaggcatcatgccccaaggggatgacctctataggtgggaggcaaagtaacaatatagaaaaagatgctccatagtttcctcctcctcatcacatagggggcaagaaacctcatcaatgtgcattcttctaactagagttgacttgatcggtatggcacttgataggatactccaccacaaaatcttatggctctccaatatcttagaattccaaagtttgttccaaagagtgggcgccattataataggaggggctcttgctaatgcttgagcaagacaggtagattacgtagaaaactgaacagttgaatcaatagaccaaatccatttttcactaccttgtcccctcggcctacctcctttaaggatattattggtggttacttagtcacagggagttgagtttggaaacatcccaattcccatcacccgtaagtaaatttgccactttattccaaccctcaatacaaccattctttggattgggatagaaattctacccatgaattacccacggatcctcccagatattagtatctttcccatccacaatgagcttgcatgctcctttcttaattaagtccttggatttaacaacattcttccaaaaccaagagtcagagctcttataagagcaatttaaaaagggtttacccttaaggtacttcccatttagcactctgtagcacaacgaatcaacttcggtaaggagagctcaccccatttagccagaaaagcatgatttatttcagaggtctttcggaagccgagaccacctctggatttttggaggcaaagtttatcccaagtcttgagatacaggccaccattgcctttctcataaccccaccaaaaatttctaaccatgccatctatcttatacgcaagctttttggacaacttcgtcgtttgcatagtatacccaggaagcgaaagacccacatattttatcaaagtagtgcgactcgctttcgatagcgactttaacttccacccatgaaacttcgagactaagttgtccatgataaaattgaagtcagcatctttcttccgacaacagaatagcgggagacccaggtagctaatgtttcccatagattgagccccaaggtctgaatgatatcatgcttcatctcatcactggtgttcttgctgaagaagatggatgttttcaccttattaatgcgctgtcctgaccagtcacagaatttttccgagcacttccaaaatcccgtggcttcctctacggtggctctacccactaagataaggtcatcgacaaagaacagatgagataacctggggccataccggctcaacttgatccctttaattcttccactgtcaagggccttctccaagagccgagagaggatttcagcaacccaaataaaaaggtatggagagaggggatctccttgtctgataccgcactttgggataagtctacccacctttccaccattaaggcaaatattgaatgtagtcgttgaaatgcactgacagacgaacccacagaacttatcaagagccttgaagcttgatagcacgtgatctataaattgccagctcaatttatcataggccttaaccaggtcgatttttataacaaagaagccctctttccctttcttgtacttgaaagagtgaacgatttcttgaaccagcacattgttatcctgaatgttcctacccaggacaaaggctacctgggttggacaaataagtcttgggaggacctgtctaatcttatttgcaattatcttagaaatgaccttgtacaccacgttgcaaagcgagataggtctaaactgcgacacttttttcgagtttaacaccttgggaattaggactatattagcttcattgaaccccttatgcataaccccagttgtgaagaagtcgacaactgcctcacagaagtccattcccaccgaaccccaatagtgtttgtaaaacaatgatgacattaactaacagatgtacaaagctctaaaagaatgaaaaacagaccttaactaacttctaagttccaactattgtttaacaaattttaactaactctcaaagtcagtaagtttaatagccactttaaatttgctaacaattcagaaatttagaaaattttatcactaaaattttaatttataaaattaagtgtaagtcactacaaaaaatattacttttagtcacaacaaaatttgtgactaaaaagaaaaagttatgactaattataacttatcattcctatgttgtgactaaaaaagtctgtggttaaaggtattagtcacaaaattacaatttattgtgactaaatgtatttttagtcacaa

SEQ ID NO: 297564 - DNA, 6797 bp, Cannabis indica
tatatttatatatatatgttgaactttctgcctccctcactaaaattgccttcaaaatgggatactaaatcaaagggaccaaggcatatatatagccttcaagaggacaacttgctccaagttgtgcttagttgtacaagatagctttcttaagctataagtctttatttatcactttgaattttagtcaaagacataattaagaagtttgaagcttctaaaccacaaaagtggttttacttcaccgccacaaaacttctactaaaagttacttttgtagtcgtcacttttatgctgtttacgtttatgctaggtcaataaaagattgacatcaaataaattttttattgttaaccggctttggtaacatatctgttaggttgtctctagtatggattttctacatatccacacacccttcctccaccttctcgagaacaaaatgatatttgacgcgaatgctttgtcttcgaatgaaatgccaaattctttactaaatgcaaagcgctctgactgtcacagaagagaaaattttctcttgtttgtgctcgagctcctccaataacatttgcaactagattgcctcctttctagcttctgtagttgcccgtattttgtctcccgattgacatagtcacgatagactacagtttcaaaacccagcttatagctccttcaacaagagtaaacacatatcccaaggtggacttaagtcaggatcacctaaataattcgaataaacatagcctctgacagtaaagtctgaccctcccaataacataatgcaacatttgagaacctttgatgtatctcaagatcctcttcatagtattccaatgctctctactaggattcgtcatgtattgactgaccgctcccactgcttgtgcaatttctagtcatgtacatacactttatactaccccactgctgatgcataactcgagaaatttccatcctccttgcttcactgctaaggctcatctttgaggttaacttgcaattaataaggagtggggtagatattggcttacaatcttgcatgttgaagcactgcaagattttcttaatgcaattcttttgggaaagacaaatatttttattatttttgtcttgacgaatttgtttccctaaaatcttgtttgctggtcccaagtccttcatttcaaacccctagtcaactgagcattcaactttataatacgatcattgttgggcctactaccaacatgtcatcaacatataaaaacaaaatgatgaaatcaccattactaaatctcttgtggaatgcacaaggatctaaaccaaggttgttgtatcccatgctaactatgaaaggatcaaatctcttataccagcatcttggtgcttgtttaagaccatatagagatttgttcaacttgtaaaacaagtcctcttttcctttttttttcaaatcctcctagttggagcacataaatctcttcttcaaattcaccatgaagaaatacagttttcaaatctaactactctaagtacaagtcaaatatagcacaaatcgccaggaccactcacactgttgtaaataagcagtaggagaaaatatcttattttagtcaataccttctttccgagcaaatcttttcaccaccaatctagcatgatacaactctacttggtcattgccatctcgcatgatcttatggacctatttgttgtcaatagccttttatccttgtggtaagggaacaagatcccaagttctattcttatggagagcttcaatttcttctttcattgccgccaactatagagacacatcttggctttttgtagcttcatggaaagtttattactctccatccttcgttagtaggtagtatgcaacatttctctccataatatagttttagtgccaagctggttattttctctcctgagttgacctcgaaacttttggagtttcaaactcagcttgctcttgttcttcatgctccagagctgctttagaagaatttggatcttcttgttcttcaacttgtattgtggtagtctctactttatttctatagtgctatcatcttctattgcttgtactttattttctaagtgagatcccataggcggttccccttcactccatcaacataccctaagaacacaaaatttatggatttcaaatccattttagatgtttcttgggtgttgtacatgacgtacacatgacttccaaatgtatgcaagagagaataattagctagttctcccgtccaaatctccattagcatctttagatcaattgtaattgatggtgaccaattgatcacataagacagtcttgactgcttcaacccaaaatgatttggccatctttaaagttctcaacatcgctcttgtcctttctaacaaggttctgttcatccaccctgctacagtgtaactccattctgttgtgaagtgtatgccatcgtgaactgtcttttgatgccttcctattggtaaaagctatcaaattcatcactggtatgttctccttcattatcaggtcccaagcacttgatcttcttttctgattcaaactcaatttttacttaaaggttttgaaaacttgtaaaacaataaatttctcttgattgatacacccaacatctcctagagtaatcatcaataaaagatacaaagtatattgcacctcctaaggacaaaattggtgctttccaaacatcaaagtggataagttctaggatagatttacttctagcagttgatcttttgaacttcaatctgtgttgcttactaataacacaatgcttacaaaatgatagtgacacctttctaagcactagaagtaccttctgttcagcgagaatcttcaaacaacgttatgacatgtggctaagtttacggtgccatatcataattgattcttatattgggcttgctaaagtggtggtcgcttctcctttttgatgtgtttctactttaagcatgtacaaatttgccgctaccttttctgatttcatcacaacaagcacgcctttaacgactttcatgatcccattttgtactttggtctaacacttaattgtatctaattgtcccaaagacaataacttttcttcaggtccttcacataccgcatctcttggatggtgcaaactgtaccatcatacatttttagtttgataataccaatgccagcaatctccaaggcatggtcgtttctcatgaacacatatccccttgagataggtttatattgataaaatcattctctccttgaggtcatattccatgtagctcttaagtccacaagccatacatcacttttactgccttcaacaaccattattgcctcgctataaaaatatcaccatcatctgaggcccttgctacacaaccctaagccttttatgacttaatgactttccctttggcttctttattcttgagaaaccaacaatccttcttgtagtgccctttcctaccatagttttgacacttaaaattcttcttacttctagatcttgatctactcctagtttgactcccattagagccatgttccgttgatctatcccttgtcatcaataaagcttcaagttcatgcgaccttcccagtctgtcctccttggtcttgcaccgacattcttcttcaagaattgtaggtgcaacatcatcaaagactagaacttatatgttattagttaagttgatgatgagttgatcatacgaatcaggtagactttgaagtaaaattttggtacgttcactcgcctctatagtatgcctcatagttgtgagctgtgaaaacatagtgttaagggtgttgaacttgattccatcatccaaagggtgtaaagtttccacttcaagaagattttgttgtgtagtgatttttcctcttacaattttgtgagagtgtcccaaattcttttgctattcttttctctgctacgcttgacaaaactctgtcaacaagtgctaagtgcagattgacaatagcattgccatccatctcgttccacttatagtcgtcagcgatctccgtaggtctttctccaatttccaccaagtagttgtcttttctcaacactactttaattctcattttccacaatgagaaattattcttgttgagcttttctaccttgtactttgtctccattattgctattgcttcttttccactaactgaatcttactacagcacgaaaaatcggctgtaatatcccagaaaagttaatcatgattatttgagcatattttatgagatatgaaatataatatgtattaaaatgattaacgagtaagattataatcttactaaaattagtaagagaattaagcctatttagaaaatgagtaaactaaacgtaatttattaattacgaagatttattagattacatgggtaatatatatgctatatgtgaaataaattattttgtgtccaaatctagtgcataatcaaaatataaggctatggcaatatttgtgtgtaagataatgtggatgtataggcttttgactgaagtaggatttaagacttcagtacaagtaaaattatcgtgcaataatcaagctgctctttatattgcctcaaaccccgtgttccatgagcaaactaagcgcatttagattgattgttattttatttgtgagaagattcaacaaagcttgatctctatgtgaaaactggagaacaaataggaggcatttttacaaaggctttgaatagggtgcgagttgattacctttgtaacaacttgggcatgattagcatttatggtctaactttagggggagtgttaaaatattagctataaattagctaaaaaataaggtcaattgtaattatttcttttcttattttctctactttcctattttagtttctccttggttgtataaatatatgccatttacatgaataatgcatacaattaatttaccattttctataattatttagctaggtataaataatatttcttgttattgttataactaaccctatcgagagcatattaaatcttacatcgaatatttttttcttcttctttgtttgttctttgtatctggattttcttgcaggaactccattagatatgacttttggttctatacaagattgaagctaagatgaaattactaaagagagttgtcttaattgctcatatttgaaaggagttcagattaagagattgttgaaaggatttcaacaataacacaaatggatcttgtgtttaataaagggatttaggtttagggtaatttttcactgcttttctataaaggaatgtgattttgcaatttgtaatatagattagtgattgtaaaataaattttttgatttagtatagttattatcttagttttgggaaacttaaggagtagatggttggaatgtgttttcagttgcagtaaaccttttaaatttttgtgttatgtttgttttatttgatattaatttgtgttctacaaattaaaaatagtgtgataatctcaaatctgtaggattacgaacttttatatttatacatctacatttatattaattaaatatatttacatatcttattaatatagatttctacaattgtaataacttgaattattttttataattttaataatgtacttaccctttccatatatttttcatttcttcacatattttcttttgtttcaattttagatttcttgctttttcttcaagaatcaagtttttctacactattgaagatgtgaaaaatatatagaatttataattatattataaaagtttgggtactaacatatatttaatgctattatctattgcttttgttgtacttttaaaagatttatgcctaaatcaaatcttttatgattttattgacataaaaattatatattatatttataatattatgtcgaagatataaagattataaaagactcaagaagtacatataatttcaaatctaattattctaaaaatgttttagttattcaaaatcctaaatgctattttaatagaacattttatttcaaagaagaataccaaactgaagtcattgttgaagaattcatagaatgtttgattttccaaaaatatactactcttttatgtatttctttttgatagggaaggagaaaatacaaaaatcctagtatttttttgagaaccattactattttgggtatttaaaatccttatggtatatatctacacattattttcacgagaatttaattccccttgactgttataacataaatgattacttttttttttattgaagtgtttatatattacaatgtataaccttaaactcgaactcaggaccttcaatacaaacgcaccctcctatgaccacttgagctagcctcaagtggttaacataagtggttacttaattttgtattatattttatcatattatatatgtatacaatgtacacacaaagaaaatgtttctctaaatgaggatggtcaaccatggataaaaatagagatatttacaccacatactaacttttctctaaaatttacatttatactttaacaagacaatttttttaagaaagcttatttttttccttccttatatctttatttattatttttttatatcttcctcttatatatttttgtatttttttttcattgaccttttttttttttcttaactggcctcactcttctttttattttctttctttttcttatgtcaccttggctgtaggggtaagcaacggtcggtttggtcggttttttacacaaaaaaatccaaaattcgattttctgttttcatgattataatctgaaa

SEQ ID NO: 297565 - DNA, 4499 bp, Cannabis indica
aaaaaaaaaaaactcaaattttgtgtttagtgtagaaaaatttaacatgcaagggaggaataaagtaccccacaagtatcagccccactgaatttcattctctttggcttcttatttttggacaaagcctgaaactgcctcttgttactgggaacatttggtggttcttcaacgttgtcaaacctatacaacaatgcaaagattaattccaaaacaaactaaataactcagggagcattcaggtttagagcctcaccttattctcattagaggagaagcttgccttaacaggtaagtggtatcaagataatcttcttcccccgacttgacagttaaaatctacaataaagccaagaataagatagtagctgataaaagaacatataagaaaaagtgaaatcttcagtgaactgatttgtgaagcagacagattagacaagctgttcatgaccaagttaaacagaggtatagggaaaagaaaatacataccaatgccatcctcttcttcccttccatataatctcgtaaatacctggtcaactgtccaggcacaaggtaaaggtgttagaattgtgacacaaggtcacacttttgtaacagcgttgtagaatcaaaagaattctaaaaaataataaaatataagataaaatgcaacccaatactggtaatgatttaactaaaatgtccccaaaaaaggtgaatagtatcttgaaatgtaccaatgagttttgaaagtgcttctgcaatggccgcttagggttcctttgatgctccaacaaagactaaaaacaaatgaaaaaacaagcaccatcggagtgagacaaccaatacacaatcgagcaacaaaacgtgaaagaaagtaaaagaagcttagaagttttataaagtcaacatcctgaaaagcaactgtatcatagcattacgagagctacataataagccaagataaggtaacatactcttaggcatgagccaaaaaccattgatgtattattgatgaaattactttcaagcaaccttgacccctgaaaaatgacaaacagaacaagcatttagaatcatatacaccttaatcgtatctaacaatttgagtataaccgcaaataagatataaacagagaaataatcatttcatgagaacaattcaattacataaactgaaaaatgacctgattgccagttttcttctctctttcagctccagcaagatcaactatacttaaaacagcactattggcttggtgctcatcttgcccttcaaattcactaccaacactacggatgttgataatgcactgcgaccgactaaatgaatgaaaaaaaggaaataaatgtataaatactggaaacgttgtaaataacttctcaaagcattcatttaacttaattgcctatatataacaaagtagtttaaaactttaaactttgagatcacataaaaggatattagctatttctcttcaaataattaagcaaatttttattgatggcaaaaactcgaataacttgtaatctggccaacaagtcattcctatgaaaagttgaaaactggtaaagaaaacgttcatgtcatgcatcaactgctaccttacttccattgtacatacagtaaaacaacctggtataaatacataacgtattcccatatatgcactctaaaaaaagttcaaaactataaaaagattagattgttgcttcaatgcacctagactggctatttgtattggtcgtcgcagtgagacgattaacaattgcatgagctactaaggcttctgcttgtcttgcatcagtaacagttacctgttcaaccaaaacaaaaaagaagtacgtatacatgttatgtatttgtatactatacatcattaaagctccgcatccactaaaattggctaattaacctcttggagccctttaatggaagatttttgcatggttaaatcagctccacctccacccggcgataagtcaaacaatttctctcctttacgttccgattgtatttcaaatatggatatactaaatggtctgctaagaaaagaaatgatagtccattctgatcacattattcttcaagaaaattttgtcaattaacagtgttttctaaccaatttttacctccggagttcagaatccgtctccaatggaggcttaaatatctggcgaagcgtgcgtggtagaattccaggatccctaacgcttccaaaaacggtatgagtcttgccggagccgctaggccctagagtagcaagcataccacttttaccctttaaaaaatcctcgaccaaagggcttaccatcttctcatatacttcttcctatcaacagtcacgagaaattgcataaaggaatggaatgtcgatttatagatacatttacacaaaccaaataagttcttcaatttatcgctacagaaacaaacaaactacccaacctgagaagaatcgggagcaaagacgtgagaaaatccttcataaacttccgatttcactcgtttagcctcctgcaagttcatgggtggcgtgagcgtaaccgagtggcaatcattaactttgatgcagacttcgctagacttcttcttattcgtagttgcatctctggcagaggtcttcttcgcgggattttgaggccaagcatttttagctctagacttgggaaaatgatctttgtctgaactcgttgacgacaaaatgggtctgactctgagaaagaccctaagattttcagagattgagtcaactaatttgggtttagggttttcagaaacttccatggacaaaatttcttcggtcggaaaggatggaatttcttgtgccgtggatgaagaagaatgaggtggaacttggggaggttttgtgtcagtggtagcaggcctggcctttcgggatgggttccgacgaatcgtgaccgagtatggacatgttagaggactcttcgtctccatggcagaaaaccagtctcagtctcagtttctctctctcaaagaaaaaaggttctgttcttctgatatgaaattggcggagaaccagttttttgaaaaaccatcgaatgaatggggcaggcccggcccgtacagtgacggcccatcaacgttcatgagccttttacattgggaacttacaaaaatactgatttttggctcaatctttacaaaaactaccacacggcataaataacttttataggcctttttttttttcttttatattataaacacaaaaaaaaaatgaggtatctatcttccacacctacgaacaaaaccaccacagaaacaccagaacaatcgaaaaacaacttttaattctggtgagattgagaaaaaacaatgaaatcaacgttaaataaataatcatggcaaaacaactgtaaaacaatactaaaacaaagcaaacaaaagaaagaaaaaaaggatttaaaaaaactaacaatgttctgcacagctgcaatagcaattatatttgcaagcccaatcttaaaaaatcaggaaaaaaaactactaaaacaacacaaaaataaatgtaaaataataaagagatataaccacttagataaacataaaagaaccacacaccttaaaatctctattctagtgagctcgtcaaatgtatttttaggcgagccagaataaaaaaaaaaccacaaaataaccacagagaaggaagaagaaatgtattttatagcctccatcttccacactcacggataaaaccaccacagcaccacaagaacacccaaaaaataattattaattacagcgagatggagcaagaacagtaaaatcgacgtcaaaaaaattatggaaaacaaccataaaacaacactaaaataaataaataaaaaaacaaaagaacaaaaaaataattaaaaaaactaatcatcttctgcacaacctcaacacttgatacaatagagactatatttgtaagcccagttttagaaaatcagattaaaaaaaaaccaaactcttatcttttcaaaaaacatgactgaaaacttcaaaaactaaagaaaaataaaataaaaaaaaagatgaagaagaataacttaacaagaaataaaataagaacatggagagaaaactcaaaataaaaaacgtgagtgtatgggttttgaaaaaaaaaaaaaagagagaagcctatgaagaagaagatgatgaacatggaaagagagaatagaaaataggatgaacatggagaaagaacatgtatgttgtgggtctcatttttatcatcatcaattttaagtaaaaaaataagtatcaacatcaaaccttttatttaaaaagcttttgctttttaaaaatgaaaaaatgggcaaaatcttcaatacttttattttgattgcatttaaccctcaaaactaggaaactgttagcaatttacagtttccatccactttaggtgttaagtgccttactaaattgtccatgtgtacatctacgtggacacagtgtacacatggcacaattttattggtcaacttaaaatattatttaaaaatta

SEQ ID NO: 297566 - DNA, 3748 bp, Cannabis indica
gttttgtagtgtaaaattgaaaaagacccttttttttgttaattttttataatataaatttcaaattttagaaacagaaattatatatatatcataatttaatagttgttttgtattgtaaaatattacttaattttgtagaattattagtttttattgaaaattatttagtttatttattttaaaatatctagttttattaaacattttgacattattttcttattttttttaaaaaaaaaatctaaaacacattatacttcattactatcttttttataatgtacatgtttatatattttataaaattttaatatgacttattttatttacgaatataaatgaattattacattatctaaattaataaaaaaatataattatattagaaaaattatttatatgagatttagttcttcattattccaaaagtactaaaataagattaatttaatccaatcttatacaatcctaattaatagtccaatcgagtctcacaaactaaacgagtggttctcaaaaaataaagtaaaaataaataactgtcataaaataactatcaaggagctgaaaaaaaaaacataagagttgcatactcatacaactattttaggaggtatgtaataatgtaacaaaaatctccccatgtacacccattttaaaatgtttaaaattcaaatcaagttactaattaattatatatttaaacgtcattgaccaaatataattatgttagctctatttaatatgtaacttcaaacaagaatgctaagtttgaacctccttatatacattaggataatgctaacgtattgaaaatgattttatatagaatcattttttttttataggtctcgttattttattttttgttcatatttaattttattttattttttattttttatatataattatttgtcaaaaatacttatatccaccaaaaaaattatttttttggatattagaggagagatatgtataaaattttgttttgcattgttcttggacttcgctattagagaatttttgagttttaacctttatttttcttttaaaagataaaaaatatcaaatctcttagttttaattatagtttaggttctttgataaataacttttaagaattttttttttaaaaaaaaagagaagagagaagtgaatgataagttttttttttaaaaaaaaagtaatgatagtatttttaacaaataattatatatgtaaaaaatttaataaagaaataatatttaatggacataaaattaaataatgacacatattaaaaaaaataaattgtttttaataccactgaagcattatcctatgcattattagtctaattgcaaactatgataataagtattttagtatttataattaacaatcaaatagcttagttcaaagaaaaaaatcaaatattttagaatgtgaaaagtcttaaattaataactagtttgtatggttagttgctcaataatcttctaatatatatagaagctacctatatatatacattatgtcattactaacttaattaagaggaagaacattatgaagtcgttcatattaatttctccattaatgtttctctgggtggtcatccttgttcttttttcattatctaatttttcttcagctaccattcttgatgactttgattactgtctctcgcaacatttgtcaaactattcctccattaaaaatgaagtcctttactctccaaacaacccatcatatttagctttattaaattcatcagctatgaacttccgcttcacttattcttccttacaaaaaccatcaattatcgtcacaccattcagtgtctgccaaatcaaagccaccttaaattgttccaagaaatatggctttcaaatccgaagccgaagcggcggacacgattccgacggcctctcatacatatccgatgttccttacatcgtaatcgatctgagaaaccttcgtaaggtgaaagtaaacgttgatacaaaaactgcatgggttgaagctggagctaccattggtgaagtttattacaatattgccaaaaaaagtccagtactaggatttcctgctgggctttgctacactgtaggtgttggtggacacttcagtggaggtggctatggaattttgatgagaaaatatggtcttggaggtgataatgttgtagatgtacgtgtactcttagcaaatggaaaaatagttgatcgaaaatatatgggaggtaacctattttgggctctaagaggtggtggagcagccagctttggaattgttctttcttggaagatcaacttggttgatatgccatcttcactgacaatagccactgttcagatggactacgagttagattcaaccaagaagattgttcatcagtggcaaacaaaagctgacaaatttagtaaagatttcttactgtttgttaggatactagctgggaataattctacaactcctgggatgatcaataaaccatcattacaagctaccttttttggggtgtaccttggtgaaattgataagcttcttcctttagttaagaaaagctttcctgagttgggtttaacaagaaaagattgtactgaaatgagttggattcagtccatacttttgttcaatggattcccaactaattcttctcttgatgttctacttaataggacccaatcagtaatgttttcatttaaagcaaaagctgattatgtcaaggaggaaattccaaaagatgtttttgaaaagttagcaaaaagattatatcaagtagagttaggaactgcagttcttcagttgtttccttatggaggaagaatggacgagattccggaatcggaaactccattccctcaccgagttggaaacctttatgaactcacttatctaactaggtggatggagaaggggaatgattctgatacagagaattacttggaatggacaaaaagtgcttatagttacatgactccatatgtgtctaagaatccgagagaagcttatctcaattatagggaccttgacattggaagaaacaactataatggctctgctacctacgaacaagcaagcgtttggggttcaaaatattataaggataatttcaagagattagtttatgtgaaaactaatgtggatcctacaaatttcttcaggaatgaacaaagtatcccagtttattcttcatgatgattgaaaaacaagagattattatgggattgatgttgttgaaacatgtcattttgattaagtgtttaatggttttaattaatattaaaattgtgttttaataaataataaaaattgtttttatattcctctctcatgcaaatatttctactgtggtgcataatacatccggacataattgccggtaggtgactgaaattgccatttattacgaaaagtcaacttgtagtattcattaattgtcatgtctagttcatgtaactacaaataaaatatatcttcaaacctcattttgttagttagaatatggataaaatatatcaacttaaaaacaggcaaagtaatatttttaatattaaatttaatatcatttctaattctaattgagaattcaagtaaacgaaaataataaaataagggctatttacaaaaatacgggaaaatgaataaatgttttgatatatatggcataaaaacttaattaccttaaatatgacatttttttaaaaaaaacttacaaatatgggaaaaagtcgtgaggaatgtcataaaaaacttt

SEQ ID NO: 297567 - DNA, 1798 bp, Cannabis indica
catttaataaaattttttcaaaaattatatttataattcttttattataagaaataataaaatcaaattaatatcatattacagataatttattaattattttttataaatttttaaattaatgacaactgtttattagtgatccaaagataaaaataatataactatcatagttacatatttgacgtaattattaaaattcctaaatatatatgtatataattttttttttctcaaaatatttagtctttttcttgttttgggcactcaaattaatataagtctacctgaaactttcattaaggaaagatatttagctcatgatgctctcatcttagatctgttaaaaggattttggagaaaaaagcatctcccctccatgtctcttgaatatagacattagtaaggcatataatactctgagtgtgacattctagagcaacacttcttaaggcctataaatttccatcacaaattattaaatgggatcatggtgtgtataagaggctctacttattctttagtgttgaatggaagaatacatggtcaacttaaaggagctaaggggctaaggcaaggtgacccaatatctcctcttttatttgtcttggtgatggaatacttactagacttttaagcttccactctcggaacaaagaattcaaatttcatcctttgtgtaaatctttgagattagtgaacaaggcttcactgatgatctaattatttttcgcaaagggtcggaagcctcggtaaatgtattgttgttgcattggaaactttcagcaactattctggtttagtggctaataacaccaagtcaaatatctttttagcaggactgtcacacacaaagaagcagctgttaccgaatttgttgaagtacaatgacgatttgtttcctttgaagtacttgtgagtgagtttaagacccaccaaatggaaggtttcagattgtgaaactatcataaagaagatcagactcaagttaagtatttgggcaagtagacacctatcttatgtagggagggtgcaactcataaactcgattcttattggcatccgaagctattggatgagtacattcttgttgccttagaaaataattcttgaggtggacaaattatgtaagaattttttatggggtgaaaatgggaattccagcaggatgcacttagcctcatgggatttggtgtgtaaaccaaagaaatatggtggacttgatttcagagaaggcataaaaatgaaataaatcggctatggtaagatatctataagctatcacgatgaaaaaagatgtgttgtgggtaaaatggatcaataatacttacttaaaaggccatgatgtttgggttcatgagctgaaaaatcgatgtcagttggtattagaagaagctcaagaaattaagggaaaccttttcccagtcagagatacgtgaagcatgaatctcgggcaagttcaagataaacagactatatgaatatttcttgtctaacaaatctagagtggagtactacaagtttgtgtggtgtcgtatggtagccccaaaacacaatttttatgtggaaagtaattcactcccatctcctaacacgagacatgtaacgccctgaccctcagggacgccacgtgtgtgtgcttttataaacttattatcactaatctataaattttggaaaagtgtggtttattttaaatctttaattaaattcaaaataaagacttccattttaaatattattgcaatatagggatcccctgtttataaaaaaaatcttttttacaatagattacatt

SEQ ID NO: 297568 - DNA, 3746 bp, Cannabis indica
cataactacaaagttttaacctcgttatgttgtcattcaactctcctaattaccgcattatccgtatttaatttattttattcctagtgaaatccaattacgtgacactaaatacctccccaaaagaaattgtaacaaaacatgtctagatatggagaattatagtgaaagaaataactaaatttaaatgatactcaaagtagtacataaattaattatataaaattaaaaagaaaaaaaagcgtatcctataaatgcttatctatgtacataaagctccataaactgaagggaggaatgattcctccctaaacgaatcagagaagggatgccgtgtagaagtgtagaaaaaagacaaaattctggctagggagtaaagccttcatgttcataataatattcatgttcgctttccaactccaattaagcttagctgcaaagaaaggaaacaaaacgttaagatcctatttcggattaaatgaactgtggtacaagttttaaatcaatgcttacgatgttgttgtgaggctgcttccaataaaatccttggagaataagggggaagacattgcaggctacaagaatgtaaatcatgagagcatgcttgcctatccattctaacacaaccgccattcgcttgtaaccaaacacatccacctgcactcatttctttccaatatcaatttcaattctacaataataacaactatagctccttatctgatttagtctattctatggctgatgttttatgtaattaccatcacgtaaatcgcaacaaagagaatgccagcagcaccagccgtcacacacatgtaactgaatgagtaaagagccttgttcacatgcatgcctgcaccattttaaacaaccagatacgaagctttagctttctagtgaccaaaaacacattagacagcacagcaacttcataacctaaactcttacttaccaaaccagtccagggcaaagcctaacactaaaagacaacacgatgagattgaccactgaaagattctgttcctatggtcctgcaagtaccatgatccaaaggattggtcagcacaaacaacagtgccaaatattttcaaagaaaccagtacagaatgtatatagttatcacgcaccttaaaatggacaataatgtgcccaaagtgcagcccaacgaagcaagtaactatagccatcaccgtgctacatcaatggaaaaacgtcggtcaagatcataagtaggtatcgtcaacagaacagatgaaacaacctaaaaacaaaacacacacacacaccttaaaattccttcaggatcaaaaggggcttgacaccatgatggagcgccagaaggaagtgggccataatcaggggagttagtactgcattgctgtaaaaaagacagttgaggagtgagtttcgttattgaaaagtaataaagtcaacatactctttgagaagaaagatacctcagttcgtgcatagactggtcttgtatataaatgcccaataccaagtatcttacggtcgatcattccaacagcattacaagctggtccagtgtgacctcttactccacatttaaccttcaaatgaatgcaaagatcagttcaagtcactttatcatttgaaattgatttgactataagagaagaggggcgtctatgaaactcaccaacaacgtttttggtgctgacagagaattgccagttggaatctggtactcccagtcaggaacgtataaggagtacaataataaaatatatacaaatgaaatcatcgaagcaatacccctgcaagagaaaagcatgagtaatagcaaatggtgatatacacttgaatattcaaaagcttataatataacttacagctgaagctgatatttcctcaacaaagatgatccagatttaacatcaccatcaccctttaaccaaatctcacacaatgctgccaccaaatatgctatggcaattcgctgaaagaaattgataattagaaacatatatgatgatgtagtaaatgaaggtcaaataatatatgaatacaaaaatagaattattcaaaaggtatacctgtagtacccccatccatctcatacgatcaagatccactccacaagtaaggttattgatgccatgaaaaaatcctcctggattcatggagaagccaaagaaagtataaacattctacttttggacaatgtattgaaaaaagacagatagaatgtggttgaagcaaagtatgaaaataaatatatttaagcttaaagttaaaccttgaagaaaaaggcccaatacaaaaagctttaatgcccggagtagagtgcttttagttgcgacagatttgcatgataaattctgcaccaaaatgaataaacttttcttagatttcaaaagaaggcaaagctgatgccagtagtacgaatttaatatagctataaatagtacctacctataataataataatgattgattctttaatattaacaaaaaaataaataaataaaaaagtacccaccttgtaggtaagtgaaagtgaaacaccagcaataaagaggaaaaagggcatgacataatcggcaagggataaaccattccatggggagtggtttatagcaggcagaattccacccgcatcgtctaccaatatcatcagctgcatacacacaaatatataaatatataatattacttatataaacttatcttagtaacagttttgtacattactaataataataataataatacaacatgtcctatttaatctgtttttttttggaaagtcaattttatgaactgctgaccccaccggccatgactaagtaacagacaatcaaccaaatcttatataaatatattattagtatatagtttatgatggccacccacacccaccagtgttcatagccttaaaatatatatatgcacaaaaactaggatgtgctgtagtgtaggttaggggtacaatacaagcaatgaagcaaagcaaccgattatcggttggattaaggtaagtgttgtttgtgtgtttgctttgcgaatcgaatgctacttctactggcaccgccacgaccaccaccactacccaataatgtttatttatataaaataagtaaaagagttattattgtaaacgaatcttataccactaaatgacaatattaaattcacatgaatattggctaattaagaattttagtaaagacagacaactaacaaaaagtctaaaaagtctaggggcttagatatttttattatgtctcaccacttgtgatgtgtctacgcggttatcacttataaccaaaaaatcaaaatcaatatgccgagttgtaacgaatatgcctttccataaagaaccgtcatttaccacaaatccaataattcaatacatatgcatttaaccacaaaaacgaaaactacatattcttctttctatttaatgttgatcataaatttttaatagaattaaatgatttaatccgtatgaatttacgtacccctaatagctagctaaatactaaaataagacttggactgcttggtttgatttgatgatttactcctaattttcaaaaaaaataaaaaaagaaaagaaaacactacgacttcaagtcttaaaagatatttaatttcaaaggctaaaagaaaaagtaaccattagactcaacacacgtcatgctgttaatattttcacttttttttttttctctttctatttattcggcggggagagataacgaaacgacgtcgtatgg

SEQ ID NO: 297569 - DNA, 2194 bp, Cannabis indica
tttttttttcttttgtttttattccacaatctcagacacttttcttataaacacacacacacacactattactatatccacttaattagttttactcaattatttgctcaatatgaaactgccaacacacgattggcataaatagtcatgatcccatacaattggttcttttctatttaattaagttttattaatagtaacttttggcaaaactattttcaaattcactggcatttcccaacaatcaaataataatgatttttatctctcaaatctttttcataattttttttgtaaatcagtaaaacaaatttcaccaacaaaaacactttcttttttgctaaatcagcagtacgtatgagattatatttcactaaaaaaaaaaagataatttcacaaatacacaaaaacattaaaaaatataaacatatagcagaattttaaataattttacgatttttttaattttatttacaaaaaatacggtctttttgtgttatactcttgttaatttaattattattgtttttctgttattcgtatgttattttttgttgttattttgatgttattttcatgttatttttatgtaatttttttgttgtttttgtgttgtttatatagaaaaccataaaaatgtaaaaaaaaaaattctttaaacataaaagtgtaatttttttatcaaaaaaaaaaatagtgtcttacctaattatcccaaaaaataattacagactaacacaacaccattaaaggcctgaattttattttgaacactttagaaatcttcccacgaatcattatcttgttttttcattttttttaggcatgaccatagtcatcctatttctaatatcctgctgtacaatatatattatcttgatcatcaccattagcactttccagtcctacaaaactaagtttcggttcttctaaatgtgatacacagtggctgcagcaatggcagccacaaaaacttgcttccaaaatggagaaacccaagctcttctataatctctagaaccaattgtttcaaactgaaattaagtgtcctccaacccatcaagaacactttattacaaccgaaacaaaaaagttcaattaatctttttcatagatttgctctacacttttttctttttaacaatttactggtataatactatggggctaacataaatgtagttcatgagttataacgaaaaatatatgatattatggttaataatgacaaattccggtaccacatattgtatatatatacatgagtttagttagctcagttaatcaatcacattaatccttgtacttgtactgtaattaactatatataattatcattaactaattattattttaaatataaatgaaatacaatcgaaagagctcattaattaatttgcaataattaccatataatttgaggatttgtttcactaataaaaaaatagacaaaagcactaaagggttataatttagaggtaaaaatcctatttttcaaatagaattgttgatcgagttgcctataaatataaatatgttagcaactcttatttacggtacagaaaacattattcatcaatttttcaaaattaaagtcgtggccatgggcaaccctaataataataatgatgataaatttcccatttttccctcatcgaatataaacagattaatatgaaatatcacataatttatttggcgagaaaaggtattcattaattaaaccttaaataataaatctcatcatcatttcagattagttttaatagatatacatatgggtggtatataatatatgaatgcatgaatataaataataattaacccgatcattttcagaaataatggagcaatttaatgattattccaactaatcctcggggtatttgtttccatattagaaacaaattttattagttacgtactacaaaatatatattgagtcattgatatatcttaaaatagggcagattaattggtgttcataattattgtgtattaataaaataaaattattgatatgatatcaataatgatctacttttaggttagaagcatgatatccctgtcagaacacactcgattattttaatacaaagatgtaagagtatttattggaatctaatttttcccctcaaaagcaggaagagagctaccagagaagataaagcaatttctttttttatttatttat

SEQ ID NO: 297570 - DNA, 2561 bp, Cannabis indica
tacacagaagtacatttaacctcttactattgtttttcagggatatcttgttgtgacatattatcttagtctgaaactgtaagttccttctagactaagtcatcaacacagcaatctagtattaacattaatattcaatacttgcttaagatcaagtaatcactagagataccataaaacttttcatgaggattaggaatttgtgcctaagtcattcgactgagaatttttgcctaagtcaattcgaactgtctgtgagctataccgtatccgggatagattatgggtatttgtacccactgatcgagatgcccctactctggccgacgtctctatctcgtcttttagatggccacgcttgttggtggtatgaccaacatctccatggtactcgcatttcttaccttggtcctttttttacttccctccttggtacattctgggaggcttcttaaaatggaccatagtgcaagtttccttgtaaaccttttctcgagtatcgattaggctagtatactcagtgtacttaggttcatattggtttcttcctttcttcggagcctcgctccgattctgatttttttggcttctcttattctgagactaactcacatttgattctggaacttctgtttttacttgtttaagaacggtactacatctggtttgtatcactccatagctagagaaattagtttgtgcaggcgcgtgcccaaaggtaacgggtccataaactgtgggagttgtaaactgacttctggcaacttgtacaaccagaactgagaattgcagagtaaaagtaaggttgctgacagacgaagctatggctagagcaactctgaatgcttaagtataagcatcttccaagttgatgattctttgggctattgacatgaattctaacaatgtttctgtgcttttcctttgcatttctctccataagaaggagccaacagttaatccagactaaagggtaataagtttcaggtcatcactagcttttgtcttagtcgctgcttccatcatcctctggataaagtttttaagactctctctagcctgttgcttgatgttggtcaaggatctaacctccatgtcatagtctcaggcatagttatgaactgcttttggaatgtatactgtaaatccttccaaccatgaattgatctaagtggaagccttttccactaatcttcaattgactcggttagtgtcaacgagaaacaaaggcacttggcatcatcgctagctttcaccactttcataagtttgttatattttgaaaaatgtgctcgtgggtctgtcctgccctcatacaagttaatatgggaatcttaaagttctcaagtagcagagccttgatagccttcctgatgcaaggttttggatcttcgtcctccaagtttgagaggactccactctatttcctcataagcttggttaaggtgtctatttgctcttccagacgcttggtgtcactatccagaagctcacgtgcacagatcttgtcattgatgtgattctagagattatttctacaaggccttcccttctctcccttagctttttctcatttggcatgtatagaggtcaatagtggaccaattgtctccaagagaaattatttctaccctctcgtcttagttaacagaatcactagggcagtttttctatcctcaaactcaaacagtaagcctctataccagagctccaggcccatcatcttgtagaaccctacctcgcagatcagaagagcatcctagcccaggggcatcggtggccttctttctccatagaggttggttggcagtattcacattgttcccaagagcaacaggagcagttttgattttgggctcacccacctttccttttcctttgtcctttgcaggggcagagggtccgacattggggtttgccttcattataggtttactctccttgtggataggctcttctggagcattttctttagaaacctcttctagctcatcaagcctggcttacagctgcattagtattttttacatctagagggtgaacgctttttgcactccaacttttgttgggtctcagcaagctcattagacatctaaagtacgtccgaatcttgctcataataatacccatctttgtaatatctatctttaaattttatgtcattctcaccatcaacctcatcgtcatttttgccctcgagatcttcagtcttgtcttcgtcgatggggttttctcctgaagttgggccgtattcataggatggccgccaacttcagatgtttccctaaccctggctatgcccaattgggtgtgcatcgcaagaggtgggtccatattgtccattgcatcgtctcaattacgagcagttggcaataaaatagtggtttttctggtagccaccattaggggtgagcataaaatctagaaaattaaaaaacccgttcaaaccgacctaccgaacaccattagaactgaaactgacgaaaccaaaaactaaaaaacccgctaacggttaaaaccgccattaaatggtcggttttttttttggataataaaccgac

SEQ ID NO: 297571 - DNA, 1699 bp, Cannabis indica
cacaggtgatcatgttctgtacaactgctatggtcacccggctggttgctgacctccttggagaattgaagttgaatgtgagagagattcattctagaaagagtcagagctatagaactaaagtctctgatgagttccggaaatcaaagggccttattcttgtcacttctgatgtgtctgcacgtggggttgattatcctgatgtctcgcttgtcatacaggtaaaaggacaatcacccattaaatggattttaatgattcccttttagtaactggttcttcaaatgaaaaaatatttaaacatatacctcaagctgcagtgtttaatctcatactctttttcacgataacaggtgggtgtgcctgctgatagagagcagtatatacatagacttggtagaactgggcgtaaaggtaaagaagggcagggtgtactgttgctagctccttgggaggaattttttttatcctctatcaaggctttgccaattacaaaagcaacgttgcccgccgttgatcctgacacacggaaaaaggtgagttttacgtagcaaagtaatattcattatatatttctaaatgaaatataggagaaaaagtatcacatacatgagtactgaatgatgttatattgagcaggtggaacgcgcactctcaaatgtggagatgaagagtaaagaagcagcgtaccaggcctggcttggatactacaattcaaacaaggctattgcccgtgacaagcataagcttgtggagctcgctaatgaattcagccggagcatggggctagacaatcctcccgccattcccaagcttgttctaggcaagatgggtctaaggaatgtccccggattgcgctcaaaataactgtctagtgtcgttcagtaaagagaagaatttcttttacttttctcaatatctgtataccattggaatgtttacgaagggagtgtttagagagtcaatgaaggtttagggtgataatctttaaaagtacaaatcagagaatttttgtattctttctaacttacctaattggtgctctacccgttctcttcatttttttgttagttacatgtctaaatgtttacttgtaatggttcaagctacgtttttttggtgcaaatttcaaatattaagatgtacaatttttttttggtgcaaagaattattggaacattttttctttttctgaaatgaagaattattacaacatttaattctaacaaatacgcaaaataattcacaaaccagaatctctacttgacataaagtagccaacctcggccagacaagtactataataaagcaactgatatttaaaacttctgactgtatttaatctctttttttggctgaaaattgactatattaatgtgactacagttatgattatgaatcacaaatcctaattgggtgtgtaaagaaaaatgacggaacaaaatctaaataagaacctaaattctgtgacaaagtgagcttctagcacagtcagttacaatgtgtagcctaagatgaaatacaagtaatggagctagtaccgtttccccttcctcactactttttttatcttcagattaatgtctgcattcacagcaacacttcatgcatgctgggcaatattgataactaattgctagtagtgtacaagtcaattggcttcccacgagaaaagcacaaaattcaccaaatcagattt

SEQ ID NO: 297572 - DNA, 6325 bp, Cannabis indica
tatttgttagaattttatataaataatttatttcattaataattaaatacattgatatataatttttatatatgtgcttgaatataagtattctcaatatgtaatttataaatatattaaaatattttatgattaaaattgaatttgaaacatcaaatttttatcttaaatattgtaagataattaatttttacaaatattatatcataaaatataaaggacataaataaaatatattaaataaaaaaatcttaaaatatgatcttaaatataatcaagaaattcctaaaatcatgaattaaataagatgaaaaaatctaggcatgataagtttcgtattcactctaacaggaataattttacttctttcatcttattttttttttatataataacaacaataattaatttataataattaagtaagtttatttgatttgagttatttcttattatcaaatatcagaaatacagaattttttttagcaaagttaataatatctactaataataattgcatattgtttatagcaaagttaataattgtagaaaagacactaaatataataaagttaaatagctgtataagtaactaaagttttatatttgtaagcggcatagtacccaatatttgtaaagctataatttttttttaattttgtacgtacaaactatgctattatcttaaacagagcacatataaaacccgaattctagatcattagatttaaatagaaatatgtagtatcaattacttttaaatattcttttaataaattcaaaacagagtctgtactgacgaaactggaagaaaattacagttttataaatattagatacttatgtcactaaaaataaatattaaatttatgccgtttaaactttaaattttaaatacttatgtcgctatttacccatataataataaagaagattacatggcaatttgtttcaatttggtggtgttgaactaataatgtccatagatattattacaaagaatgttaaaagagccttttgtttcgtctttggcaatgtcctaaacaataagataagctcaccattctctctctctttctctgaatgtaaatatctcatttccagttccagtcgccataaccaacaccaccaaagcttagtggttcacctctcctgtaagtatctgctctctttcaatatattatacgtacttttctcagaagcaatttgacgaacattaacgacgcaagttgagacttttctcttttcctttttttgtgtctggacattgctatcttgtgttttgattttgagttgtttttgattgttagctctttttgatgggtctgttagtggtttgttcaacgagtgtgtattgtggtagcttcagttatacttgtgcatttacagagactgtagtagcttcttcgattcatagtgagttgtttaagagacgaagctctggaaatttaaaggtttggacatgtgggcacttgggaaatagattgaaagtgaggaagaatcgaatgggtttatgtggtttgttatgaaattgccaaaggaagggtggaattgcttaaagataagaagaaagttgtgaaatcttcagaggaggtaatgaggattcttaagtctagtaaggacccaaattctgctttttcttatttcatggttgtggctgggttacctaatgttgttcacaccactgaaacttgtaattacatgcttgagttgttgatgaatcataagagggtggaggatatggctgctgtttttgatttcatgcaaaagaaaattgttaacaggaatttgaacacttatcttgctatttttaaaggtctttacataaggggtggaattcgccaagcaccggttgcacttgagaagatgagaaaggctgggtttgttttgaatgcgtattcatataatgggttgatttatttgcttctccaatctgggttttgtagggaggctttgaaggtttacaacagaatggtcatggaagagatgaagcctagcttgaagacttattcagcacttatggtagcgtttggtaagagaagggatactcaaactgtaatgggtttgttagaagagatggaacatttgggattgaggcctaatatttatacatttaccatatgcattagagttcttggaagggctggaaaaatcgatgaggcttatgccgtattgaagagaatggacgaagagggatgtggaccggatgttattacttatacagttctcattgatgctctttgtaacgcaggtaaagttgataatgcaaaggcattgtttgtaaaaatgaaagctagccgtcacaaacctgatcgggtaacttacattactttgttggacaagttaagtgattgtggagagttggaaactgtaaaagaaatttgggatgaaatggaatctgatggttatgctcctgatgtagttacattcaccattcttatcaatgctttatgcaaaagaggtaatgttgacaaagcatttgatactcttgatgacatgaaggagaaagggatctcaccaaatcttcatacttacaacaccttgattgggggactactaagggaaagtagattggatgaggctctaaaactttttggtaatatggaatccctgggtgtcatgcctacagcttatacatacatcctgttcattgattaccatggaaagtcaggtaattctgtcaaagctattgagacctttgagcagatgaaaagtaaaggcatcgtgccaaatattgtagcttgcaatgcttctttatatagtcttgctaaagcaggtagaattcaagaagcaaaagaaatttttgatggcctgaaaattagtgggcttactcctaattcggtaacttacaacctgatgatgcgatgctatagtaaggtagggagggtagatgaagccattaagttactttctgatatggttgagaaagggtgtgaacctgatgtaatcatagttaattctttaattgacatgctttacaaggctgaccgagttgacgaagcatggcaaatgttttataggctgaaagacatgaggctcactccttcagttgtgaccttcaacacattgcttgctggtttaaggaaagaaggccaagtccaaaaatcaattgaaatatttgagagtatggtagagcacggctgtcctccaaacacaataacttttaacactgtcctggattgcctttgtaagaatgatgaagtgccatttgcattggaaatgctttgtaaaatgtcaacaatgaactgccgtcctgatgtctttacttacaacaccatcatttatggattaatcaaagaaaacagagttaatgatgcattttggtttttccatcagatgaagaaatctctatatcctgatcatgtaactatgttcaccatcattccgggtgtcataaaggctggccggattgaggatgcattcaagatcgtcaagagctttgtgtaccaggttggggttcacgtagacgggcccttttgggaagatttgattggagggacactggttgaagctgacactgatacagtcattttatttgttgaaaagctagtatccgataaaatttgcctggatgactctgtacttgtacctctaataagggtgttgtgtaagtgtaagaaagctcttcatgcagaatatttgtttgaaaaattctgtaggactttaggattaaagcctactttggaatcattcaactgtttgattgaagggcttcttagagttcatattactgacaaggcttgggatcttttcaatgaaatgaaaagggttggttgtacccctgatgctttcacctataacttattactcgatgcacatgggaagtctgggaaaattactgaactctttggattatatgaagagatgtgtagtaggggttgcaagcctaacacagtcacttataatatactcatttccagtttagtgaaatttaatagcgtggataaggctattggtttttactatgattgcgtaggtcgtgatttctctccctctcctagtacatatggacctctcattgatggacttttcaagtcaggaagacatgaagaagcaatgcttttctttgaggaaatggtagaatatggatgcaagcctaattgtgcgattttcaatattcttataaatgggtatgggaaagcaggagatgtagaaacagcctgtcagttgtttgaaagaatggttaaagaaggaataagaccggacttaaagtcttacacgattcttgtggattctttctgccttttaggaaaaattgatggtgctctgtattactttgacgaactaaagcaggctggccttagtcctgattcagtttgttataaccttttgcttaatgcacttggaagatcacaaagggttgaagaagctctatctctctacgccgaaatgcgaagcagaggaatttttcctgatctttacacatacaactcactaattcttagtcttgggattgctggaatggtagaggaagcagggagtatgtatgaagaactacagcttaagggttttgaacctgatgttttcacctacaatgctcttattcgagcctacagcacatcagggaatcaagaccatgcctacgcaatttacaagaaaatgatggttggtggttgtgatccaaatgtgggaacgtttgcacaacttcctaatcaaacttgagcacctcgcttcattggaatacttacgtggtagttttactttccttttctatacttgtataatctgatttgctgcagataaaacttgagcacctcgttatttttggtttgtaaagtgatatacatgtttgtaaaaaaccctattgatgagtgaagtatattattctttatgtaaaatgtcttatattaagagctccgtcggttttcttccatactcatccccttgggtagactatgaatagatatttaaaggatcacggtgatattgatcggaatgttgctccatttgtgaatatgtttctgaaccaagtttcaaaattgctttctacattcattttggtagaatttgtcagcactatgcccttgctggccataataccactcttgcttttgttttatgcagcaaatctctattatcaggtagtgtaaaacgtcatggactttcgatgttgttatgagaggaacacttgcatatgtttaacaagttcatggattgtcaatgcaactgtaagtatttgttaaaaatttcttagatttgtatatgattattggactgtaatgtagtatgcagtataatcttacaatctctaacaatggaacttgatgagacatgagagttgtgaattttgttatagtttttgaagacatggtacaatgaattgcatattcttataggtacttgacaacatcttatgtggatcagcttttgcttttgcaagatatgagaaggtgcactgctgtgctgcatgcccttgacttgatacctgtaagtgatctcaacgttacacgtttctttcgctataccatgaaaatctgttattagttttgagcctatggtagcctttctcacgagcttcatatacagggcaatatatatttgcccttctcccctgttaatgagctgttttgctttagcttcctactttatccagggagatatattataattttttgtgaattttttgaaaaaccccttttaccacactagtacttgcatgggatttttgatcaatatttgaattgtgcattgtcgttacttatacgtacagctcatgcaaggtctgctggttggttttttgtttaggaatcagaatctggaaaatcctattactcatcttatgtttcttctttattcaagtattatcttggagttgaaagcctttcttatcaaattatttactcctaatgttcattgtaattttgtgggaacagacacaagtcataaaggaagatgcagaaattgtgtacagacaagagaattggccctcatatcatgaatgaaattttggcagcaatggacaagtatgtttttttttatcttttgaatattattattgtttgttttctccctgatagatctggtgtttactgggaatatcttgaatttgaatcaggtgttagtatcttccagtccaaggtacaaagtttcgaaaagcatcactacttggagtggtataagcattagatagttccaaattcattttgaaagacaaagtttcatttcatgttatcatatacttgatagtgtatacatgaatttgtatatttgaaaagaagaaaaattaaatagtgtggcatatcttgatggtatagcacatggtttcataaaccgtacgatttccctgatctaaataaattaagatttggctcagcatgttctattc

SEQ ID NO: 297573 - DNA, 2764 bp, Cannabis indica
aaaaaaaaaaaattgaaaatatatatttctggatttttagtcaaacttagaaaatgaattgaggaaaaagaaaagacccttcagttttgatggtgaagttagcttggattaggtaattaaagaataaattaagggttgtgtgggaaagagttttcgtcttatgagttgtgcgtttttgaagtatcaatcttccaaagatatctatgctaataaacccttatgaataaatgaagcatatttcaaccccattatagttgtttataaaattatgatcttctcattttgcttattgctttcaaaatgtcatctttagtagaaaaagaaagaagaatcttcgttttagcttgaatttttcatgatgcagttcctatggggccttggtgttcctgatactgaggcagaatgctacgatgtttatgggttcgatcaagaactcttagaaatggtcccaaagcctgtactggccgtgctattcctttatcctataacctcacaggtatcagttataactttgtttatttaatttctgattttcttaactacgggaggatggactcatttcaaatttttttcattgtatccagagtgaagaagagagaatgctacaggcaaatgaaataaaggtgtgtggtgttgatattgaatcctaacattaatgtacgttttagctttagaaattggttttatgttaatctttctgttggtaataggaacctcatggtaaagtttattttatgaaacaaactgtgggaaatgcttgtggaaccattggacttctgcatgctgttgccaatatcacctcagagatcaagcttagtaagtttcgtttttggaatttttctttcgtacagattttgcctgcatattcatatggtgatctattaacattttggtatttaaatgttatgggtgcatttataaatgtatctaattttgtgttatcctactctagacttgttcaaagctgtttcaaatagttcgaaacactttgaacaactatgcttgttgtcagaacttctccgcaaaacttccttcaaattgatgaatttgtctacatattttttcttgaccttagaataactcaaaagattggaataaaactattttggaatacactttcttcatttaaaaaccaaaatcacataaaatacttgcagggttagttttcctagtttttgagtagcgcattttgtctcatcccttaatagcaatgaatcgttacttatataagcaattgtttcaagattgtttatcataccaactattttggtgtgctttgttgttattttcagatgatggatcttttttagacaagttttacaaatctactgctagcatggatccattagaggttctatttcgtctatcctttacttcatcatttgatcatgtgtacctatataattcccttcttctgtctcattcttgcatgtttatatatttgtgtagcgagcacgatatcttgagaatgacagagaaatggaagttgcccattccatagctgcaactgctggtgagacagaggtaaggtgactaaaattataggtgggcttacatttattttgaccttgagagatcttgcttttatgttaaaagagtacacattagcatgatattttatgtcctccccaatccccatctccaaaggctttttcagttcaattccctccaccccaaaaaagtgacaacgaagagtaatgtgatacatgtgttatatattttgtatttggcttctcattttaccacttttaccttgcatgcaggcttccgataatgtgaacactcattttatctgcttcacatgtgtggatggtatatcctttgttgactctttatctctgtttgtgggctttatagttaaatacattcctgtcggaagaattttaagtggaccatttatatatcgacttacatactaaaccttttcataggtgttctgtatgagcttgacggaagaaagaccggaccaatatctcatggggcctcttccccaagcactcttttgcaggtattactcctgtacaaaaatgatataccgggcaattaggatgttattatatgattttggtaaaaaaaaaaaagcttcttttgtttgtgctctttctactggtaattttcttgtgttcacttgaacaggatgctgctaaagtcatacaaggcatgatacagaaaaatcccgactcactcgactttaatgtcattgccctttcgaagaaatcttgctaaagttgctactgcgagatcatctgagcgccatatgaacggtataaaattttagtgatgtaactgtgctcaagatagttgtttaggtcactctatctagttgttttgtgggttcaatactagaatgtttatcattccgaagcttatggatttattggcatgagctaatacaagtgtgttggtttagatggtaggtacacaactatctttaggggacataatataataaaggtaattgggttgaatagtttttcgtttaaatttgtagagattttagcaaaatttcaatatgtggtgtaaaaatcgcaatagtttatggactcattgagttggcccaagatccaatggagatttttccccataaaatacaacaccttgaatattcctatgagtatattttataatatttctatatctatattgatttttagacattttgagagatcatatcatttaaatgataaagggaaaaaaaggttacataaaataattaatataaaaataaaatcaatttttgtaaaagtaaaaatgtaaagatact

SEQ ID NO: 297574 - DNA, 1636 bp, Cannabis indica
aaacagaaaaactgattaaaaaagtgttaccaaacgccaccttaatattcttccttaagatggactagtgtacaaattttgtaaactcatcttggtaacaatatcaaagaaatgagaaggaaagagagcttttgtcagaatatcagcgagattgttctttgatcaaacatggtttagcttaatgaggccattggtgatcttttcacgaactacatgatagtcgatctcaacgtgctttgtgtgttcataaaagactggatttttggatacataatcacaacagtgttgtcacaaaaaatggcaacgggtaggtgattgttgaaatcgtttaggatggtagtaagctagacaacctctcaagtggcatttcctagagctcaatattcagcctccgaggttgagcaagaaactgttgattgctttttggacttccatgagattaaagagttgctgaagaagacacagtaaccaaaaattgatcgtctagtccatgcaagacccccaattagcatcagcaaacactttgaattgtagtggttgaggagatatggcatgaaaaaataaaccttgtctaggagtccctttaaggcagtggagaacttgatgggcatcatctagatgtggctgagtttgtaagaactgacttaatctgttgactaaaaaagagatgtcaagtcttgtgatagtgagatataaaagcttagcaataagacttcgatatgaagtgggatcgaaaagaggtgagccaatatctttgctaagttttaagttaggctccataggacaagatgcagcccgtgatccaaggcaaacagtttctttgagcaattttagagtaaatggtcgctgagagacaaaaatgcctttgtgagacctgcctatttcaagcccaagaaaaaatcttaaaggaccaagatccttaagtttaaattcagcatttaattgatgtttaaaaatggtgagagcatggtcattattagatgtaatgattatatcatcaacataaacctataaagctaagaagacacttgattttttgtggattaaagagggaatgattagattgggaatggtggaatctttgttttatgagagtggtgtttagtttggcacaccactgtcgttgttgtggtatgcaaatatatgtatcgttttaacaagtaatactcaggtaagtgagatcattctcacgaggacttttgctaagtaccaatcaattaaatttttgtttctatttggtaatcgaatagataaattttaaaactaaataaactaagcaaaaataaataaaatgaacaaataagaggtttaacaatggatctgaaattagggatatgatttcaattgtatctttctattatggtctaacatgattcaattcctattgcaaaatagtttactcaagtaatttatagtcttctcagatgtataaacctcaattacatgcaatttttctactctcgtgataaattaaacatgtaaaagacattaaacacagaaatcctataagctagccaaaccacataggtactcttgtcctatatcgaaatttgttcctatttcactatagcacaattgacactcacttctcaaattttgttcaaaatcataaccaattaattgatggccagaaaat

SEQ ID NO: 297575 - DNA, 1134 bp, Cannabis indica
ttattatgattattattattataatcaagtagaggagcatggccttggccaaaggccttgacatggtcttttagagacctcttgtgcttaaaatcagagccacaaagacaataccaaatcttaccacaattcttctcatgagtcctccaatcacctttcacagcaaatggcttagaacattttgtacaagcgaaaggcttggcgccatgcttgcgcttgtagtgagtttgaagagttctaaagtccttgagaggccttgctcgggggtgcgagatgttgtgcttgcacccgctccaacaacaatagcacgccactctcgtcattcctcctccttgcttgttgcttcccttcagcgattccgctccttttcggtattgagatccatgtccccacatatgcatctatatataaaagtaaaaaaataattaaaaaaatatgtattaatttagctaagtactatttatgatcgcgaaataaagaggggttactcaaataatcaagtcagtacaaaaatattaatagaaatatttaatgtaaattaatactctaatgcatttctttctttggcacaatgtatggtttcatgtctaccaccacctaattaatttagattaaccatattattgatgagagtaaattaataactaatgagttagagatattaaaaattatctctatgtacatcacagtgtactaatattatattgatatgtaaacacactaaaagatattattggtgtgtaatattttgtttggtgtcatattattggtgtaattaagtattaagtctaatataatttaagtgaataacttttaagaaatattattaaccaattataaagcaccgcctataaactaaatactactactaattactaaaaacccaataataatgctctaatgaatattatctctatatatatatgtgtatttacttgttttgtttgtacactacaaatgttacttttggtagcacatttttgtgttgacaaaagttggtattgcgctggtaaaataaaattacttgtgatgtgttggcaaaagggagttggcaaatcaatgttggtattagaatttttgccagcataaaataaaaagcggtggcaaaaatgatttttctcatagcgcgtaaat

SEQ ID NO: 297576 - DNA, 1457 bp, Cannabis indica
gagagagagagattaccagttgctggctgcaccggctccgtaaaagacgtcatgacgagaagaatcccagacccacctgagatggtgacggcgtgaatagagaattgagaaagcgagcgagggtgagaatgagagagagagagacgagtgagtgagtcttagatttagggttttttttaacttttacttttaataaaaatctgatagttatttttaataaaaacctaccaatttttttaagaggcttttttatttttacactttaaaacaattttttttgcatttttacgaaactctatagagaaacccctattgcaactagcgctgcaacctaaattgcaacaaaaaatcgtatagaaacccctattgcaactagcgttgcaaccactttagaaacccaaactgtatatttgaaaaaaaaaaagttaaaaaaatagtatacaaggtgattcccttttttaaataaaataaaataaataatattttaaaaaatataaaattaaaaattaatagtgttattcgggttatttcgggttgagtcggtttaattgggcgggttactttattttcaacccgcccaatatacagattgtgcggttttttttttgtcgggtttttcgattcgtttttgacggttttttcagttgggtttaagcgagttattcggtttaggcggtttatgaaaatatgtgtacaacctgaacacggtatattaaagataattgttgccaaatttttagatgttagacttgagttgatattttaataattcttccctgaaactaaagaccatgcactcgtgaactcctcctagtgaaaccatcttgtacggttgctatcaacaacaaaattcgccacaggagggatcgatcaacgttgtatagtagaaaaagatgaatatgcgctcattttaaactcacatttatatttttaattgttttcggttcctaagaccaatgtgtatgctacgaatgcaaaagtcaaaaattaatagcattgcttatgacacaattaaataatatgtgaatgttacaaactgacgttaaaaggtttaaattatttttttctcaaatccatccctttaagactgacgctaaaggtataaattattttttttccaaatgcgtccctttaagaccgacattaaagggtatgaaaataaataatttttttagatttcatccacaatttcatttctaaactggaaaaaacaaaccaccacaagaataatacatatcaaatggtgagtgctctaatgcttattactctaacaccacaatcatatttgagaattgtataaatcaccacaagataaagaactttttaggggcaacaatattagcattacaaaaaatttaaattttagtcacaccaaaaattatgactaaaagtaaaaaaatattgtgattaaaagttttagtcacaaaaatttattggggcaagattgtggctaaaaa

SEQ ID NO: 297577 - DNA, 9549 bp, Cannabis indica
ccatcacgaaagaactccacagttaagcgtgcttgacctggggtaatttcaaggatgggtgacctcctgggaagttttcccaggatgcgtgtgagtgaggacaaagcacgctgaaaacacttgtgttgatctgtagggtcagtcatcaatccagaaagcagccagagtgacgaactcgtgtataagagccattattccgtgggtgtaagggcccaatggaggcttgaagcggggacgttacattatgaccccaacaggtttgtttcgttagttgacttggaaaatttccaactcaagtgatagttggaggaggcaaaccgaataaacgcagagttggaacaagaggtagccgcagccagggtggctcaggaaaatgacgcacaaaactaatttgatcctgaggtaaagagagtaggaaatccctcgtggaaacgagagagatcctgggactcaacctaaggcaggtgggtttcccccgagacattgtcaacgcccttctcgcactgatagagaaggggcacatacaaaccccagcaggggccatgtatcaacccattctcaaaagagaaggtcagtatgtgatgaggccagttctagttctaaacgtacgaggactcgtagttgatctacgcgaggaggggatagagctcgtcgcagtactcatcgagaaagtacaagcacaagtagaacagaaagttactcaaggacgaggtccgtgagtaatatgatccacaacagttggatcttcgtaatcaattaaactagaaaaaacctgaccttcgttaacaactcaatcaaaagcaagaggatcctatccaattgcaaattattgagttggaagacaaattcaagaggtatcaatatggggaatatggacaacatcctggatatgacccgagcctttccatctagacatcatgagtgttgaattcccccagggatttaagaaccctcacgagtcgtcatacgatgggactatagatcaaggcacgcacttgaataatgttaacactatcatgcaagcgagcaatgttacgaataatttacggtgtattatattccctacctcgctagttggggtagcgagcagctggttcaacaaatttacacatcattcaatcaccttttgggaacagctgtctaaagacattaagaaacaattccaggcagcaagagacaggcgacccgaagcgtgttctctcaccaacataaagtagcagccgggtgagacacttaaggcatacttgagtcgtttcagtacagttgctgcgagggtgagaaatttgaacgatagtatccaacttactgcccttcaagtagggatcacgaccaatctctcaactgctggaggtgagctatgggacgacttgcagggttgcccagtgaagaacatcagtgagttcaatgagagggattaggtgtttgttcaaaaagaggaagcaagaaaagagatgaagttgttaaagactagctcgggaaataaacccaacactctctcgacaagtaccatcttgacgaaggctaaaaatttaggaggctctaagaggaaagatgactccaaggaattagccaaggacaagaaaaaatagaagaagcatgacaagaacgtgccaatctacactatttataccgagcttaatgaaacttgagaaaatatttatctcgcacgtgagcacaaggtcgcattccgtaaacctaagcccatgagtcatgcgagacataagagagatgcaacaaaattttgtaagtatcacaaggacattgggcatatgatagaagaatgtcgtcaactgaaagacgagataaaaagccttatcgtgtgaggtcacgttcgacaatatgtgaagtgacaaggtgatggacaaaaccagcctaataacccaggcaaccatagattacaacctcctcctcttgaaggagaggatattctagttatctcaggagggccacatattgctgggaaaagtaacaatgcccaatagagatatgtaagggaagttaagaacgagcagtctgcttttgctctggaatctcctaagaaagcaaaaattgatgaacctccgattgtgttctaggaggaagatgcaaagcacgtgagatatactcacgtagacgctctggtgattaccatccaggtcgctaataaaaggataaaaagggtgctggtggaccactgaattttagtgaatatccttcataaggatacactgagaaaatgggacttgaaaaagaaaaataaaaccttgcatggtaaatctatgtggatttacaggtgacagtgtcgtaagtcaaggaataattgagctcccattaactgtgggcgaagcacctttagccaccattatcatgcaagattttctagttatcgacctgccatcagcctacaacataatgctgggttgactagcgttaattggactatgtgcaattggttcaattaagcacttatccttgaagtttcagacaccgaaaggtgtgggagtggtgcgaggtgaccaaatactggctcacgaatactaccgcatagagctacaaaatagaaaggtcggtcatcagctaatggcaatcttgactgaagagggcgagaagcaggataaggatcttgatccacggagtcaagatgaacggaatttattgaaaccgattgaagaatgagaagaagttattttaagtctaaaaaatcccacaaagtgtgtattcattgggaaaaacttgtatgaaaaactaaaatagcaactaataaggtgtgcacccatccatctccacatgggcccagctgtaaatgccaaagcccctattcgcgcacttaattggcctttctccgtgaatggagagtctattctagtacagtcatggaacacttttaatccaacactgggtctcgtacttccttaaattgagatggtggcacattacggttgggtctattccttccatgtcctcatgcccccaagcaaacacgtctaaattattttctaaaaatttcttcaactccttcttaagggcttcaaagagccattttccaattttgaggaccttgagcaggttcttcaaaattaatatttattccaactcttctactgattccactcacacttcctcacaaactagagggtctagttccgaggaagctttcttacccttgttgggtcccccatagaccatcatcatcattggttctcgatgtttacaggcaattctgagtgacatgttgcagcattctctagcttccttctattctccctttatggtggtgatgcccttgggtgtcaaaaatttcataggcaaatggtgcaccaaagtgactgctttcaaccggttgagcgatggtcgtcctggcacaacattgtaggctgccagacagtcaactaccaagaaggtggtcatcccgtggaatgtagaggtctcctccccatagttgatgtcaattttatcgtccccatggttgaatcgagtctctggtgaacccatatattgatgatgtgtagggttttagatccctaagacccaaccccatctcgcctttagggttgtgaagtataaggtaactattaaactcccattattaaccagcatccggtgcaacctagtgttagccatctaaaccgtaagcattaggggatcattgtgagggaaatgcactctgcttacatcttcctctgtaaaggtgactgagttattttctctcttacaattctggaggtccttgttctaagttctaggagtgaggttcttgccttgcctctcgggcatacttgtgtctccctctacgagtattgcctcccatgcaagggcctcttatgatcgttctaacgtattctaccacttcgaggacttcagtggacactcttcgcttgtgtcctccatctacttgggtcctactgatgttctcaccttctctcttgacggtagatggtgataggtcttgctccgatgcgaccaactaatttttgttaaggtgagtcttcgtgtatcgacgacgacaagagcgtttggtcattttgtaatgattgtgtgcgacttggcttgagcttttcattcccacagacggtgccaaaatattgacagtgaaaactcgttaactaactttttggctagttaatcaaactatgcttcaggcttagatctaagatgaaaagaaagatgaaatatggattcaaattgctatctcaaaatagagagaaaatgataaagtttctgtagctctcaaggtcaagttacaagaatgattttccaaccccctctcaaatctgagaaaggggtatttatatgctctaatggtctaaggtacatggtggtcccgggggacaatatgtcactttcatgatgcacgtcacaagtgcaagaggtggccttgcaccttgtacctatatttggtgtcaagtgatccccggttgtaggagttttttccttagttgcaagagtgtggtccccggttgtaggtgtgtgagtgcagtgtacctttggttgggtcctcataccttgctaatgtgctccttccactactcatatctccttagagcttccaagtggcgtggttgtatgcttgtctcttacacgccttgtcctttgattccccgttgaacgacattcttgtttgcttgcacttgaatgaatttcatcttacattcatgacatattcacgttacgcaactcacacgttgcaacacaactcatgcctatgtattatgcgagagcccccaaggcccttaacacaagcacacacgcacgctcacaccactcaccatgatggattgcatgcgagccctcgaggctcacaacacacacacacacacgcacacctacaccactcaccatcatggctcgcatgcgagcccccgaggctcacaacacgcccacactcgcacacacacctgaatcaccaccacgggtcgcaccctagcatcctcacacactcacgcacacgcttgcatgcgagctccctatcttgtgcccctgcaactgcacacactcatgcatgcacacagtcgcatgcatacacccgagtgcacacactcatatgcacaattacatgcatatgcagtacgtactcatacatgcatgcacaacttctccttctcatacccttgctttcgatgttgaatcaccacagggtcagtcatcgaattgcatgggtgcatcccgaaaagtgcgcatatcgacgatagctttatgaaatacatgttgaggaggtaagctcgttgaatgcactttcgttaattgctctaaaattagttaactaacttcaaaagttagcagcgctaatttttcagggttcataattatttatttcttcagttttaattatttatagttaattttctgaaaattttagtaaatatatagtgtaaagaattaacaatcataataccatatttgttattgaaccaattttcggcatcaacatatatacttataataacacatacttataataatatacttttgtaaaaataaacaaatatgtatatatatatatatatatattttgttgagctatatattttaaaattatatttaattagtaatgctattaacaataagacatgcatgttattaatatttatatcatttttccctgtgaaatagtactggaaaggaatcaaattatatctctcttttaagttacataaatacaaatatgtacattagaaatatatacatatatattgtatatataacagggctttttatagagaggtctcccttcaaatgtgccaacccaacccatgccatatggctcatggcatattattatataaaggaataatatttagatatttcattttataatatagtgcggggtagttgtgaaccttaattcgtctattgcatttgtctctgtgctttggtattcatttcatacgaataataagcatcacagttttcaataggccaaaaaaggagagaaagagtcactgaaaccattaattttcttaaactagctagctagggtcgttgtagttcacattctatttcatcggccacactttaatttcccagtggccttacaaaagtgattgatatacaaatcaaagaactttcttttctgcaaaagctagagacctaaactaatcacgtactaattaactatattaaccaaataatatatattaaataaataaaaaaagtttcaggtcagtttttaatatggtgctgatctagctacttacttcattaactaagtatagcatttgttactgctattgggaaaatttgtggacgtctcggtaggacatggcgaggaggagtcccatagcaagctcggcttccatggatccgccatagccgtattcaaaggtggcaaaggcaaagtactaaacggattgaaaccaagggaccgaacagcgtcccacgtctgatcttcatcctcctcatgaatattattccttgtcatcatggaactttgatctgtactagtattagtcgtcgtattacaaaccatgttaccaagaatattcccttgaaaaagctcatagggcaaccccattgagaagccgttaacatcgttattagtacattggtgatcctcctcgtgtgatattccattggtcatcatcaaatcaacaccctgatgatgatgatgatgatgatgatgataatctccatgtactgaagacatgtttagtagcatagtggaattaggagaaatattatctggaggggatataattgggaataggaagctagctggggagaagtgatctccactactactacagcttgaaatgttaatattggagttatgaaaggctttgtaagaagcaaagtcaagaggagggtaagtcaaacttatgctactactattattattggccgacgagttttgtatgtcgtttctattattagtagtacaaaactggatcggtgaactggttttggttccaagtgatgatgacatattattattgttgttgttgttgcttgtgagatctgaaccaaactgagtagttgttgtagtagtagtggtagtacagcttggttgatgatcgactgataagtgagaaacccaagattgagagagagctctttgagctgatgagttggttttcttgaatattctacatattgcccaagaatcctgcatgcaacaaaaagtccaatggaaaaaacagttaatatacaagggttacatagataaatattttttgatacaaataatatcaaaagaacataaacatacattagcggagaagtttttgtagtccaataatctcttcgatggaacaacagagtgatcggtgagagaaggtagccgaaactcatgcatcatccagtcagttttgaggcccttagcagctctacctttgtagaaaacaagagatttcttcaaaccaatgcattttgtgccctcagacgagtatatagggcggtcggtccctgtggctttccaaaaccctgctccggtcacccggtttggtctggtgctgttcctgtacttcctatccctagggcagtagaaataccactctttctctccggtgctcgctaactctacagcataacaaaaaaaaaacgtattttttagtcagatcaatatactcaaaataatgatatatataaggagataattaatgatttatatgatatcttactaggaagatcccaaggatcatatttatagatgtcaagttgtttgatgagctcaatggagagagggcgctgttgaatctttctctttagataaaaccccacaagttcctcatcagtgggatggaatctaaaaccaggcaacatcacttcctccagtttatctccttcacttctctcatgatccatacttaatatagtactttataaaacccaacaaatggaaacgattgagagagctacgagatctaatatatgataaaattaggtattattttattttttcctttttgttgaaacagataacctctagagatcagaagtagtactcctctagtgagagtaaaacaaggagtactgaaacttgtttgagtattttacaagtcatgagcttatcaaagctgtctaagtaaaacactaaaaatatgtagtatattgtagtagtaatggtaggagtagtattactagtaatatatgaataataagcaagtgagaaaaccctaaatttgaagggcaatatatggttcccgagaaggggtctagctccgaaggttcagccgccttttgtggtgactttaaggactgtgttaaaatagaaagaagctaataatattggccaaatgaagctcttaaaagatcacaacttcaaataccaagatagccctcaactcaagaaaaaatattaatggttttctagggagctataggggactcttatttatgatcatttgtacctgtaaatgaaattggccctcatttgagtttgtttaatccaaatggaggaatctcaataagctactaaatcaacacctttcatggggatttgtgtctctatttaattaactcccccaattatcacatcaaattaataattatataatcaaatattttattaaagtttgatttctactatatattaaaacaaggaaagcttccaaatataaattaattaaattaattaatagtaataagctaggtttgaatagttatttggaaacgtggaccagaacttattgcttccaacacaatgctcaaattaaatacctggtgtgtaagactgtatctgattaattaatatgtattattttttaagtgatacatatttctcaaaatccgaaaatcccgtttctattccattccccagagcttctattccactgactttgtcggattataacaatataattttagggtcagagatacgtacatacagccaaaaagattaatacgtgtgatattaagcaaatctagtaattatctatgcctgtagctaatgaggtaaaagaatctcacttgaatagttaacctggtaaatttattagtttgacccactacatatctttaattatatatatacaatcatatctgtctctttaatgtttgtaactataactaatatatataatctccctcggttatactattaattactttttcctttagtacaagtcaaatgagatcaaattaaattcgtcgattgcttctataaaaataaataaataaatttgtcgattgctcttttcactatatattttatttatttttggtcggtgaaatgtgtattgatatatgattatttttcttcatggagaaatcgaagaaattatacttgatcaattttatttaaaagagtttactttgtatatctgcatgttatttagaaaaaggtttgacatataacaacatacattttttccttcaaaagaaatgtgctatcatatatattcatatgccttctctaatttcagatttcaaggaggcaacacaactaaaaaaaattaacactacaaaatttttacttttggtgacaacaaaagttgtgactaaaatgactaattataaattactatttttatgttgtgactaaaaggtccgtaattaaagatattagtcacaaaaattacaatgtattgtgactaaatgtgtttttagtcacaatacttgttgtgactaaaacta

SEQ ID NO: 297578 - DNA, 2123 bp, Cannabis indica
tcaatgtctatttggcattttaatgatgtggtcaattataactagtggggacaggagtggaacaggtaaaatgggacagatgatttttttcccgttttgctacccctaatcttttgtagtaattttcagtctccaatgactttttgttcatataaataccgtatagcaatacattcccgcaccaatcaacatgctaaaattagtagtcaacggcccgcaccatttaatacgtcaactaactaaatgagtcaatcatgccggctaatttattcgacgtctaaacgaaatagactggtgtaaagagtagtcaagagttgaaaatagtgaagcgaacctatcacaatcaccttttaaccagttttcattttattacaccagtctatattgctaaaattactttataataaatcattctcaccttctcaagtttttaagtttgtgatattctctctctgtgtttgtcatggcatttttaaaatgtgtagtagtgattctactactaccaccactctctttcattctaaatttaatcaatgtagaagcccaaaaaagccacgacaacataatcgaaataggttgttccttaacccccaacctaacctgcaataatagtcatgatcataagaacatcagtagtacaagacttagttgttggacctcaccttctggtctttttgcctttggtttctatcctcaaggtaatggcttcgctgttgggatatggattgttaatcaaaccgatcaaaccaccattgtttggactgcgaatcgtgacgacccacctgtctcctcaatggccactctggagttaacaacagaaggtttgtctctcagagataataagaccatgatcgaatcaaaagtcaatggtgctgaagacagcaacattacttcagctgctttacttgactcgggaagttttgttctttactccaatgattctatcatttgggacagctttgattatccaactgacaccattttaggtggtcagaacctctcctattcagacaatactcaattagtatctagcgtttctacaacaaatcattcaagtggaaaatttagcctccttttgaagtacgatggcaatacaaaccttgctttgtaccttgtaagcacctcagatacctattggattcctacaagccctggacgtatctatgatagattgtctctcaattttgaaggttctctctttctgactggttcatctacctacgaagatatggtttttgcaaatgggtcttcttcttcttcttcttctacttctttagcacaaggaaacagaggaaaaaatggtagtgttatctacagagcaacggtagatgacgatggagtttttagactgtactctcatcacagttatagcgtatcacataataacgtttttacgtcaaaagttcaggttgaatggtcagctttcaaggacaaatgccgagttaaaggtgtctgtggtttgaacagctactgtagtgtacaagagaagaaggtggactgttattgttaccctggattcgctttcatcaaccctatgctaagatccactggctgctaccggaaattcaccagagatggctgtaaaaacaagaaaagatgatggagaaccggcttcgtccatgattaattcctacaatgttactcctattgagaatatgttgtgggatgattctgattcatactctgacttattaatggagaaaaaggcttgcagctactcttgcctggccgactgtgactgttgggcagcgttacatacagagggtcattgccgaaaatgtaagctgccacttaagtatggtagattggatcaatctatgccagccacagctttcttgaagatggtacatttagggaactatagtttgaaaggccaggtgcccatgaattccacggatgtaactgatcaggccagaaaaagtacaatcctgatcattcttggatcaagtttgggctccatagcattcttctgctcactcttggctgtttcaggtttccttgtttataagcggagagttcatagttataacaagctcttaatggaaaattctaaattgggctttgctgaagattttgtattagaatatttttatttttggaaattattttctaattaaggaaat

SEQ ID NO: 297579 - DNA, 6359 bp, Cannabis indica
ttattgcttgtccgtgcatatgtaggtacagtactagctaggcatattatatatgtatagaatgtactattattgttttgatgaacaattatggtgaataatgagagcatatgcattcttaattgaagatagttactgggtttatatatgtgtttgtaacattttttttgtaaggtgtgtaacttgaatacatatatacattataacatttttttcttctttttttttttccctaaaaacgacataacactcttgcagttttgatatataacgacaagaacgacaataagagaggtcagatgagagatgggataatactatataattatatattatataaacacacgtattatgtaaagcatgtatataatcaaactgagaggaaaaaacaaagagggaaacaatataaacctgcgtaggatctcacaacaaagacagaactaaaatggaacaaccgtgttccacagcaaagagtgataacgtttttgctcatctttttcaactggaatttgaaagaattggattgtgattgagagaaagaagatatatcagttgtgtgaactttatatatatgagtgtatatatatatataagctatccagctttacatcttcacagtgtcgacatttttgccaaatttttaaaccatgtcgacatcctcttctcatctacttgacatatagttttgtttgtttgctgttttatttttatggcactatccaaaattgacactttttttatgggagatttgtaggttaaaagctgttgcaaaactcactaatggtactattaatagatgttaaagttcattatacaattagatcagaatacgatgctttgcgttttcaagactggtcatataaattgaagaatggaagtataaaatttggggcttggcctgaaaagcttgttaattatacagaagcttaaaataattccaaggacgtagtattattaacagacgaccaaatgaaacataatatacactagctcaactgttttttgatgagtagcaaaattaattcctcatttagacatttttttttattggaacaaacgttcattcctcatttagacatttaaaaaaataaaattttgaattgagcctccgacataaagcttattcttttattgtaacaaaactcttgttccgtgcaaacctctacttgcagataccagaaggaacttggccaatgctaagagaaataaattaagccgtgagaaccatttgttgtagagccaggagtagaagaaagccaaaccaggttggactcatatggccaactacttgggagataatctaattggacatacagagaatgcaacacagcgagctgctttcgctagcatgaagcgctcgttctctgtcaatggtctctcaatcaccttcacaatgtttgcgtcctaataccatataagggccaatgaattgaatcagaatcacaaaaatgattcattataaattgctttgtgacagtaaagaggaagactgatactcactttcttttgctgctgaacagaaggcctcacactggctatatcaccaatcacaatcacgttgttaacatttccactatcatccctctctgacggtgatgatggtgaatgccgccaattcccgttcactatgtatttgtagtaatacctgaacatcacaggaatacatgttatatcaacaactacaagtcttacaaataggaggaacaagtctgtttgatgatttcacaacatgtaatattgctctttgttaaactagattgttaaccactaccattcactttgattcagggtaataaacacaaatgtagaaactttataagcaagcactagtcggtatgcaataagttcaatcataatatcaataacgcaatataacaaattttacacttactttccttgttgaagtttaatttctacttcgaatctaggtccacctttatggtgtgctggaactggttctttccaattgccagtgaaatctccaactaaatttacttcctccccctgtcaaacaacataaaatcatgtgaatagaaacaccagccagcaggataagtcctactactaataaattatagcagttatattttgttgaggcagaaacccaaatcacctcatgcccattccacacaaatgtaacagcatgtgttgcgggtccatcatgtctgcctttttccaccatagctatgagatcccaagttgcccaagcaattgctggtctgcagcaatcatgaaggtaaataaattctcaagttatggtatccagggacaataattaagaagacatagtacaagatgaattacagtactaaatgtcagctgaacagtgagagttgagttaaaactaaaaaaaacctgtctggtttgcatgaatgcagcccgatcacaaaattataggctgcatgaagggaagtatcagtcatccagtgcaggtatgctattacacaagcgggagatcgatcaaacccagttgtacaagtaacataaacacgatgattcttttttaacaaacgtaggaggagtcctacacaaaatggtagtttctttctcatatcatacgaaatctccatccctgcaaaaaaagatgaccagaaaaatttacaaaactcataaccaactagtgagccgcaaccatacaggactttgtcatgccttccatgaataggcaacccagaaacaggggagcaattctcagcttaagaaacagagcattgtataaaattgtgtacttaccttataggatagttgatcattagaataccaaatttttggcaggactgattgatcacctttgggtccattccccaattttctgcctcaattccactttgaaaattaagcactgcagtaactccctgaaacaaatattccacatatcaactaaagggcaaaaaagagagggattagggatccaaccagccaccatttaatgaacattcaatggataggtaattatcaaaaacagtcaattgcttgcaaaaaagataaacatgaagacagttgtgaatgcatatattatttgtaactatcaaacttatttgatcttcagatggttcattagtcattcaagcagaaggtcttgctccattggtagggaaataattatgctctcaagtactcgaattgaactccttgtttgactgtacttttctacgttttcaaagtttttttttttgcctaacttttcaagagaaacactattacaataataataaaacagcttatggattagctaaaactatcctttagttagataacaagcttatttgaacaaaagatctctcccactatgtttttcaatcttaatgtggagtcactgctacaactaaaaaaaattcttctccagccagctatgggatatgaaaatatacacacaacgtttattactcacacacacacacacaaacacccacccacacacacacacaaaagaagaaaaaaactcactgctgtatttttcaatgtctctacatcagcttctgtctgaatacatgatcccacatatatctgctctgtaatctaacaaaataaccaacataacaacttagtgaaagaataagaaaaggtttgaaaacaaactgaccaatctcaatgtaaaatacattaagtagttcatataagggtagcatagtacaccttgctataccgcattccaagcgagtgattatagtacagctcgcctttagagcgatccagtgccttaatgtattcctctattgggaaacttccataagcccattcaccatctccaggttcatcttcagagaaaatacaaactagcgggctcatgggtggagacagtgtattcttctgtaattttgattgattacgtacattttcatctgtcagcgatttccatccttgtgatttaagatacttagaagagaaggttacaaacccagaatttccaccgctctctgaagatggttgcaaattggatgccaaaatgcatttgttccatgtagagataggaactttacctctgttaaatgaaatatcaagatcattcaacagaaccaattgttgaattggaaaaggtgacaatggcctctcaagaataaggctaaaagatcccgctttctccttcagcatcttcctgaagaaaccaaagactgaaaaaataaaaatgaaaaattttatgaacatgacaatcataaatcatcataacaatttgaatttttataaggttaacttaaagactctaaatatgcttactaggaacccaaacacgtttttgcatgcataccaacaatcagtacacccaatgtacgtatttttgcaagttgaaacaaaactataaccaaacaaaaataagaaaatatataacaaatatagtgacatactgggtatcaccaaagtccttgatctcgattaactttccaccagatgaatcactcgccttcttcaaggtgtcacccaccataattattctcgacctctccgcattacccttcagtagcaaaaaaaaaaaaaaagaaaaagttattattcaatcaaaagaaaaagcaccataaatttatttaaattcaacaaatttataaccaaaacagatcaaatacccctttcttaagtgcgtgaacgaagattttgccatcaacggagagcgcgaatcgaataccgagtggcttctcgagagtgaccatatattcgttcaaattcatcttgaacgaagaagaagaagaagacatagcaaaaaccctaaaaccccgaccattgaaacgacaccggagcttctctccacttccaccgaccaagttaagctgccgcccccagatcgaagaggacaagctcctccgttgtggcggaggcggtgatcgatcgaatgccagagctctgcaacaatggagttgcagagaacacattttcgctaaggtttttgagagaaattctcaaatccaatgcaattgctcactggtattgatgctattgctgttttagattttgtttattagaaaactctgagaacaagaagccacagagttggggctaagaatctttggccccacacgtgtgcctttctctgagtgggtcccactacacgggatctttcttagcgcgcttttattttcttttttaaataaaagcgccacgtttaatataaagcttttatccagtaatgtaatgccacgcaagtgaagcttcaaaagctaagggtaatcgagtaattagccatgcgattccttgtgattattgggtcatggttatggttgttgatgtggtggtatagtttgggggacaccgaaccaaatcttctgccgccagatctctatgcctatggagaatggaatgtatgagaaatatccgaaccacttgcttcacttaaacacgtgtggaatgaaattcaatgaacggtcccaaaagcttttagtaaaatggtaaaagtataattaaattatttatataaggcctaacaatatattttgtcaaatgtcacatatttgaaccttccttggttagatatgttcaatgaattctttatactaccaaattgtacttctatagatgcgatttattaataatactattctgaatgtaaaatataatttttctattacattttatttaatttattataaaataaataaataaataaataaagtacctttaccttttatttacactttttttttagagaaaattacataaatatttttttaacatatataaatataattagattggatgagtttaattggattgtgagattgacatccaacacgattcaattaaattagttactaacttttatcattcaatccaattgtaaacagatatctatttttttgtaattaaattggattggatcggttcggttcacttgaataggattaaaagtgaaagatatttaatttttatttttgttataaattatcattgactcgtttcacgatacaattgaatagaatgtgatagaaagatcacattactgtaaaaattatatttaaatgtgtattattaactaattttatattataaaaatacaatttaatagtataaaaaattttgggacaaaatactaattatttaatgttaaagtacacaaaatgtccaaaagaaataaaaaaagttttgggaatattctttttttgataacaagtttttgggaatactcaattataaattatatgagtttctaggcttttagcattaataattggatagaaaatatttagacggctttttcttttcgttatttattaaggattttcctaagttgtatttaaagtgtgacacaatttcttaagagtggggagtctagagactagaataactttttttctttttcaaatggttctagaagaactacgtttaataaattataaattaagctttggaataaattaaaaaagaaaaaaaaa

SEQ ID NO: 297580 - DNA, 4054 bp, Cannabis indica
ttttttgcatattgttgatatgatctgaatctgttatcttctttctggttgcttgagtcttgactggatcccttgtaattgctacttttcttccagaagtaacaatcccttctcatttgtccaagttttccacaatggtaacaattatttggatctttagggtcctttgccggagatcttcctcttccattatcagatcctttacttggttctttaccctggcttctaattctgtaaggctttttgtatttgttctttcctttattgtaattcaattcagcatttgaggagcttattctttcattcttcattttaagatccttagatttgagaggtgaaatcacctcttctaaggtgattgatgttctatcatatttgatagcagtcttgacttccttgcaagattttggaaaggaactcaagataataatggcctaattttcatcactcaaggcttcattttctcctaagttttcaagtttaacatgcatcctcaagaactcatcaagattctaatctaggaatttatagtgactcatcttgaactcaaatatcctttccttcaaatagatcttattggtgagtgatttctattgaaattgatcttctaatttcttccatattttagctggtgtttcttccttctctaccaatcgaataattgaatctgaaaggttgaagataatgattctgtggctatatctaagatttcttctttcaaaatcttggtaagatcttgtggccactcgattggatcttcaagcactctcaatagcttctgttgtgcaagaagagatctaatgtttcttctccattccatcaaacctatcaacatcaatctttatattactcatgttaacaaaatcaaaataagtcagagttttaagttgagagtattctattggatcattcaaatgaacatccattaaatcttcaatgtcatgaacttcctgctgaggatcaattttcttcagcctttgcttgattcttgatcactttcttgagttgaatctttaaccaatatttggttgataccactgttgggatttatagactcaatccctacaccaactcaacatacacattagatcatcaaggtccaaaccaaccatagtattcaatcaaacaattcacaatcatgacataacaaattgtatacatttcacattcaaattataatcattgaacacaaactgaattaaacaatcttggaggattcaatttgcacacaaaaccagtaggattaggaattcaaacataagtaattatagaaaacataaagaaagataatgtaagaaagaagaagagaacaaacaaaagattttcccaaggttcacctaaataataggattacatgcccgttgagctcgcgatagaactagttttccctcgtactataatcaatctcaaattacaacaatgttgtggaaattccaagtcacacactgacttgtaatttcaatatcacgctctttctctctcaatctttcttttacaaagtatttttcctcttaactctcttatgtttctctcatttgagaatccttatctctctagctctcttcgagctcaatcttgctcaggctgtgatctcttaatctgaaaggagagactttgctatatatagcagtcttggtagttgaggggtctgttatgtttgttataatagttttaagttgcctccagatgcaactaactgtaagtgagatgagtctagttatgttcacgtaaactgtaatcttgtaagggaatttaattccattaaccatgtcacagagacaagactaatcgcaatagaaaaaaatgaatcacaatagcaaaacacaatcccgactaagctgcacttatacccagggaacactgacgggccagaccgaagaaaaaagataacctcctgtagctataaatttaagaacatactcttatcatatataattaatattaactacaaaataaattattttctttcttaactatacgtaatattttctcgatatggattggagtaagttagataaagtggaaaaaatactaattatagataaaatatggaaatgtcattttatattataagataattatatataaattattattatgttttttaataaaatagtttgtatcgaagatataatattgtttaatgataggatattgacagttaaaatacttaagattttacaattcaagcgcttaattatacctttttacgataacaattatgattcaaatacttttaatttttctttcttgtgggaaatttcaattattgtgtaaaatcaaactaacttaaaatgaatcaccacacaattagtgatgacaaaaataaaccaaacacaatttaagaattgaaagaataacaaagcagaacagagacgataaaactagaaataaatcgtgaaaataacactaagaattatactagttcaagtctgatagatcaatgtgatctatagctctaatccagttttggagctccaccgaaacttcctttattgattggacaagaacacaggtacaaatagttgagaacgataatctgtttggattctctcaaagtgttttctctctaacactcttcatgagaagtttcttcatctacaaaagctttccttttacaaaatccaatcctctcttttctctgtacctctctattaaaactctgtctcaaagaacttgcgtactctacttctggtgtttcctcatcgttatctcaaatgaagaggatggttgtatttatagatcgaggatatgaattctaaaggtggtgtcatcaaacaactaagaagttaattcggttaagacttatctgtctccttacaatgagatctccaagtcagctctgggcatcaagctctctccggacatgtatcacgcttcctagacggacatcccaaactgttgaagcgcattctggaaggacgttccagatactatctgaaaccccttcctggaaggaatagctagccttccgaaacttcttttcagaggacgactagctttcctaaaccacatcctagagaaactacaagatccacgagacttctttccagatggataagttagccttccaaaactccttttcggccgactagctttccacaagactgctttcgaaactccttttcgaacgacgtataactttcttgaagactcgacttgagacattttcatttggaggaactatactacatttctcatagtaaaaatactaaagttgcaacaattcaagctcttagttggataaaggacaaaggatagctgactgtacttcttgaaacaaattgtttaatggtagttgaagtcattcgtagtcatttaatgctaaccatttcttttattgtagttgctaatgatagtagacaattgattatctgtatgagcgaagtatctttagtgtttgtttatcgttttgctaacattgtagctcattgctagagcttcttgttcttttctcgatttaatttttagcgggagtactgttctcgctaagtttatctctatattgttaaatgatttatcttcttaatgaatttcttttccttttaaaaaaatacctaatccatttcttttacaataaaaaaaaatacttggtagcaacaatttgacaacttgttactttatgtatttttgagatttagatacacacacttgtataacaaaaaacgaaattcaaacaatctatctcgcatgcttataaaataaaatatcctctcagtgtaacaaatctttttcacaatattttcaactcaataatttcaaatatttataatatacaccaatatatatatataggaagaatcatcaattacacttattttgaaaaggtgcatatagtaaaatttgagggtaattttcatatctttattatttgtatgtttttattatatatataataggaataaagattagaagagcttgtttgcgtgttcaccaaatattaaaaaaaagacaaggtagaagatccggatgattgttgagcaaatctgtgggatcttactttccaaactgtcaatatttggtatcctatcttcattctcatcatgtctcctct

SEQ ID NO: 297581 - DNA, 4154 bp, Cannabis indica
taaaatttggttatactattactattgtagccgagcttttctgattttattaggtttatagagttaagaagttaaagaaaaatattctagagttaaaaagtatctaatttttctgactaaaagaaaaagaagtatctgattttgttgaccacactacattttgtatcctatcaggctacaccaatacaccaccctacctattctaattgataattaaataagtgtctttcatgctaccataacttatttaaataagtgtcttctagcaaaaatttatataaaaatgagagaaatttacaaaaatatggaaaaaaaaaattaatttatactttttagacataaaacttatcgttcaaaatataataatttaaaagttttttcatttaaaaaataaaataaaattcttaacaaaataccatatataaataagttaacaaaatttctaaaaaataatttattgtcggaacagttatcattaccgcagaatttattatcgaatctgaaaaatctcaaaagttatcatcattatcaaaaaagtaattaaaaagtcgccagagttgtcattctcataaaaaaaatgatcgtaactaaatttagaagtcaagagtcggaaaagatggttacgtttatcaattagctattaatcgtatattttttgtcaaaaaaacagaaaaacaactactcggttttttgtaaaatagaaaaaaagtttaaatccataaaaatattaaaacattctatatttttgtaaactttttgttatttttgaatatttattaaaacatctttctttcttttttgtgtgttctttcttttttttcgatattgaaaaagagaatttgattttaaagtgtgaaactactaatttacttttatgactactttttaactcatttttattgctagtagtaacgagagaaatcttaagatgaataaaaaatatttagtcaaaaacaaatttcccatgatattctccctttattttttccattttcatcgtcttttcttgttttaatttatatttcttcatgaaagatgtctcatacctctgcaactatgtccatctttatgcagcaaataaatacggtttcatatatcacatttattagatatagatatgggtgccatttagttttgtttatataagttataaaacaattttttttttttaaaaaaaaaaatgatttttgagaatctagttttagagttagagtgaattacataatttttactttactcacaaaaaaaatatttttcatcaatatccaaattaaaaaattgatttatcatagctacaagtgaaggaagtttagctcaacgaaagtaaattaaagattaaatagttgatgtgttgcaacttaaaagttgaatgattgaacgttaacaaataataaagttataggggaaggaattatggctatgaacttgcaaatttctgggagatagagaagttgttgtattactggactgtatccgatatagcttgatagaaacaataaatataagcacattgcataccaaaaataatcaagttctcttcttcgccacttttgcagattgttcttcagaaaataacgtatcgaaagagtcttcttaagttcacaatttgcactcatcttcaactatataaattacaaatatacagggtgtatacagtattgcagtaattttagtattgtttcgttgagaccaagaatctaggttattttacagggcatacagcctatgttgctggcgctttgcctagttgagacaacaaatggaagaagatattgacatttaacaagtcaataccagcccataaagctaacagctaagaaccaaccatggcacaggcacggttttaccaaaattttcattcactttaagcatcactaagtactctcagacgatgatgaggatgaattttcaaaaaacgttggttttggggttgatgggcagccaagagattggattatatcctgcacaccaagaaccttgaactttggaggtgagttcaaagcaatgttatgaacacgatgctcgaaaatcttcccttccttgtcaagcttgtaagccgaggttccatcaaatcgaccacgactctcccacggaactcgtggaataccatgaacagtccagcgaaccattataacattctccatgggctgccacacactgctaatgtcaacccacaaggccttaaaaaacattttcccatgaaatcgcagtgcccagaagataaacttatagttctcaatgcccataaaagtattgagaggatctttaaacacaatatcatccctaaacaaaaatcaatgcaaaaaataggacaacagtcaacaaaataaattaaatattcaggatttcctagaagaaaaataaacatatgccacaaagatttaagtagatgtcattctcttgcttggaaaattgaatgccacccatgacaaccctaccaccaccttaaataacaaaagaaccatattggtccaagccagaggtaaataatttctatgacttgttaaactcatgatataaaaagtcatcatcatactgtccacaaactctgaggccctgccatttaattttgatctaaacacccatagcattgctaggtgtcaaagaggcatgccaaacaaaatgatacagcttatgtaaacttatatggagagagttatatgttcaatatgtgtatgcatcatatatgacagtgctgaatataggaagatagatgatcaaggcaggtgctattcagctacaatgctgtaatccaagttaacataagtcacactcctaaaacaacaagatagaaattaataaggatatgcactgcactgcactactattctgagaaatgtcacttgagcctccatatggaaaaggacatagtaaccaaaagtaatgtcattggcattccaattcttaagccaccatttctctactttactgcatcactcaattcattttgaagaatgttgcaacttattttatactttcttagcaaccaaacagaacataaagccaaattcatcaaaatgaatctataaattgcttaccaagaactccaagaaaataaaagtaattcgatgagtgcattttttatctacaacatctttatcacaacacaaaaagcaaaactttaggaaaaagaagatacctgtatatatcgaagctgagctccctatagaaaagctcagggaattcctctctgatcgtgcggatagcatagcccatattcacatagtacttctgcttctcttcttcttccttgctcggcttcgaaccttgcttgacaggagccgaaaactgtccgtacagacttacattctgattgcgttccgaaaccctaacctcaaactccctgactttggcacacactgtgatcctagacacgaacctcttactggtcgtcaagattttcgagcctttgaactttgtagggatagggttggggtagctgaaaaccctagaaatttctggcgaagggacgagaagggccataagaaaattgggattttcagtgagcaagtgccattttttttttctctctctcgaaactggaatggaatgctgtgattttcgtggggcgagcgagaagaggaagacggcaatagagaaatctgtttggataatatcaagttacgatttggataatcgaaattataagtaattataatatagaaaataaaattaaatgattggctaggcggtcaatacacggaaggaagatatatattcaaataaatatcaattgtgtaaggaaaagtatctagacaaaacgggcacacccacacgaattacaacacgaattttacgaattaaaatcgagaaatttaaacacgggtcgaaaatagatcgacatgatttgatacaaaataaaaaaaaaaaaattaaaatattttaaatttaatacgaatttgacatgttaatgttaagttaaaaaattttaaatttaaattttttaacatgaaattataaatattttaaactttttaatttttattatatatataataaattatatcatatacaaatatatataaattttctaacgaaatctaaatttataattttctttataactccagcattaataatagcaaaacagatcacagtaagtcaacccgagcacgatacgattttttacgggttgagttagggttgagaaaatt

SEQ ID NO: 297582 - DNA, 2910 bp, Cannabis indica
tgtttcaacaaatactacttttcaacaaactttcttactaatttaagtaccttccatgattctaattatgaagatgcacatgttcatctcaaaaaaattcagatattaattgggccacttatactgacacccaccaatctgtcactggctattgcgtcttccttggacaatctctcatatcttggaagtcaaattcttcgttaaagttgagtatagccacaatggctaatgtcacatgcaaaatcacttgccttttagcgctagtccaggattttggcattgttcataccagcccatctgtcctctactatgacaatacaacgaccactcacatttccaaaaatctcatcttccacaagcaaccatccacatttggaaaaatctcggtcttccacatccacaaatgaaacatattgaaattgactttcatattgttcttgagaagcttaaaaagaaggatatctgaaacttcatgtctccactaaaaccaacattgcaaacttactaatcccctttttcccaatcaatttaaaactcttgtatccaagatgaatgtttatagttgtattctgggtacattatgtttagaatattgtattctgtttttaggtctttgcaacttgctgggttgatttccttggtatttatattgggcaggtcctctttgatttatttgtataaatactttcttttgacaaattaataaagttaatcagagtttatactcttttctaaatcccatcgtatgtatcagtttgtatccttccaaaacataaaggagcaaatgcattctgccaatcatggaaagagataatcatcgaaaacattctaaacaatatgttttatagtcactaatataagaccaaagaagtcagaccaagatgtgtaacataaactaaacaacaaaaaatcaacttgtttgtttgttttaacataaactacgcatttgggtgatctggtaagcgcttcagatccatttcaacttggtggattgtccattgcatggtttccaagtcctgcaaagattatattagtagctattaaacaatttactaaccagagtgattaaaatgcgagctgctgacatacctttacaatttcacggtactgttttgcaattgaatcaaagtgaggatcaacaccttggtactcacgaagacgcgtaacctggtgacgaaatttcataatggtttataaagtcgagggaaaagaaattgaaatgtcaatgctactgctaatgcatgtctaataaagtcgagtgaatgcaatcaaaaaggagtttttgctgaccctgatggcataaatgatatctttaattgaaatataatgttggaataatcaagtcagtaaatgatttagcactgacgtagtaatctgtcacatcaaatataccctataagtcacctaggacaggctgacggaagtcccaacaataacaagaatagttcgggagaatttttaacaagaaaaatgtaggggacaagatttgatagtggtaatagttcgcgagggatcctatttattcttgattttactattacagattgaacgagaaattctgttatgttctaccataacaccttcatcccacattttattgaacatattttcttttgaaaaattagattttgcttggaggacagtagagtttggttgatagtagtgaaatgattttgtgaaagtcagcctttcaaaagcttactatgaattaagtcttttcagaattatacaatagacaaaactttatggaagagctgtgtttcaagtaaggagaaatattttgtttggatgctgtcttaaaatcgcattaatgtcaacgtgcaaaagaaaagaccctgccacttatctccagaatattgtgttgtaaatcacatggagagtctggtaattgaatttttccctactgtaaattctctttgaatttatggcacaaaagtatcgaatgaactcttgtgggatggagcataactcttattgcatagttttttcaactatgtagttaataaatcaattgttcagatcatatttgatttctttttagctaaataattgttaaatgcttcagagtttaaatgtttacattgtgttttagaatttttgtttttaggtcatctgaagtggtgaagattttaaaaattttgaagctgttttatgagaagttgaagatggacatcaatttgacttaaagggggcgtttggtataaggttcacacttgatgggaatagaaatgtcaaactaaattaaattttaataacaaggagttggtgtttccaagtggtcctactttttaaatttaaatggtggtaatgttaatcccctccaacacttgggtttcaaattcccttcaaatctactccttccaactctattctttccaactcaaactcacataataaacaccccattaggtggcgtttagttgaaaatgaataaaaacataactagaatatgaatggcattccaatactttaaaataaaaccaaacaaataaatggaatagaaaatgtttcctttctatttcattacctcaaatcaaatgccacctaaaagagttgatttcgcggtggggtgggctttgtggaataagagattttttatgacaaaaaagataccagctagtttttatggaataagatcaggcaatgggttgcagtataagggtttcatttccgatcttatcaagatttccttgtattgtcaaagtgaccctcattattattattattattattattattagccgcggtaaaaccacctaaatttaatattttttaatacttaacctcgaaaattaattttttgacggcaaaagctaccaaactcatattctgttttgctctttacacttccgttcaaaactctcagttaagtaccacagtggactgtctacgtgtatacaagagtacacg

SEQ ID NO: 297583 - DNA, 2520 bp, Cannabis indica
ttacttgcatttggagaagtgctatgttctttccagagaattggttaaagtaaagctcaggttggatgcatggagaatgcatcggaagggaccgacttcttgactgggactctttatagacaattgaatcattctttcatatgccggattcccaaaggaagtaacgcggttcacttcaacaaatttcgaccaataagtttgtgtaactttgggtataagattatttccgggattctcacaaatagacttaaaagggtggtagacagattggtttttccgtatcaatcggcgttcatacctgggcgttggattgccgaatgctcttgtatggcacaagaggttcttcatactatgagaaacaaaaagggaaagaaggggaccctagccattaaaacggatatgaacaaggcctacgatcgtctagagtggggatttcttctcagagtattacaggcgaatggtttcaaccctcaagtgtgccagctgctgatgcaatgtgtgtctacggtttcgtactctattcttcttaatggtgctccgttggctcccttaaatcctaaaagaggtctccgtcaaggcgatcccctctcgcccttcctctttattttctgcagtgaggtactctctaaactaattctcaaagaggaacgagttggaaatattgcaggcattagagtggctaggaatgcaaaccccatttctcatcttttttatgctgatgatgcaatgttcttctgtcatgctacgaggaaagacaccagtaacattttgagttgtatccagaaatatgagacatggtctagacagcgtgttaacaaagcaaaaagtgggttaattttctctcctaatacatcttcctgctgccgcaatgagattaaagctatgttgggaatggattgcttgagaaataatgaaaaatatttgggcaatcctttcttttacactgctaggaaaagagaggattattttgtcctcaaggagaaaatgttgggaagattggagggatggaaagcccgtcatttgtcccaggcgggtagaacagttctggttcagtctgtacttcagagtataccaaactattttatgtctactgttcaaattcctaagtctctttgcacggagttggacagagtgattgctaaattttggtggattggaaatgttgacaaaacacattattgtgctttgaagagttggggagatatttgccaaccaaaacgctgtggtgggctgggttttaggcgatttgcagacatgaatatggctctcctagccaagcttttctggatgatcctgcagcagaaggagaaatattgggttaagatgttcttggataagtactttcgtactacttcagcgtggacagtggataagaaaggtgaagattcgcgtgggtggaaaagtttgctggcggcaagagacatctggctccaaggggttggcattggaattgttgatggggagtgtgagatgtgggatagacagtggattccacatagaaagccttcagagattaaggataaatttcagtttgtcaacaatcaggccctttggaaaatcaacgacttgtttattgaaggcactcgtagctggattgaagagttgattaaaaagtgtttcgcggatgaggttgcaagggatatactcagaattaaaccaatacaggaaggctaggatattgtgttctggaatgttgcaaaatcgggtgaattttttgtcaaaagtgcctattggattctcaatcagcaatgtttttctccttcgaatgacatgtgggttcgattctggaaatttagaatgcaccctcgtcttaggttcttctgctggaaagttttatcagatatcctccctaccaaagcccggctaggtttcatacaggatgggaagtgtgttttttgtaatgaggacaaggaaacggccttccatctgttttgccagtgtccatttacccgtgctctttggtttatgaatcgttggggaatcagggtggataatctcgattggcagagcttatcggattttggattgtggtggacaagggttgaagatgaagagttgacgatgtttatagcgtgcatgtgtgaagccatctggtatgcgagaaatgcatacatttttaaaggtactccctgggatgttattcaggtttggaggaatatactggcaagaatagcggcttttagcaggtgtgaaatggacaatggacattttgaaatggctactccaccagatttaacaaggtttaaagctccaaataggcctggtttctggtattgtcgagttgatgcttctatggttaagggggaagccggggttgcgatggttaacttgaatcatgagaaccttggagaatcgtggatagcggtggacaatggtatagcttcaggggttctggagggggagttgttgggaattactttggctctgcagatggcgcgcgacaaggaaatgacaaaggtgcagattgaaacggactctatgacagctgttgaccgagattttcggcaactattaaaatat

SEQ ID NO: 297584 - DNA, 6308 bp, Cannabis indica
ttgttgggttaaaatagtcctaaacaaaagagactaaattagagtatgagaaaactttgtccaatgtcataaagtttgaaaaatgcaccaaacatgggtgtggactaaattatccaatctcacatagcttgttgggttcttttgcgttctccctttggagtggtgatttagaatttgaagtgtaaggagttgcttgattctttaaaatctgttcaaattcaatttgttaactgttctgctaacaaggctggacattatatggctcgtagctcttgttttcattcagttcgtatattcaccacaagtaatgctccagtggatcttttgaatattgtaatggttgatgcaatttggtaataaaatgtcaccattttatctcaaaaaaaaatgttccctttataaaaaattaattaggacaaatcttgaggtagtatttatcatagcatataataaactagcgagttaaaattgtaacaatttgatctatacaactatagaagagtaataaaatttatgcataatgcaagatcaatatataagttgccaagaaaagttttgttatgagtcttcagtctatcatattttttatgagtcactacaacacaattttttttttgaaactttatgtgccaatgttttaaaatatatttatattgaaaaaaaaaagaaatttcttaattactaaataaattataaagtaggtcttgtacgtcttttgacatgttggtgtatgtttttctcaagtttctagattgatttgtgtcttgtgttttttctatggctttgagtagtcactctacgtttgatttgaatgagcaatatgctcagataagtttggaggatgaggaagggggaattctgattggaggggattatgaggataaagaaacgttatttgatgataggtggtgtttggtgggaaagtttcttacgggtagggctttggattttgatgcaatgaggcatttgatggccttgttatggcagccgagaaagggtgtgtttatcaaagaattggataccaataaatatctattccaattttaccacgaattggatgtccaagccgttatatatgggagtccatggacattcaataagtggcctcttgtctttcaccgactgaagaaggggaaagacccgaaggttgttccgctacataaacttgatttttgggttcagattcatgatctgaaaactgggttcatgttggagcgtgtggtgcgaagtgctggggattttattggtaaatttgtgaaatctaaccctaagaattttaatggcatttggcgagatacctatgtgttcgcactacgatcgatattgagaagccgctgaagcataggatgaaactttgcaaggaaaatggagattggatttgggcaaattttaaatatgaacatcttccaaccttttgttttgtgtgtggaataatcggacattcggaaagattttgtccaagacgttttgatcaacctgtagaacaattggctaagccatatggggttggaatgcgcgctcagatgaagaagaaaaattacttacttggtgcccaatggcttcagacaaggaatgaagatggaggagccgtcgctggtggtggagtggttcgatcgtctggtgccggaggtggagctactgttacgcctaaaattatggatattgattgtgttgaccatggtgttgatcatgatccaagaattgtaggaaaaaaataagaaagagttaattatggaaggaagagggggtagtcgacaggctgatgggggtggtaatagccaaatcatagcacatgatgaagaatacattaatgaggaggatttgcttatagttttagatagcaaaaggaggcgtacgggagggatgaagtaattaatggtggggatgtgaaactgtctaagttggatactggtgttgatggtaatgttgggtcaaaaaacgagtcataggtgggccttggttctcaggcccacccatcattatgagcattatatcctggaattgccatgggcttgggagcccatgggctcaaaaattcttaaaggaccttgtggtccaaaagaagtccagttacttatttttgtgtgaaactttagctagaaaggaggctattgaacgactgcatgtggcaatcgggttcgatggtgctcttgcgattgatgctcagggaacgagtagggggtggcttttctatggaaggttgaagaggatgttaaagtgttggagtatggggtgtcttatattgatgtagtgatttgtggaagtgaccaagggcattggcgtttgacagacctttatggtgagccgaatagaaacttacggaagagaacttgggatttaattcaggagctgaagtgcaagtcaagtttgtcgtggtgcatcattggtgacctcaataatgttacttcacaagaagataagaaaggtggtaatccctatccgagatggttagttgatggctttaatgatactttggctgaatgtggattacatgatcttgacttgtatggctatccttatacttgggagcgtagtcgaggcacgacggattgggtagaggttcgaattgatcgagcattggtgaaccaatcttggttagacttctttcctttagccaagctttataatttagaagtttctacttctgatcatactccgcttcaattggttacggttaatcaattctttcggtttgaaaactcatggctaaaagagccattatttttcgaaatagttgagagctgctggaacttgggtgattcgaatggtattattgaaaaaattaagcattgtggagatgtgcttttgagatgggaaaaagattattctgggatttttcctaaaagaattaaagatcgtaagtttgaggttaaaaatatggaagagagaccgtgatggggtttctatcgagaatcataaaattgcttttgctaatttaaacaaagtgttactgcagcgagagatcttttggaagcagaggagtaagcaaatttgattgcgtgaaggggatattaattcaaagtacttccacgttgttgcaactgctaggagaagaagaaacgcgatgcaaagattaaaagatcctgttggtgtttgtgtcgatttgcaagggaggttgccttcggttattgtggattatttttctaggcttttttcttcttcagccgtggttgataatgatgttttagagtgtgttcctgctgctataacgaatgtccacaatagcaggttgctggagctagttttagatgatgaggttagacgagctctctttcaaatgcacctggataaatcttcgagagctgatggtatgacatcgggattttatcaaaaatgctggagcaccgtaggtaatgatattattaaccttgttaagaatttctttgtggttggttcttttccaagggagttaaatcataccaatatagtgcttattcaaaagaagaaacaaccagaatctatgactgatcttcgtcctatctccttatgtaatgtgctttataaaataattttgaaggttttggcgaatagatttaaagaagttttgccggttgtaatctcggataatcaaagtgcttttcttccggggcggttaatttttgacaatattatggttgcttttgaaatcatgcattatttaaagaggaagagagttggtaaggtggggtatatggctgttaaacttgacataagtaaagcttatgatcacgttgaatggatctttattgaaatatgttgcttcatatgggtttcaatcaacattgggtgcaactgataatgttttgtgtgactatgattacttacaatgtcactcatggaggtcattcaatggggcctatcactccgggtagaggattgcgataaggagatccgctatctccttatttgttcttgatatgtgcggagggtcttttgttgttgttaaaacattatgaaagacatcattggttgaatggatgccgtgttgctagaagtgctcctatggtctctcatatactttttgcgaatgatagttatgtgttttgtaaggccaatgagaatgaagctcagaatgtgcttcgacttttgcatagttatgaacttgcttcgggtcaacatgtaaattttgctcagtcttctgtcttttttagttagaatattaccatggctgtgcgtgatcgtgtttgtggacttatggggctgaatgaggcttcggatgatagcttttacttaggactcccatgcgtaatggggagaaataaaaaatgcaattttcggcttctagaaggggaaaatgaggaaaaaaaattttagttgggagactaagtttttgtctaaagcacgaaaagaaatcttgattaagtcggttgcacacgcattacctagctatgcaatgagtgtttttctcttaactcaagaattttgttctagccttgaaggtatgatggcgaggttcttgtggaaatcccaatcgaattcaacaagtaagggagtgagttgggttagttagaagcgactttgtcaacataagaattttgatggcctcggctttcgtgacctttgtgactacatctctcttttttgggtaaacaagggtggagattgcttactatcgaggacacacttgtggggaaaatttacaaagcaagatattatctgcaaggttcttttcttaatgccagttaggacaaaatccaagtttcatttggaggagtatttgggcagctcaaactcttgttaaaaatggtgctagaagatctattactaatggctcttcgattagtattctgaatgatccctgcttgccccatgataataatccttttgttttgactaataatcctagccttgttaatcaacatgtttctagtttgctggtggttggggaaaagtcttgggatattaagcttctaaatgatatatttaaggagagggatattagtttgattaaaagcattcaacttagtcattctcgggatgttgatggctggtgttgcaacatggagacttcaggattttacttggttaaaagtgcatataaatttcttcaatcttcaagaggaaattggttatatatgcaagatgataattgctggaagaaattatggcagcttcccattccgcctaaggtgcatcatttcttatggaaagcttgttcaggatgccttccaactaaggtacaactccaatctaaacatgttaatgttgatctcttgtgtcctttgtgtaatatagatgttgagacaatatatcatgtgcttttggactgccctttctctcgttcctgcttgtctatttctgctatcacacagccggctgctggtgtggaggccgaatttggcatctggttttttgatctttttgaaggcttccgtgaggatgtggtgattgatgttgccatggttagttagagcatatggaaaacccgaaaggaagtgcaatggcagaagaaatctcggtcagttttggaggtggttaagtcggcaagacatgtccttggccaatgaaaaattgctaagtttgagtcgcctactgctttatttgctataggtgacatttcaagcagtaattattgacataaaccagatacttttacggtcaaggtaaatgtcgatggtgctacttttgaagctcaacaaaaatttgggttcggttgtgttgcttgtaacagtcagggtaagctccttgaagctatttcagagagtaggtggggctgtgttcttcctgaagtagctgaggtcattggcatcaaggaggctttgatttggataaagcgcaaaggattggataaggtggttgttgaatctgacgctttagttgtggttcaagcaattaatagctcaattcatatgccatctcaatttgtgttattggtggaggattgtcgtcttaccttatataatttgaataatgtccttgtttcttttgttaatcgatatgcaaatagggttgtccattgtgttgctagggagtcctatttctcgtcaggttgtacgtataatgatctaaatgctccgtcttttttgtgcgacattattaaggctgaggccaattaattttagtgaaatcatcctttattcaaatatatatatatttaatatagataattgatgtgataaaatttaattaataatttttaaaatctattagttaagctgcaattactttatctgaacttaattgtagaataaaaaattgaattcatgtattatatgttatttgggttatttatcaagtaaattagaatactaaagtggcgtttggttaggaggaatgaaaatataggaataggaatgagaatgagaattggaataggaatagaatggaat

SEQ ID NO: 297585 - DNA, 4377 bp, Cannabis indica
tagttttagtcacaacaagtattgtgactaaaaatacatttattcacaacaatttgtgatttttgtgactaatacctttagccctagactttttagtcacaacataggaattttgatttataattagtgacaactaaaggccccagcaatagtagatgccttagccctatccgtggcccaaattttctaagagtcttggagtgcctcctctaaatcttctcgacatccaagataatctccaacaaagttttcttttacttccactcaccagattcgtctttcagatcctttatctcaatatctttggcattgatctcaatctacttagcattaatatcctgggtcataactagaacttgaccgtcaaagagctcgacatgagtcatggcctcatttgctttattatttgttgtggtcaagtaagcctcgagcttttgaatctgatctttaaaagaggcactggccttaagtgctgaagcttttccttagccttctggtcaaccaagatatacatctcttcattcttaaagtttaagttcctattctcgatcctaagcttatacatctccaccaatgcagtatgggcagagtcacaagccttttcagcaagaatggtcatctagcgcaccaaaagaaaatgaaagaaagggttagaacatgttggtaaaaagttaaagtggcagtagaaattaactattttaaagcaagtttaatcccaggggcttgttatttggcggcatgtgccaacaaggcaaggcctgtgctggacgccacgatccatttcttgaaagtcaactcatagatgctgacagcagataagttaattatttcagcaataaaatgggcaatgtcacttctgacccttggcgcgagatatttggacaaggtttggcagtccacgactggatcaaaaaattttcctttacccctgtcagcaatcttagccttcctctgggtgtgcaagacattggctttcttcttagcagcaagctactcctcgtcgatgcacttctagatccagttggtgactcttttagctttccttttaacttcggctagaagtggagtgtagaagcaaatgggctaggtaaggttaatggtcagaagtgaaagaagaattatggaaagttgttgctatctttttccaaaaggtgagggtttcaagattacttgtaaagtttgaacctcacctctgacagccaaaagggcttcctacccatccccacctatgtactggtcattagtattttgaacttaggtaggcttagaagattctcctctctgtgccctcttcgcctccttttcctcaattagaagaggattagatggatttagtgatgcaagggccttctctgggaaaataatgccatcctcgttatcttcaagtgaaatggcgtccaccgagaccctcttggcaggtgtagacctagtaaggtgtatcgcttagagtagttgaatgaccaaagagcctccagaagtagactctttctgtttatccaaaagataaggggcattttctagaagaattaggctctttgatttggccttggctttccctttgcctttgctttgggctaagaattgggatatgtcctggttccaactttcggacacacccttatccatttttcccaagatgttgtctagaagtgccatttggagtgtttgtgcatattctacaaaataataataataataaaaaaaaaacagagacaaatcaataaggagttagaaacatatacaagtagttgatcaagacaactttaagatactcaaagctagagacaaagttcaagtctataggaaacctgttatattttaggtttccctgtgcaaacattgttatgtcctctttgttcagaaaactaccgttttcctcaaaacttggacaatacataagtagaaaaggatctactctatgaaagtgaaatggatgcacaaaatgttctggactcctaacaatctcatctaccctattaaggtattcgtttgttggatacctacaagggtctacacttaggaagtaatcatcgaatcctccatggtcgaggtgaggaatctcattagaatgtgttgcataaaagaaaaaaaatggttttttacttcttctagatgtactggcacctagagtgccctggttcttggccacagccacgaaaaactatgctatttcaatctctttgctgagtggtgtagggtagaattgttcccaactaggcatcaaggtactatctaactagaccgccttcttcattacagaagtccagcgaattcctcatgaacagctgggggtttcatgaccatggtttcaattgctataaggcgtaatactttggttcttagcaataagttcaacactacggaggttctttgtgttaaccaaatcctccaccttttggaatgtcttaagcaatcttcttgtacagcatttcctttaatatgaacaatagagaaatttttttctcagtgttgactccaaaaccagtgtcatcccattagaaaaaccaagttggtacacaagaaattgagtgaaaaagacttgaagtctaaaattcttaccaggagtggagaagtccagagacaatgttgggacactccccaacgggaatccagaagtaaaaatccagtagtcccaaaagtcatggacgttagtgaaactgatcagataagatgactgggctaaatgtttttctagtttctataaccaaatcctagttttgtttttccttatttgctacgatctaactagaaatagagaatttcttttcagcttggaatctccagcttccataatttacagaggatgtaccattcgacaagaagtttatatgagtgagggttgagttggaagggcgccaatcctatatacgcgcacaaattagtaaagtagctccgcgaaggtaggtgggctccacaaataatatgcgcccaactccatgctccaaatccatctatgcacttaattgcagattcgcccactagggagagcctgttccaacatagccctggaacgttggttatgcctcaaaacttgtcataattttggcgcatctccatgttttggaattttttttaatttggtccatctgccaagggtgatgaattgtacatcatgggaatgaatatcttcttgcttttcctccttttggaatctccaaaagttgttgactctacgcctagaggagcttctagatctttcacctcttcttcaagaggagcttcgaaagctctagtttttcctcctacaacaggttctcagagttcagcctgagcatcttcttaatatgatctatagccttgaggtcaaagtcactgcctgacatctttacaacttaaggaaaagttaagtctaagcagtcaataccctaaactcaaaaaaaatggcatgggtattgggaaggcatcccctttgaatttcttggataggtccccatcacccttgatacctagagacacagcttggtcctcacagaagttgcatctttggacaactagtcgagcacaaagtgtaaagaccgcttagtttaatttggaaattagcagttaattaagaatttattatgaaaattatttatagatatttaaataattatttatgatgttatatttgaattctaaatgcatttttatgtcaaatagtgaaatttcataattttgcattttcggtgcccgacaacatggagcgcagtgtatggctcagtagaatcacaatttagtattttagtatattagggcagtttatttagacattgggaatgtcggaattggtcgggaatttagaaattcccaagaatacccttaagtgctttttaacccttttagtgtgggaggagcaaaatggtcattttgccccataatcttttgtcctttagtggacttagtagtaggtgattatttggtttaatatttgttgtgttggctgaaatgagtaaatgaaactatttttattttcattttacaaaattggaaaaaaaatcaagaaaagcaaaaatccttttttgctctcaaagtctctctatttcggcccctctttgagcagcaagaatcttggtatttctttggtatttcaagcagattttgagtacaattcaagctctaggtatagctcttactctttccctctttagtttcttcaaaatcaagtaagaaaatggttgcatgcttagtttttgatgttgtgcttgctgctatgtgttgttgttgttttcagaagttttgatgggtttatttgagtgaattcatgctagttttgttgttagttcttgggttttagccttgtgtagagattttaaactcaaaactatgatttttatggtaaaatgaggaattggttgttgtgattgttaattgtacttgggtttggtttctggggttata

SEQ ID NO: 297586 - DNA, 2814 bp, Cannabis indica
agcataaagacaaaagcatatgtatgaatgatttttcattgtgcattttgattgatctaatgggcacatgtacacatgttctatatatatatatatatattttatatatttttggatgatttttcattatgattatctcatttcattgacattttgcaagtcttgaatgtaatatttttgattgatatataattatattaatgggtaacatgttctatatattctctttgtgcaacttttcatgtgtatcaattcaaaccaggtatgaatatcctttaatttagaaaaactattcaaatccattgaactttagatccctattaagggagggataagatagatagataccaaataattttaatgggatagaagaagtttgagtgtcctagtagtgaagtactctttaaagaaagaagagcatgatgatgacttggcttaattaagttgtagtagttggccatatatataggataaaagtgaattcattcattcattcatttaactcaccatcctaacttgttggtacttgcatgcatattgaaaaaagttgaatgagagtgaaagagagagctatagtgggagaaattattattgccctccaacaaggaggccatgtcatcatcatcatcaagtcataataaaaaaacataatgacaagccttattttgtcttccaacttgtcactctttctttttctttctttcttttgagcctttgttagtaggcacaacaccatcataaaattaatgattttttataataattattaaattaaaatttgtgatgttcaatatagatatgtttttttttggattggggtgagattcaatacttaattatactgataattgcatgacaactcgtagtattgaacattactaatgtcttctaacatttttcttcatttctttgttctttttttaaaatttgtactatggtttattaggcttatgacaacttaatgatgaaattccaagtcttggttttttgttggtcttaatttttgtgatgctacaatgaatatgatctctcccggccctcacaacacttgggctatggtcatgatttgcagtagcaaaagattgaattttggtgtttgcaatttttggacaaagttttgtgtgaaatgaccagtagattttttttttggtcaggccccctcttatgttaaatgatttcaaaatgagaaggtctattactttttatttaggtagaacctattgtaaaattataagataattaatagtacacaatcttattctttacatttttatatatatatatatatattttaaaatggttaaaaaagaataaaaaaggtagattctattggtaaaataatagcaataacggttattttgctgaaagggagtactcaaatgatgatgcaccacactcttctaaagacaaaagaaaattgtggttcctattgaagtagatagagtcatcatggttcaaaaatgaattctcttttaaaacaaaattaggaaaattgaagtgggtgctccatcaagatagagtatcatcctagctcttgtcccgtttaacaattaggaatgaaaaatagcttttgtatcttttcgattttgtttaaatagaaaatctctagctcattagggttaggaattttcgtcccgtagaacaaaatgagatccctactactaaaaagtgagaaatatatgttttgataattagataaatgttatatgtatgattaaaatcgcaccacttattgattagtaattatatagataacgaagtgcgaagcttttacaaagcaacatctcaaaaagagttgcactttacacttggaattgttctacttggattgaaatgcaaaatgacaaagattgtaatattgaaaaccaacattcaattcatatcaagggttgggatttattttcacactttgattgggaatggtcataggtcacctcattaggaagatatttagtatgtgtaaaacaatttgtgaatgaagaagcttaggattcatgtataaagaagttttttgctttggtgatgccctagataagtaaaactcttcttcttcttcaatcttatatctcaaaagaagtagaagctttgttgcttagtttgagcctttcaaatttattttacatagaaaatgatgttgaaattattattaagaatgtgtttttttttatttcttttgagtaatattaaaaactgataacgagttaacacgagagtataatattttcatatttttattatttatatgatttgatactgattttttttgtaaatataatagtagggtaaaattatatttcagagatttcttttctgatattaaaattagactgtctaacttttcatcagtgtcatttcttttttatgtaagtcgtaacattaatgtcacgtctcatggactggttaacatacccttaagaaagataataatattttttggatgtaagaaatttcttcacttttacctttctcgtattttctcttttacctataagaattagtaataattacaccaacacacgctaattgtattttatttaggaatatatgatgacgtaattaatttatgtatatacccaatatcattttctttaaattaatatgcggtatacatttaagttagaataagttttatttgctttctcttcctgtaaaatcttttattaaccatttaatattaattttttttctttttttaaatcgtgttctctctcttgtaagtattcaaaatcttttcattcaccatttcattccactgaaacaatagcctccaccgaagagaaagtagtagatttaaaataatatatacaccacatt

SEQ ID NO: 297587 - DNA, 6799 bp, Cannabis indica
tccaatttgtaacttttgcaaaacacagggtccaaaatggtatttaccccaaaactaattaaatattttaaaagtaattttaaaaaatatatttctcctctattttttcttcctttttgcctagccccttctcttctcattctttggataaccctcctcctttagatggtagtactatattttgggtaagtcataattttttgataatcatcttagggactgtatataagcctcaacttactccttagtattctttagaattgctaaaaggtgaaggatttagagataaaatgtgtatctcctaataaaatttgaatgtatattgataatgcttatttacagttgagatctacttctaaattttttaaataaaacataaatatgattaatgtttagatacacatgttatattattattactctaaataattataaatgagatgtgatgtcataactttgtgttgatcaaaagaaggtcaaggaggcttgaattgactaagattacacaacttggtgtgaataaatgctatccaatcctatccacaaaaagtagaattggcaactacccatttgaagaggtgattatggtactataaatatcaatagccaaagatatttttctttgtgtatatataagaaccattgcctaagctctaataacacacaaaatatcaacaatgcattcttcacccaatatatttctctcatttttattacttctttccctaattgccattcccattgtgcatggtcaagttcccaaaaatgccacttttcaactcgttaatgaaggagaattcggtccatacatcgtcgaatatgatggaaactatcgtcccttaagcatctcaaactcaccatttcaactttttttctacaacacaactccaagtgcctacactcttgcaatgcggatgggcactcgccgatctacatctagtcgtcgatttgtttgggaggccaatcgagacaatcctgttggcgaaaatgctacactaacatttggagtcgatggaaaccttgtcctagccaatgttgatggtagagtggcttggcaaaccaacacggccaataaaggtgttgttggccttgaattgcttcctaatggtaacatggttttgtatgactcaaatggtcatttcctgtggcaaagttttgattacccaactgatactattttagtgggccaagctttacgggccggggctcaatacaagcttgtaagtcgcttatcaacagcggagaataaagatgggccttatagcatggtattggagcccaaatcacttaaactctattacactagcaagaactctctaaagcctttgctttattatgacttctcatcatttcatggagggtcttttcaagaccctccaatgaatttgacgttgcaagctgagccagagtatgataattctgcttatgatatgacgttttcttccataaatggaggttaccaaattggaagacctaactacaacagtacattatcatatttaagacttggaatagatggaaatgtcagactcacactttctatgacaaagtagattggggagcatgggaagcgactttcattctttttaataaaatcttcgttggtatgagaagagcgagtgcaacttgcctgagcgatgtgggacttttggagtttgcgaagatgatcagtgtgtagcttgtccatcggaaaaaggacgtttgggttggaccagaattgtgcacccgaaaagtgaagtcttgcaaaccaagtgattttcactactacaaaattgagggtgttgatcatttctcaagcaagtacaccaagggtagtgctgttaaagaaagtgattgtggcaaaaaatgcacttcagattgcaagtgtttgggttacttttatcaccaacaagcttcaaggtgttggattgcttatgatttgatgactttaaccaaagttgacaactccacccatgtgggttacatcaagacacctaacaagtaaaactagtttactagtttgaaacttgaactcaacttagttaagtgtaagtttttagtttgtagtaatgcttatttgggaataaagtgaatccaattcattgaatattttgggcattttgaatttaagattctaatttgaacttttatagtcaaactaataaaaagatgactagaaaacttgtttaaccaaactcaaattttagacaagtggccacaattcagacatgaattgtttgtttcaaaggaaaagatgtaaaaccatgttatttaaggtaatgaattatacaacacttctcatattttttttcccttcttttataatgtattgctcaatatctcaaaacacataaaagtttccccactacatcaaattcacaccccattgcaaaagctttcaaacctagaaaataagaagataatagaaatgaattgctagaagaaactatacaccaaactaaaaaaaaaaaaaaagaaaagtgaataagaacatcaccgtaaacgaatttaccacactcctttttcgtttacaactaccaaaagcagccaccactactaccaccaccgtcgccattaacacagttaattttttttttttaccagcgacccaaaaaaattgctcgataaatcaagctcaccgggaaaatctactgaaaaacacgttcattcgatcgaactaaacaggtataacatcattcttggacgagtcttcacatctcaagacgattccctcgagattagaaggaaagatacattgcatatattggcatcctgttgtcaacggctcgggtggagggacaatcataagtacattatcgttcctttgtacaactcccatcacgctaaccgtgctaccttctttgatgtacctacaaaaagattaaaactttccccgtaaataatcatcagaaagcaacccaactcgggccatttaaggacatagatttttttacccttctttcaatcgcattgtgcgatcatcactcgaaagatttttctccctcaaccacttggcgaactcgggagacaagtgttcatttgttgggttcacatcaacaacgaaggagtcatcgacgtagggagtcactctcgctccataaccagtcttaaccaaagctctcaagccagactgaaagtctgagatgtagaagtctaccacatgcctctgacaaccaacataggaaagattttgataggctaaggcttgatatttgtcaagaatcaaggaaaccaaacataaatgtctcaaagtatcatcaagatcaaacattttatttttaacatttcctaaatttcgggtgaactctacaatttaacacctgtaccaactataaaacaagttttttgttttatggtatttcgatcggttaagtaattgcaaaattaatatctcatatactcacctctgaggatctaactccccaagtaaaacgacgatgtgttgagttggctggtttcgaaccccatcctcgatactcatacaaactcgttgatgtgtagacacacctaggaatttttcggaaggatgattcaagagggacattaccacaagtaaccacctgcaagtgttacaaaatcacaatgtcataaattcgaaacatacttctgcatatgatcgctctccaccatatactcgagagatttttttgactattactatcatttcttcagagtggaacttattctgatgtatttaccaatttccacatgctaaaagcctcttatagaaatcctaaccgaaagagttaagacatattaccccaacaataagcaaaataattacaaaagattcctcccatttagagaatggaataggatttaactacagaaaccgctatgagttcacagctggtagtaactgctacattaaagttccattttttccactaaaatccaacttcgagtttctctcgaatacccccaactagattctctccaccatgagagattttctgactactcaaatgttggctagaagaacattactaaccattgttttgagagtagaaattgctatgatataattgtcaatttccaaatgcataaagtcttaagaaatacacagagaaaaatcaagtctttacctcaaaattaagcaaaagtaattacaattctcccatatagagagaaccttacactactttacttcataagattcattaaggtttttaactaaagaaaccaatttcagttcaacagtttatgtctctaacactaaaaatttcccaagttccaataaaatttcacttcaaaattcaaactttacgagtttccccgaaagcccatattaaactgtcattgttccatcccaatcctacccaactaacaaaataaagacaaggaattgcttactacaaacagcagagcattctactatcgtactagctctatcggtcccctagactaaaaaagtttcgatttagtcctcgaaaagtttaaggcaccaggcacatgcatacatataactaaagtgcttaaaagataggatgaaagaacgtaccccagaaactttcacgagctgaccatttttcgcacttctaagctcagcatcgggataactagaaatgaaattaacaacagatgttcttccccaacacgtattccaagtgaacaacgcaacaacaaaggcgaaaagaatcacaacaacaatgagaagaacagcattatgaaccgctccaaggataaaaccaccagcaatgaaacccatcacgaacaacagtatcacagaccaaagtaccggctttggaaagttcctcctaaaggaaaagtcatcatcttgactcaatgtagtgacagcctgattgtgaacgacagctgaaccaggtactttcatcgatcccatagattctaaattaccagagactctcttaggggcgccagataaattttgaggaccagaatgaatcggtccagatgttaaaagtcctgtagtgggaagattaggaacagggccagagttttggcgagtggctcctcccgattgagggccagatactttcttcataggttccccatgtttgttcaatggtcccgaattagtctttttcattgcagctgaaccagaacccgaagaaacaggacctgaagtataaacactacgccccggtgcattagatgtaataggtcccgaatgtgacacagcacctccaaacgatccagtcctcaaaggaggattgttcatttgtccagatttcctagatttcgaaccatcggggacatttaacatttttcccaactctcctgacttcttaatatcgccaccagtatatggcattgctgttgagctcattgtgggagtcctctcttttggctgctcgggccgacctgatacatacagcccattgctgagctgatgagatgggaatctggaagccatcattcgttcttttaggaacaaaaaacagtaactatgctgcaacgatcctcaaactcctacaacaaaacataaaacatcgatcattgttagaactttcaaacccgaaacaaaaaccaaaaggagacaaaaaactaagattcagtggtttgttgtagattctacaactactttagttcaaggtagtaaaagatctatgaaacaatatcaactaagttattttcctcttcttacaaatattagaaaaggtttccactttccaaataaaattaacaagaatctataaaatacttataaaaatcataaagtttcaagctttgaatcaagattttggactattaaactctccccaccttcataaacaaaggaaaaatctattgctagtagaatttacacagtccccacttgaagaaacaaagattcatgaaaattgagctattacatgaactaactaaacaaaaaaaagacaaatatataagaacacccattacaattatttgatcaaaaaacttattttaaagaaaaactaggctccccaccatatttgggaactaggaactacagaaattgctatgaagatacccacatagaatagaacctcctcagaccttgtgtgaacacaatccacatgcctcaccaagataccatacttcattacacaaatttaaaacaactttagtttcaaaatcaagagttacttaacttccaaaatgttttgagaaactaccataatcctaaacatgaaagcataaagattcaacctttaacataacataagccacaaaaacctattacatagtttcttattctacttttagtaagcttccaattcagacaaccaaacatttagagaacacaataagagatctgaaaccatttttggatcttaaaaaaaaatgagcaaaaaatggggaaaaaatggtttcaactttcaaagagtcttaggaagattcccaagatccaaaatagagttaagcaacagagttagagtcaaaatttctcagctagaaaaagtcccaactaatttcttctgaaacccaataaagcttcaaactttaaactaaaaacaataaaaaaaaaccataaagatcaaatttttacccctaaataaaaaaaaaaatacaaacccagataatcatttgtcaaaaaaatcacaatggagtaagatctaagcaaatgtaggcagagatttcaaaagggtctaatctaaagagttcaacaaaccataaaaagggcataactggaaaaatagtgaaatatatatacctgaaccagaagaaaatgaacaatgaagaagaagaagaagatgaagatgaagaagaagaagcaaagtttgtttcaatggatcaaaacacagtggttggaagtgataacagcagtgattgagctggtgagagactgagatcccatctccatagcagtcaccatctctttctctctctctct

SEQ ID NO: 297588 - DNA, 2604 bp, Cannabis indica
aggcaatagtttgtatatctttatctcgcataagaccttatagtcaacaagttgtaaatatactctgtcacttctgtattttataagttattccatttaaaaattaattacggttacacgccttaagccatattcttttcaattttacacgtgtcttctattgaaatggtagccgaatttcgggtataataattctttatttattatttaaaattttaattttaattttttcattataaattttattttatttttatatgttagtcaattaaattgtgctgtccatgtaaacaatagcctatgtaaatcatacttggcatgtaattagacaatggatgaaaattattacatgctaaaagaaaatgggtttcgagggttttgacgtaaaaattgtaacttttcagagtaaattattagcaaattgaaaaattttaagaattttttacctcaattaaaaaaaaataataataataataacaaaaggtagcgcaggacattttgttagggaaggaatatatcattggttatagattccaaaacgagacatgaccatgttaccaagcattttgtgttaataggtcttagattcctatgatcaactctcatatatttttagtgcatgcagaatctatatatgactagctatatagcttggaatttcggtagctttgctagcttcatgatcatcgaaatataatgcataaaaatattctttggaataatatataacctagttttatctagttaaaaactaagtatttttgcttggtgcattattgaatcatactaacacagctagctagttaaaagctgggaaattgataaagggttcaatgtttcgacttttggtaaatcgtccaaaacaccccataagtaaccaataatttaatactgtaagatttttattatcttaatatatatatatatagttaaaggagaataaattcacctattatgatcaataatttaaaatcaagtactgacactcttacaagtgattcttaagtaaagaaacagctcctttttctacattagtctatattgtcttcaatttgagtctaaccccttatcgctttgcttttaggttcatcacagcatattttacatttttagctatagttaccgtcttttagtcacaagaaaaaattcaatgtaactgaaaaatagtattcatgaaacagttgacgttgtgaaaaagggaacacattttatctgttacaaaaaattacatttattgtgatataccaaacttaagaactcagactttgataccacttattgaatctataggtagactatctttacattggtatgatgtctataatattaggcctaaaccctcatgacttttttggattatatacatggtctcgtacaaattgcagatattctccattccatatatttccatgttcgtttccatttctaatcaatatgagattttggttaaaagcccaaaaacatgtttgtctcatctagtatatatataattactttctatgtcattctcttaatgatcacagagtcaaacaattcttaacaaaacccccttaattatgtgatcaatgtgattgatcaacagcagcataaggaaataaaggcaaggaagaaatacgtacaaagagttcacataacttatctttggttctttcatcaaaaaacgaagatatattggctcaaagaaggtgatgtaaactctgatatatttcatgcagttatcaaaagtatgcgagtacaaacaaaaatttacacaataaaaggtataattaaacgcatatgggtgggtaattccaaagattaaagaagctttttttgcaattctacaagagcctattgggaacaaaattggagaattggaggatggttctctctgaaatagtgcaacaaggtcttgtcctctcaacgaattaggttagtataagcttaaaaaaatatacacaaaagaagatgtcgttgtagttttgttcgaaatcccaaggtgtagaactcttggaacagatggatatggtagtagctatttcatccaatataattaggaaattataggagatgaggtgagggaggctatctggattttttgcattcaggatagttactaaagaagttgaactccaaaacattaactcttactcctaagagtatatgtttggaaatggtaagtgattttagacccataacctgctacaatgtcttacatagagttttaactaacataatacctttcaggataataattctactaactaatagctataaaccaatggagtttgtaaaattaagatatataacactgaacatgatggtatgccaagctttagtcaggcattatgagaggaagagccattactataaaagtcactttatgtgtcagttagagagtaacttaatttcaaaaacgacacaaatgatcaccctacatcttaaatatcagttataaacggacaccaaatagtacttaagtgtaaagactgcttaattttaatataataatttgcaaataattagtgcttgaatatgaaattagtttactaattatgacttatgaatttatagaaatttatttgaattctaggtgtgttatatatgttatatatgaagttttat

SEQ ID NO: 297589 - DNA, 3659 bp, Cannabis indica
tttttctaaataagggcctaaacattaactttttttcttatagcccactaaattacagagtcactgataagccataaatttctatttaaaatccacgtgtctcttacccaaaaaatacaaataatagtacccattactatgactccctatttaccatataaacccaacccacatgtatttaaccattatcatataagatatttaagcataatcttagtacatatcatatcatagttttaactatgtaattaaatcttataacacactatttaaataacataaattttagaaacacattatttatttaaatacatacatttagcaataattattctctaatattgtaatatatacttaaataagatgaatctacatcatacaatacaataaacaataaaaaagtcatgcagaatatctcaattaacttctctatttactgtttcagctctttggaggaaacttatattttacttaatttccttacctcacctcgattgtggagagaaactagtgttgattacactacgcttcaaatccttgtacaagagagcccctaaatttctaataactaaagaataattttaacaagtgacctccaaaaactgcgggaggaacaatgaaacccagaactttataaaatattttaccattgatccgactctttcaatcgaagtaagaaatgattatttgagatttcattgtttgaggagaaaatgaaataaaaccccatcgaaaattatcaagtgctatgtttgcgttgtttcaagaccattaataattaattcgtactactcatgtggtgtaggccattataccatccatcgatctcgagcacatttatctgaaatctgatatagatatacgaatttttatatacacacaaaccaaccaaccagatatatacattgtacttacctctctctttctttctttttttttcttttcttttctctgaatccaatcaggttacctaactctatatatatacaaaatttattgtgagggcttcccatatttttttaactgatgcctccacttatataaatatatatattaattcattcacacaagtaaatatttcagatgtgagaaaatttagacaatttatcaagaagatgaaatattttgagaagaaaaaaaaaaaaaaacaccatttatgattaatagtaataacgccatgggagaatgacgcattcgatcatactcatgatctggttttaaactacacaacgttacatataatataatgtactaaaattaagccttatatttattataatagaagattagtatttgcatttcctgattgtcttactttcttaatcttagcaccaagatccgcaagaacagtcggaggaaacaaagattcaatctcagtcgtgagatcaagtaaagctggtcgctgattcacttttcgcttcgtcttttggatcgttgacttgggtttcctcggcgctggtgggcacggaagaatcaccgggattttggtatccactgaagttggagtcttgaacccatcattatgatgatgattatcatcatcataattaatacgattattattacccttcattgtatttttttgatcatcgtgatccgcggctctgatcatgaattgttccacattattacgagttgggattttgagcttcagagaagaaaccaacacctcgaatttatcaccacgatcatcatcttctttattattattattatcattattaatattaatattaatattctctttactcatcacaatctcgtcatcttcattttcatgatgatgatgatgatgatgatgatgatcagctactacgccttggccgccgtcccgatcttttaaacgacaatttatctggtgtcgttccaacgttggatgacgtgatgatgatcgaaccaagaagctgttcatgaattccgaaacattcagatctttctccgagaaaatcatctcagaattggataccctcatcaacgaaattgactttgaaaactcagcagaacacatataatatataatttatatatataaatattgtgaaacctggaactgaaatagcgaatttaaaaaaagaaaaaaagagagagatgaagcaaaacagataaaatacaaaagcaagagtttctattctaagccgccggctcgattaatagattgtataatcgttttctctcaacacttaaaacttggaacaatgctagttctacctaataatctaagctctaagcttcatatagccgactttaatagtagtaataaaattttcaaagggttatatatatagtgtgagagaaacaggttaaacaaagaatataatgatcaaaaactcactctctctcttttgagtgtgatttctctttctaagcatgtttgtttggactttagctctcaaaatgttcttgatgagagagagagagacaggtagacagagaagataggagattttgaaaacccacagcgaaggatccgatgtacataacattaatcccatcttatatctcatacttaatttttatttatttaaaaaatttacttttttttattgatatatataagagaatcaggcattaaacaaggtagaaaatactaggtcacagttattttttttgctgttatatctacgaattttgaatctacaatgcacgtgatttcctacagagaaagaaaaacccatatatgataaagttgaattatttttttttccttctaggtgttacgtattatgtaatttgaatttctcgcgagatctagaatagtacacaactgcacatgttattatatattattattacatggaaaatttaaagagtaatttttgtttttctttttacagatgaattatataatttttatttttcaaggaaaagaaaaacttgtttgtagttttgctaggaaattttttgttgttggatgggttcgaagtcggctaatattttaagtgtccggccatataggaaaaatactacactactgtctagttttgtctttttatttgtaaatagatacaaaatttaatcaacctctactccactatatgtatgtgcgtatacatatatatgtgcatggccatatttgctgaatcatgcaataatgcacgtttaggtcaatctagtttatttcatattaatttattttccctcttggacaaatggtatgtttcagatttcacaactgcccatgttgcctgttgacataatttattcaaaatcataataaatgaacgtattggttaaaaaaaataatactttgatttattaatgaaaaaatttattatatatgcagttcggtagctaattagttcattaggtgggttagataaacctcttttcagtgttgtaattttaaagtaccatattattttattcagtggataacataatttatacatatatacaagagactactgtatatcacccaatgtgatactaggttacgtgaccgcgcctcgcgcggtcgttataataattgatttaaaataaaataatttaattatagcacggtcgctataataattgatttaaaatataataatttaattataattatttaaatttaaaatattttgtattgttagtgtaaaaaagtatgccttatgtaattattattaattttatgaaggaatgttatgataaaatataatttaaataatattttgaaa

SEQ ID NO: 297590 - DNA, 3004 bp, Cannabis indica
aaaaaaaaaagtgcaatattgtattgttaagtgtaatatttttttgtaaaaaggcactgacctatatatatcattgagcaatattattaggttgagataatgattaatactttctactaaaaaagatgtgttttatgtaatattttgaattggtaagtaaaaggttataatattttagataaacactaaaaagtattagtggtgcttaatacaatattgttattgctttaattaagtatcattgctatatgttaccagtagtgcttagcgcttttagacatatcaccttgtgattaactagcgatattccttaaaagttattacattaaattatataagatctaatatttaattagattaattgtaatattaatacataaaaaaagtattaaatatcatgagtgttttttattatttttcatataaattaatataataacttttaaaaattatccctaactaatcacataacaacaatataaaaaaatgttaagtccaatgttacccaataaatgctcaatatttaatttaaagaagcatttaatacatcattacttgaagaaaaaaaaaaaaagtattttatgtaagagaaatgttaaaggacactatctaacacttttctatgtgttaatattgctattggtccaactatttaatataatagcttttagggaatatcgctagccaattacaatgcaacattgtcgagaaggtgctaggcaccactaatgcctaatagcaatgctcttgatgtaatattttgaattggtaattaaaaggttataatattgttgtttgcagagtatcccaacccatggattgggcgctggagtaggaataggtcaaggactagttttcgaaatcatcgccaccttcgcactggtctacaccgtttacgccacagctgccgaccccaagaagggctcactcggaaccattgccccaatcgctattggattcattgttggtgccaacatccttgccgcaggcccattcagcggtggatccatgaacccagcccgctcattcggcccagctgctgcctctggagacttctcacagatctggatctactgggtcggcccacttatcggtggtgggctcgctggcctcgtctacggtgacatcttcattggctcttatgctccagttgcttcttctgaagactatgcttaatcttatctaatattttaatttaattaaaatgggggattgggttggttggttgggtttgttcattttgcttttttttttttcttgtgaattgggatttttcattttgtggtcttcgaattttaatttcataaaaggagaaaaagaaattgttaaaaaaaatgcttgttatttgttaataattaagctgtatattactactactactatgagatcaatttgtttggaattttaattaagaagccttttctttgatgattttctatgtttactttacttttatggtgttattttcttgagtatttatttgaagacgctttaatcataatgaaaatttactatacttcgtgttaaaaaaaacaatgattggattttagataatctcccgtggtgattttcgaagaaagtgcttgataatgtggtagagtacttaaaataagctaatcattgaacatgtttgggtgtcgaatcaaaaaataattttgatgcctggcattaatgtcatactcatttttttttaagaaaaattatatcaaataatacattacataattatgtgtgacaccatgatgataaatttgaagaattgaaaatataatgtgaataaaataaaataaaatattatattattaaataatgtggaaagttttgatatttttgaaaagtattactattagagtatttttaataggcgacactcgtagttttcaaaataggtagattatcttaaaatatatatatatttttattattttctccctcaattaaataaaatttgatacattttcttaaaaaaattattttaatggtgggtaactccaaaattgtccatcatagtctcatatactactttttaattatatatattctcttaaaaaaattagttagagatgtaaacagggtgggcgggagcgggaatcgctctcccacccctatacccacttcctaaatccacttcaatacccatttaaattaaagcggggacggtgggagaagaattctcatcgggtatccattacatatatatttttggaaaaaaaatgatgtctcaaatagaactcattaaaacaacaaatataagtgaaatagtgtgtataataaatagaatcagtaaatataaaattggcaattgaaaataagtggtttagtgtcatttttttaaagcattttcatgaaaattgaaatgtcacattaatgtaatcaataaaaaacttaaaacatgaagttattttaattgtattagttaagattttaaaacttttttttagagataagattttaaaacttaaatatatacatatatcatatcgaggcgggtacctattcccccacccccgcccccgcccccaccccaaacttgactcgggtatgaaaatttaaactcgtacccgccctcacctacaaaattcgatccctgcctctacatcattaggagcgggtacccgcgagtataattgtcttttctaaaattagttggtgattaaagtaactttttttgaaaaaaaattaaataatgtcaagtagctattgctcattttggacaatgaagttcctaagattgggttaaaatgcaaagaccacttcataggcaatcccagttggagatgcactaattagtcgaacattccaacttttgaaaattgcacttttaatgcattcaggagttatatttatacctcatacaattataattaggggtgaggaacggtcggtttggtcggttttttacacaaaagaaatccgaaattcagttttcagttttcatgattataatctgaaaaccgaccgaccattatacaaatgtaaaaaaaccgaccgttttaatccacgg

SEQ ID NO: 297591 - DNA, 2419 bp, Cannabis indica
tggagatccaatttgatcatgcagctaagtttgttttccttcctaccataatgtctcaccagatcttgacatatcagaatattatgtcctataaatctccctttaacaaaaccaccttgagcctgtgatattatttcagggagaatgttattgattctagtacttaatagcttagttgcaaccttataaatcacattacaacaagttattggtctaaaatccttaacagaattaggacatttcatcttgggaactaaggtaagtatggtagaattaatctcttttagaattttacctggggtgataagattgccccacatatgtcccctccaatgaattccagttgtcttgaaagaaactgctagaaaatccatctgggccaggagatttgttcccaagaatgctaaaaacaacttgctttacctcttctttagtgaatctttgtgttaattttcctgcttgttcaagtgtcaccataggctctttagcaagtatgctactttttacatgtcttctattactcattttagtgccaaggagtccatggtagtattctaaaaaggccgctgtaatctgtgagggatcatttactctcatgccatcatttttttcaatagatagaatcctattctgtctcaacggctacttaatgcaagcatggaagagagccaaattagtgtctccattttgcatcaaagctatcttagatttttggtgtaacaaggatgagcagtccttctgaacctttattaactgttctctggtttccttctcctgctggtgtaagtcagtgtcaagtgggtgcctctacaggtgactttggatggtatcgaggtccattttggccttagctacagcactttgaagattcgaatagccatctctatttatgcccttcaaaataaccttcaatctcttcattttcgacacaacttggaacatattgttgccttcaatttatgtattccataattccttcaacacttcctcatattttgggtgagatttccacattttgaaatatttaaaaggctttttaccaccaccaagatcaggatgtagagatagaatagcaggggagtgatcaaataagccttcatttagaaagacaccttcagctaaatcaaacttattgatccaagtttgattagctaacactctatcaattttagagtaaattatgtcctcaccaggttgcttgttagtctaagtgtaataatttccacttgctttgacatcttctaaatgacaaaagttcacacagtttagaaagtcaaaatctggataagatcttactctatgcccaatcctttcctccttggccaaaatatcattaaagtcccccattagacaccaattctcatcagtactcaactcacataactcctttcacaaaatcctcctttctcccttattatttgaagcatacacaatagtgagaagactgctaaaaccctcagtggttgaaaccctcaaatgcatcaactggctggtgcatttgatgatatcaacagtgaaactaaatggattccgtgctataacaattttcctaccagcatgccaagctatgttggacgaaaagcaccgtccttcaaacacattcgagtataaggttctaagttttggagccttacttgtctcaaggagcccaacaaaatcaaccttttgcaaattataaattgctttattaattgttgcttggattgactattgactatagctttgaggtctccatcttcatagtgagtaggttctctacacttcctcttgcaattttcttgcttgaaatttgaaattcgatgaagttttttagcacttcttggtagttttttccatggtcaaaactggcattggataattaggatctttgatttttttataagatgtgagtgtttaacgattggattctacagcataggttgtgggtaatgtgtttttggctctggtttgatgaaattttgtgaaggaatgactaattttgaaacttttggttgattatgttccttgagaaaaattattgatgactatactttgtgtgtggggtgtgaattttgggccaccttgcatccccacacgttgagatacctcttttgggggtcggggtatgtacctgtgtcgcacaccccgagactaagctttggcctcaccatgaggccttgagttgggggtcgaggtatgacccttttgactcaccatgcccttagaccacccaaagctcataaacaccccgagttacgcacacacactccgtgacccaagcaactcccatacgacaatgattaccccaacacttgggtgttacactgacattggtgggtcggggtacaccccgagtaagctttttttttgaagtcttgaactgtggccaagattggagatcaaggtacaccccgagcttgaagctgttgggttttatgcc

SEQ ID NO: 297592 - DNA, 2366 bp, Cannabis indica
tttgttcatgattatagtgtcgtcaatacagtggaatataatcatgattatatgttcaaaagtttaagtctcatgatttgtcagttcactggatttagactgaaatgataatcaacgataaggtatacttacgccttggataagtgttatgtcctttccaaggtattggcaaagttcagtacaactttccatcctcagattgacggacagtctaaaaggataattcaaatacttgaggatatgtcgtgggcgagtgtaataaaatctactagaatacatagtacaataatttgagtatagttttaggtatgagtaatattaaatacatacttaaattatacacacttattacacacgatcatatgtattaattcactatttatacttttttgagtgattcattgaaaatttaattacttgtgtgtcaattataaattaaaaattatagaatggtgtgaacaaggagtgatcatgatcatgatcgatcatgtcatgtatgggtggagaaaaagattggctagtacccacaccgaatttctctctttttgttatttgtattgaaccaaaggtattagaccaactccataaaatgccgagtaggccacaaaccctactctttagaatcttttagattccgctcttaacaatcactaatcacagattattatttctcaaacagaatcttctacctttatgttcctcagtctcgagtcacgtacggcttttttgtttagttaattaattcattctctcaaactaaaatcaaattaataattaaaatttttcctatagtaataattatataaaagacaaagtggaagaaaacaaaaaccattggataataagaatgtttaattaatcaagtctagtatcgtttaatatatgagatgggagaagatataataacaataacaacaccttgtctgatagcactgtatgatggccagattatctgattttatttgtcacttgatctaatcagtatagtttgtttgattttattaaagcctaatcccatttataatattaagttttcaaccatgtttctgaaaaaaaaaaaaatccaaccttgttaaattttatcgagtaatataacaatcatatattgtttcaattaaataataattatatatcagttttggcataacagctgacctgacagtgtctaaaaaagacaagagaatcactttaaaaccactacaatccactcaacttgaaatttatgatactattactagtggagcgtatatattctcccaaatgtatatatgcatatatatagaatttatattttttttttgctaaattttctccgttacaaaaaataaaaggaagaaacttcatatcgaattgggaaagaaatacactgcatcaaaaacacaaaaaaagaattgggaaatatatatagcttcattaataaatatattttaacagttcacatgcttgaacaaataataatgagattagccaatttcgcaagcacacatatacaatacataaataacatctaaattagcccccaccattaatagctatatatgcattaatttgacatattttaatattatatatatatatataaaaaaaaatagtaatggagaaaacgtcatcgttttggagtaataatcggtggccacaaggctgggagggtggtaatttcagatttggcagaggcatgggatcttgctgacgtggcagctgagttagaggcatgagctgcttcttctttgtccattttctcatcgtggttaatctgctgttgcctgcactctaggctgcagtatgcactaatacctctacaaataaaaaatcattgccttaattaattaaccaaaaaccaattaataattcaatttcatacattttaccatactcttcattacatcaatattctattattctttttaaagatgaagagatctacagtaacttaggaacttgatctaaatgatatatcagaatatatacctatacatgtaaatatcacgattaggaacgaggcggcgtttgcagagaaagcaagctctaagaaaatgagaagtagtagtagtagtattggtctgagactgagtaaaatcagcggaattactcttgcaaagaccgccttgtactacggcggtggttgccttcttgagagggttgtgtggatcgaacggctgagatttgtcgttggtgttcagatcaaaggtgatctccgtcatacttgttgtcctcttcatcgacgtcctagccctcttccccaacatctttgaacaacaaatggttagtaatactctggtaaaatggaaggaaggtagtgtattcttcaaatctagagagagagagagagagagagagtagaagaagaaagaaaagaaagagagagg

SEQ ID NO: 297593 - DNA, 2362 bp, Cannabis indica
gtgactcttattactagtctgatcatagttttactgagagtaccattcttgctactcttcaatcttttgtaacagcgaatttagctatctaatagttccctactttcattcaaaaatatatatataaacatatatataattattccatacatgtttatacagaaaatgtatttaatgaaccatatccctaacctactagatgaaagtcccaagcgaaagaggttcaatctcgcttaattaaattaattttcagtaaaatttcacttgccaaactaatttcttctgaaagaaggaagtaataatgcccgggagcaaagaaatcaacccaaaatgaacaataaaacatattaccgattctcttaatgtgttctaggttattaaaaaaaaattctcttaatgtgattctagggtcacaatgcaaagcactgcttaagtagtgaaaaacagactaaaaattcgctcaattgaaaaagcaaagcaagaaaccaaaggagattttattaccacttcagtccatctaactggataaaagactccatagatgattgaacaacggttgtttgttacggtaagacaagaacatactatacaacaaccagtcttaaacaagcctcagagttaaaacttaaaaccatgtacagttttaatcttcatgatgttccaacttccaagactaagagttcatcagctagctagtatagatagccaatttcagcctcactgggtcccatcagttttctgagaaacaatagatgaaacatgtaaatgatcaatactttatcatgtccaaccaaaagaaaagaaagttgagagactatatgtgaacaatttgctatacacattgttcatggtcttcatctgatatatgacaagtgggaaccaaagtcgctttcaaacatgcttataagcttatacggtagtgcctagcaaatattataaaagcttgacgaagatgcatttatgacaatttgaactccaaaatttcatccttctattcacctcttatccgttatcacagtagataatcaatcaaaaagagaaatatacaaaattgcattttccaaccagtgagctaagcgtatgcaatagtttaccaaagaatttctggaatctcaatctctagactaataatattcgttttcttagagaagaaagcttcaaaatgcataaaggtgaagtatcgtccacaccaaaactacctccacttacaaaagcttgggtaagtagaacagcagtacacaaaggcatatgcaaaacaaaccagactatgaattaaatgaatcttttctacagctaaactcaaaaacgtctgaataagtgaacacacaacatagtattgaatcttggtaaatatctatgtagagtatcttcaggggagttagtgacaaaaagggcatagtattcttcaaaagaattgtcacatataagcataagcagacatgcacatgttacacacacgcaagcctagcgacattaaagcacattatcatcaacaaaatcaagtccacaacaattccattcccactaagagctaccccaagaacatcactcttttggagtctttagtcaaaattttgcctaaatcaatcaatcatgaataaattggcaacaagagtatcagtaatcagatggtttccaattaggacttaagctaaaacccaaacatatttgacatttaaatacaaaattcaaacaaaaaatccttacgttttcagcattctctttctctttctgggctttttccttttcagctttcttcttcagtttctccatcttctccctctccattctcttcacaaaaacatcattttaaaatgaaccaatcaatcaatcagtgtaaatcccaaatcccaaaaaccaatacccacatcacaaatgacagatattttctcaggaaacaaacagaagagatcgatacagagagtgaacagacctggatgtaaacattctcagcagctctttcctcctcgctcaaaacctttcctttgccatcactgaagtagcgagttgagggccgtgtggtgtccatcgcgcgagacagtgctgttgctcttgccaaggtagatcgcatagccattttctttctctctctttctaatagtcttctactttctacttatgtttgtcggcgtccctatcgaataatcgatggctccttagaagtatccggtttattaataagacaaaagactctgatgtttcgggttatcattgcgggtacgggttcaagtcggatggaggaccgaactcatattccagaattttcatatcttcaattaggggtgcacatttagacccgtaaacccggaaaatccgactacccgccctgacccgccgccaaaaaaaccgatcacccaaaaac

SEQ ID NO: 297594 - DNA, 4543 bp, Cannabis indica
aaaaattattttataataaatatacattatcattaccaaaaagtaaataaacaaaaattaatcgaacttacaataaataaacaaaaattattttaataattaatatacattattattgcaaaaaaataataacaaaaaatgatcaaactttataataactaatcaagtcataataaacaactacacttcactctatacaagaagtcttcaacttgaatttatacacgtacatagcatcttttattatttaataataactattttttactacttttaagggtaaaaaagctatgcatatctaatatattaattcttaattcgctacaataactcacttttggtactactactaatagccatgcttgtatatacttttataaagcaaaaatgttgcttaaagaaaggaatataacattcaaagtaatgagacccacttctccctttatctacatatataaatggtcatttttcacacaaatttctcaaaataaaaaaacttcttcttctattgttgtgtctctcaaagacaaccatgacaaatttcttcctctcactgctgctatcactcttcttattgtctcccaatgtaagaactatacctcatttttcatatttcattttatttttgccacatttaccccatttcagtaagtttattgttattttgttttttcaggttgatgggattgaatttgagacaaaagaaaacccatttacggcaaaagcctcattgatccgttactggaaaaatcatatctacaacgatcttcccaagcctaatttctttctctccaaggcctcaccgctgggccccactgactcagcgattctcgccaaactcgccgacgatccagactcgctctccgcccgattcaactcgttctgttcgtccgctcacttactctgcttctcaaacgacgacgtttcggagcagcaaaaagatgatcaatccacctccctagacgacgccgtttcaaaggatgccaactttgccacttacacaaatagaaacttcgccaactatggcgccgcccgacgtggcggcgccgactcgttcaagaactactcagacgagttgaactcgcccaatgactcgttccgaaaatacagtaaggaatcgaactctcattccgaacaatttgccagctacgccaccaatgccaataccgcaacctcaaccttcaccggctacgctgccgatgctactagcggttccggtgagtttaagatctaccaccagcaagttaacgttcccaatctacggttcagctcgtacgattccggtgctaaccaccaccgtctgtcgttcgggagctacggtagcgagaccaactctggatcccaatcgtttctgagctacggcaagaacggcaatgccgatccgaacgagttcaccagctacgcggaaggagcgaacactctcgggtcagatttctctggatacggagagattggtaatggcgggaacaattcattcaagtcgtacggactcaatgggaacaatccgaagagcaacttcaagagctacggaaccggaggcaatgccgggatcgacgggttcacgaactaccgaaacggagccaacgtcggcgccaactcgttccagacctacgctagacattcaaactcggagaaggtgactttctccaattacggaaaatcgttcaatttaggaaacgactcttttcgcgactacggaaaaggatcgttgggtcggacctcaatcgggttcaagtcatatagtttgggtcggactttcaaggactatactcgaaacggcgtaactttcgccgagtacaataatttcaccactgccacggaagcaggtcacagtcacagtggcatatccgtaaataagatggttgagccaggtaaattctttagggagtcttcgttgaaagaaggaaccgtaatggcaatgcctgatattcgagacagaatggttgaaaggtcttttatgccccgctctctattaaccaagctgccattctcaacgtctagaatctccgatcttaaaaggattttccacgcgcctaatggctccgccatggaaggcataatgctcaacgcgctagaggagtgcgagcgggctccgagcccaggtgagaccaaacggtgcgttggctccgccgaagatatgatagactttgctgtttctgttttaggccgcaacgtggtggttcggaccactgaaaacgtgaatgggtcaaagggagaaatcatgattggaaaggtcagaggaatcaacggtggaaaattaacgaaatccgtttcatgtcatcagaccctgtacccctacttattatattattgtcactctgtacctaaagtaagagtctacgtggctgatattcttgacgtggcgagcaaaaatatgattaatcgtggtgttgccatttgtcatattgacacatcatcatgggctccggggcacggtgccttcgtggcattggggtctggtcctgggaagattgaagtttgccattggatattcgaaaatgacatgtcgtgggcaacagctgattgagtggaatataaagatggtattttatttttaaaaaaattgcttttgtgcaacatttttacttattcataactattgtttttgtttagaattttttcagttcaattcagttctatttgaacttttttttttcttcaagatttctaagtttataatatacaatatgtgatgaatgaacaaaaaaaagaaaatgcttcatagttattaatagttattttttgttcgagtagtaaaaatttgtgactgttatttttgtccaaaaaaaattaaaagagtctggataatacttgaagtacaatttctctacaaaaagctgtgattttttttggtttttttgcaatggagcaacttatctagagtgtggaatcataggtttttctggctatcccaaacagtagaagaaggttgggataggcttttatcaaaggaataagttaaaatttcgtttttaataattaccaagtaaaattatcaaataatttaaataatatagaagtgtagtaacagaatttatctatgttctatcagacacaaaatctgacagaacaaaaatatattgttaaaagtaataaagtgtagaaaattaaatgacacataacatttaatacgtggtatcaacaactctttcgaattgctcctagtccacgggaccacgctcggagaaagaatttttttagatgagtctcaagtgtttacaaaaccaaattgacttatacaaataaagactccctctttgaattttccacaactattgtaatatattattctaatcaaatttcagaagtaccgagaccttgaactcccttcaattcgtaacacttgcacacttcatcccgaagagtgtctcacatgcaatcttcctcccgaaaagtgtctaacttgaaatcttcctcccgaagagtgactcacttgcaatcttcctttcaaagagtgactaacttgcaatcttcctcccgaagagtgactaacttgcaatcttcctcctgaagagtgactcacatgcactttttcctctcaaaaaggtgactcacgaacaagacttctcctgaagcttgctcaacaatatccaaggtgttcaacctacataatttcaacaagaaacaatacagagtaacacaataataaaatactaagaacttgttggactcaagttcttcacacaactaagaaagacactctctaactttaaaaagtaatataaaattgatacaccaagagagctaaccaataccagagacttaagggtgtatttatacactttagaaaccctctaggtcgtggtcaagcaaccaagaaacgattaggtcattaaatgaaaattttctcaaaaaagaaagtcaaaatctgtttaaacatacaattagtccgttcaaacaaatatagagaacctggatagtttttcaacaaagtttccataaataaataaggcaactttgacaacattaatacccatagttgtacacgattttttggtcaagaaatcagatcaaaataaataaaatatgaataagactttccttaaaaagtaaaggataaaatcaaataatttataaaaggaaaaatcatattttattcacaataagtcaaaagaatataagatctgattttgaaatccttttcacacaagaaaaggaaactggatttttgaaaataaagaataaacaaataaaaacaatttcaaaaataccacaaatattatttttgtctattttatcaaatatctcaataaaagattttacaatctccccttttggtaatttgatagacaaaaataaaatagaaacttgcaacacacatgttagagataagtaaagagaagaattccccctgcaagcatacataacttataacaaacttgaaaatgaaactaaaacttaactcccctcaaaataagaaggtccagagttacacaaaacaaaatataacatggttttgagtctactctccctctttgtgtctttccaaagtaccaaaagtatgtaaaaaaaaaacaaatatgccaaacctaagactaaagaa

SEQ ID NO: 297595 - DNA, 1631 bp, Cannabis indica
agaaaagtttgtcttataatgaatgtgtaatagattgatgttgtagctgagtttgaggttgacaaggaggccttggaagcaacagctaaagccaattacacagagtttagctgcagcaacagtggtggtgctgctcaacgtggtgctttggggccatttggtcttcttgttcttgcagatgacaaactctcagaacagactcctgtatatttctttattgttaaaggctctgatggaaatctcaagacttttttctgcagtgatcatttaaggtacttaaattttattatcagtaaatttagttaattcccttccattcatatattgtattaacacatattgttatgttttggtctctattttttggtaggtcttctgtagcaaatgatgtgaaaaaacaaatatttggtagctttgttccagtactgaaagatgaaaagctatctgttagaattttggtgagttgaggagtcacactgttatttattttagtaattgttgttttcacaaagtagacttgtttgagtagtaataataattggttggtgtgatgttacagattgatcattccatagttgaaagctttgcacaaggaggaagaacatgcatttcatctagagtttatccgacaaaggcaatctatggcgcggctcgaattttcgcattcaacaatgctactgaggccagtgttaagagctcaatcaagatatggcagatgaactctgctttcatacgcccctttcaccctgaaaataagaagccaccacataattcattatgatttgaaacaagtaaaagtttagttttaaatgtttctctttctgtcttcttggcctattgtcaaacaagaaaggggtaatttttttttttttttttttgggttattttctcctaaatggcacatgggaaaatatacatgtgcattcttatttttgattagggtgtaattagattctatttcctattgagttatataaatgaagctgaaaatattttttctttattggctcctttattttagtgtgatgtaaaacttaatatgtttctctaaaaaaatattttgaaaatacagaataatttactcataatatttatgaaaccacctcattcatctttcaataatttaaaagaaaaaaaaaattaacttatttctgctataaaatgtatagtgaaataatgtaaaatagaaaagaaaaaaagaagaacatatgaacaaataaatagaaattgaaagagagaattttttaagtagtttattctaatatggtgaattcttatttattaaaaatagaacttgaagaatagaatattaaaacaataaataaagggaaatacaaatggtatctatgctaataattgatttgggtaatttagacattcaatttatatatatatatatatataatattttataacactcttcttggatgtacataataactgcttcactagaaacattgctagaaaatttagtaggacgaaaattcggtccagaaaaaaagagtacagtctaaattaactccccctcatttagatattcgtaaagatcttctaatcgacaaattctaatcttatatgccgtcttctcaaatattgatgttggtaataattttgtgaatgcatttgcaaga

SEQ ID NO: 297596 - DNA, 6304 bp, Cannabis indica
ttccccggaaagtttaattttgatcgaatatcagttgatatccatccatggtggagtttccaagttaatgtaatggacaactttctctctattcccaataaagagtataggaaaattgaggaatcaaatagattctcctcttattagcttctttcggggtaatacctgagtttcctttcctctgttttacgaggaatttaccgcgatagaagaagagaacttttggtcgagaggaaacaaatcattttagattgtaatactttacggtcttcctctgtttggttatagcgtaaaaaaacaaaataggccagtttcgatttacagccatggatacagaagttgaagaagaagaagatgaagaattggaggagttcgtcagagaaactttcttgtatgaagaaactgatatgaattacgagtttgatgcggctcgtttcttcgatttcgatcgaaccgagacagattgggaggcccgagaagccgaacgctggttcgaatcagccagaggttatccaccttcacgtgagtgttctgaaatagcagtatcatctgtctttttcattcgttcactcattcatttctgtagcttcattctgtactgttaatcccaatttttccattgaagaacagaaatgacttcttctttctctccttttaaacattcgttagcataatcaaggagggaaatatatgtagtttatagtttccatagccgtattgtgaattgaatcattatccatcctctccatttattcttcttggtttattttttcaacgtatagctttcattatacgattacaatggaataaagataaaggtgtgccaatgggagttttgaccacttcttctaaatccacagtcgtgaactcaaataacagaggtacggcattaatattatacatattgtagtttggcccattttttaaaagactttctttttatttatttgtttgtttgtaataattgtttgcatagtggagactaataataaataattaaatcttaatatattttcaggggccaaagccaagtctacagtcaaatcaactattacaaggtgttcaactctaatgaagcccacagcaagccatttagcgaaacaacgccagcttgtacattccattccatcaatgaggttgtttatttattctaattagtaacagctcttttcagggctggtttttactaaggcttaatcaataaaatggttttttttaataaaacctttggaactattataatttttagttatgtgtctaactctgttttcatgtaatatcactcataaacttttaggcttcaaacgaaattaggtattattgatgaggaaagttcacagaactcctcagttgcagaggagaaagctactaaaagacaaaaattggaaggtggtttcttaagcaaggtacactaaaagttggcattgtagtcagtttaagcatgtcattgggtatttatccattatgatccttgtcttatgcttaaagagaattcgaattcgaatttataataggaaattataatcagtgctttcttagatgtgatattttgtcatacattaatagggaattgagactgaagatttgaaaccatatgtataatgtacacatttgaaaaacttgatttattacaattgtgtgaatttgacaatgcaggctgcccaactaaagcataaagctcttttgttacacaagaagccaaaaaatgtaaaagaaaacccacattttgattttatgtatttttttcactttcttttttactgagaattattactgcgaaaacttcaaaagtgaattatatgttacaatttaagtttgaatttatatgtcatcccagtcatcacagcacgatgataggcttgctagctcagtaaatgccaaacttagagctactattcctagagagcctgatcttgagacagcgcatagagcagaacgacgtaggtatattcacttctttctagattactttgttttttaaaatttcaaactcagcttcatgatatcatcatgcattcacgtaatgcgtttacattgatttcaggaataagatgaatgcagaatcaacaaaatcaaatgcccatacctttaaagctcgtcctttgaacagaaaagttcgtatttttatttaacatttcctttctctttttttttttgtcaaaaagaaagaattctcattaatcaaacagcaccaacacaaacacaactgctcatacaagcaccaagattaccaactgccgattacattttgctaacaaactccatcactgctaaatctctcctagacatattcctggtggtgtaaagaaaaattctacctttgacatttaacatttctgtatctggaaagaaatatcatatagacatttaaactcgaaagaaatagtgggcgattctttttttttttatgggctgtcttgggcttttgcagatactggagtctccattgacccttcataagaggactgaaccgcagctaccagagtttcaagtaattaacggtgtttgttaacacaaagaaagtgactctggtactaagtgcttaattctatttaagtatctatttatttttccctttatttaaaatttcaggtatttagtctgaagacatcggagagggctatggaaaatacgttcaataataatgtaattcatttatttttattttgcatggatcattactgcaatattttgttcattaggcctaacagtgtcattgttgcagcatacaaatatcccttggatcagttcaaacacagagggaaaaaggtaatttatatgttacaatcgcggacatagataacctgccatccattaaagataatatttatttctttctgtataaagattggagagatgagatgcctagtaatgtatttttcacaatacttcatgttgctgaatgcatttctgaataaattagtacatgtcttttccccagacaaaaaaaaaaaaaaagtagcttatgcagtgcaaaccagttctccttggcaaatgacacgaattgacatgaacaataagataaatatcattttacagagtgcatgcaagagtagtctgatgttgatagtggtactgttttacatttattttgttactagatccaactgtgtcgaccgcttaaggcaagagaaaagggaaacagttgataactcccaagattcctctcctacaaaaaaggttcttaattattagttttgctagtgctttcagttaaatttgtgctattattattgttatattgtgttttttctttgattttttttttatgataaattttattgttaattatcttcactaacctagtgcagaaacttgtaagcgatggaaaactttgtatctttcgtaatattaaacaggtaacaatgatagcctctaggtaatcttattttgttttgttctcttttcttttcttttttacctatatttctttccctttttcagaggtgcaatttttcaactgataagaggtttcaagatgagccgccaattcatttgtttagtaaggtatgtaactataacactgtcatataaatatatataaatttccatagagtgaagtagcgaaaagtgcatattagtgtcacaccatttatcataattgtttggcagctccgccttacatctgaagaccaacgaaatacaaggccaagctcagaaagttcaatgcccataaaggttagtttctttcaactttaatttggtatatcttgattggatgtgcaaatcgtatttgcttatttgattgctttgataatttgaatcagggcacaatagaaaaaacgccatactgtttgtataaagaaaacgaggtatatgaacaaattactgatacataggcattaatagagggagcaattatttgtgttttatacgccttattcacggtgttatatgtttaagttgtagatgagcaatttagtgaaagaaagaccgcagaggttaggtggaatagattttgtggactgtggacgcaatcggaggatccatgaatttcgacagaacattaataggtatatgctctaacgtgcaagcacatttttcattcttttctgtccttgtcctttaggagtagtttaaacaaaatggattagaaaaataactaaataaaaaaatctggattgctgtcgggggaggggtcaatcttagtcattggcctctttctctttttcaaaaaaaaaaaaaaaaatctggattgcttgctctataagaagtaatcttacttaacgataataactaataagtaatcatttacttagccaaaaaaaaagtaaatcatttacttgattgtttctccatcaaataaataaatataatagaaatccaaatggttagagattttttttaggttgaatggttagacaatttaaactaacttttttgaattttaaattataatctgaattacaaagaaacaatgaaacatgactgaaaataatttgtcaaatctctctctttggacacgataatatgtaaaaacgtaattacttttattacaataaaagtaattaagatttgaatacttttttttattagaccacaatatactaagtactcacattctattttgccactaaatacctttactacacacttatatataacttacacttttaaaatactttatctttcaattgggacactttaaaacacacacaacttaacacaaccctaaaactttacttgtttgtgcacacactacaaaggacccaaggtccatatatatatagatgttaatggtcggtggtgaccaactaaaaatttgctaaaatttctagcaatttctttgggcttatgttaaaggcccaagttctagatagcacttaatttatctcaatctttctcaaagtttctagaatgttcaaggtaggtgttgacttttaacactccccctcaacaacgacttttcatatcgagttgttctcttaatttttgaattcttaaaacattgagtcatttagtgaataagtttgctacctggttttcattttttatttggtgcatctccagtacttattgaagtactttctttttgaaaaaatgataatgcacctccacatgctttgttcgagcatgaaacattagattctctgctagacggatagcagactgattatcacaataaaatagcactatagaatctgtagattggtgtaaatccttcattagttgcatcaaccatgtacttttttgagctgctatattctatttttgtggttgtcaaagacaccgttggttgtcttttgctacaccaaaacactactctagatctaagtttgaatacatacccagtaattggtagtaaaatataaaagctcttacaaataatatatatatcaaatttaataataataataatataattctttttcttgtttaaaaaaattattcttaaaaaataaaaatatataaaactaatctttaatttattacataattatcatttaaaacaattattacataattacaaaaataacactaatactcatgtttatctcagcatgagttccgctgcaattttatcacggacaactcccatttcactctcatctcttgctaagttgatattttgtacatcatcgtctacaaaatcattatttgcttcatcataagacggaaagtccatatcattaatagtctccctcctaataaaattatgtaaagccattgaagcagtaacaatagctacttgtttatcatatccataacttggcattcgatgcaaaatttgccaacgtgctttccatacaccaaaacaacgctcaataacactacgtaatgatgaatgagcatggttaaatacttctttatagccactaggttgactaccttgttgaaattgaggaagatgatatctttgccctttatatggagctaaataacctttcatatttggataccctgcatcaactaaataatacttacctgcaataaaataaaataaaaaatcattaaattaagtttcagatcatattcacataattgatattaaagtgattacaacataccattgggtggtttaggaaaatttagatttgtatttcttaatgcttcaagaaatatacgagtatcatgtgctgttccttcccatcctgcccacacaaatgtgaacagcatatcaaatccacatacaaccataatattttgcgtaggacaaccctttcttccaatgtatggaatttgtttatctacgggaagtgaaactcgaacatgtgttccatctatagctccaatacaatcctattataacaatttcaaaaaaataataaatttaaagattcataggtagtaacatatatatata

SEQ ID NO: 297597 - DNA, 1506 bp, Cannabis indica
ttttcttttttgttattatagtattctttttctcccaaggcgtgcatatgtattttttatggataaaaacaaggaatggtgggaactcaagggcaccccacaaatctaaaagcatataaatctcaggcaataggaatgaaataaactccacacaagatacatctatctatttgagtggattgctctgtttaccaaaaacaatccaattacccttgtagtagtggccttgccatttatttgggaccttgacacatgaccttgagaggtaaagggtcactttcgataatggctgcaaccccaaggattatcttgcaagaagatggttggaccaacatggaccactaattaaaaataatgacaattatagcttttttgaggaagagaaatagagaacaaggcacttgaaaaagaaattgatacaatccaaagattatgaactttaaggctgctatgattgcacctcacaaagtatactttaaatccaaaatacttctaatttagcctttattgagagcaattttgtaatacaaaacccaaaaaagggaaattaattttccctatatctctttcaaaggtaataatagggccaaacgcaactagttcacactataaaatgttacatgataaaaaatgagtcagatagtttcacaccatcttttccaaaaacaatattcgttttaattaagcactaaaaaagagtctcactgaatcaataacccctaattctttaattttaattttataatattaaacaataatatacatgttaattgttgatgagctaagttcatgcaataaccccaactactgctgatatcataggaagatattctagctactagatcatactccattaagttaatctttttaaataaatacatagctcaatgtaaacgaaacttttattagcaaaaagtgttaataatatgaaagtacaatgaacccaatactcccaattaagagaaagagggaaaggaaaacaaaatgtcaatgctatacacatcaggacaactacccctattagccaaaaggtttggctttattaagtcactatgttttgttagagagattgtacgagttgacacacaactagagtctagagtctaaccaaaactatgttctaaataaagcctggatttggttacaataaatcaaacaacaaggaaaagcatgtgaaatactcacttttgcccagttttttcccccaatacttttttaaggattacgtacacaaaatggcaaagaaatcaccaaatccacaaatccttatcctagttttatagcccatctactcaaatactgtcaccccatgataaaagaatgatgaggacaccctcactgaattacacaccatctccttctgcactacaacctgagagagactagggcccccacaaactaaaagccgaatcggttcaagtggggtccctttgtggtgccaacagactcatttcaaagaacaaataaaaacgaaagtaacgcctaaagatgactacaattgggaac

SEQ ID NO: 297598 - DNA, 1949 bp, Cannabis indica
aatttttttaaaaaaataagttttggtgatgtattttaaagatgtatggtgtaatataaaagtgtattgtaaaatagaaaaaatagagttttattgttttagtaatgtattacatgtggctatctaacagactttgatagttcaacgatttttttttttaaattttcccttacggatcacgggactaaaaaaatcacgttggaaacactcgtgttggtctgtagggttagtcgtcaatccagaaagaagctagagtgacgtactcgtgtataagagtcattcatttcgtgggtgtaagggcctaatggaggcttgaagcgggaacgttacatacacagtctcagaatcatcacatatgaccttccccaggcgatgtgggattgtacagctctcggtctttcccctttggatcacgggcctctgactgtcacaatcaggttgtttagatttggagtcaattgatttgctgctcctgaatttggctaccaactttgatcattggcagtttcaggtgtagaaaccatgacttgcatctcagttatagcagcagatccattgaaggattgaaaagactcatgtcttgtgaagaatttatcaaatcgataaaagcattattttactatttggccccgtttgtgacatacttggcactaagttttaggatttgagaatcctcttccaaaacttgagaaaccaccacgaaattcacctcgaggtccacgaggagcattagtaaaaggaggataggaaggtggatagaaattactataacttgttgaggaatgtggaaatccaccatatccagtagaatagcttgggtagtttcctcgaaaagatccatgaccacctgtgaaagtgccaaattatatcagagagaagctttggtgaccaccacgggacataggaggctttggtgaatttggttgagctgcaagattcacctctggtttgaaaatatcaagatcagattcagttgtctcatttcaaacttcttgagccatgagtaacgattcaacttcagctacagagtaatcatcttttcgagtagacaaagatgttacaaaaatagagtaatcatgtgtaaggccattgaaaatggtttcgatatgatcttcagttgaaagaacatgcccaatgaaagtaagagaatcgacaatgtgcttgatcttgagtaagtaatcatttagattttcagtgagcttagtgcaacgaagttgagtgccaaactaactgactttagcaagattttcagctgagtagtactcttcaaaagtataccaaatctgtgcagcactattgcatccaaccatgcgagtgagaatcttttctgtcatggacgagagaagccatgatacaagaagtctgtcttgaacatcccattcaagaaactcttcagaaattcgatcctctactgcatcttttgatgtcgtatacttgggtgtagctgctgttgaatcaaggaatttgagtagacgatgaccttttgataatagcatgaacctagtgtctccatggaagaaaattgttttcatcgagtttgatagaaagagtgtgattgaacaagaagaagatcttggtaactgattggatccattaggacgaagcgtggaatcggacaaagttgcacacgccattagaatgaaaaaagctctgttaccatgttgagttgaagagaacgaagaacagaggtgaataataaaagtttttttattgattgaatgaaagagattacacttcaatgataaataagtcagtgtatatatacaactgaataagaaaaaaaaaattagttacaataacagttaatcatactaacaaaagcaactgaaaataactaccatcttttgactgatcctaacattactaacaaattttattctcaacagtaattaataaactttatagggatatgattttgtcccgtgatgtacttttacggaatatattct

SEQ ID NO: 297599 - DNA, 2805 bp, Cannabis indica
gacaacatggtaagagtacaatacaaattaactatgcatgaaatcaatcaataccatttttttttttttttgtttgaacaatgaacatatcattgaaataattagagagtacatagatggaatcagtctatcttgttcactgatatttaatggaaacctataccaaaactggagtctttgaaagagcagacaaggatacgaaatgatagttaatagctggcataaaataataatcactttgtcaaacaacaatgtagggatataagtgcaaacagtatttccagtttaacttatatgtagctgcaaaatcaaattcagttcgctaatttatccttatgtgaaaaatgaatcttcaacaacacaagccaggccatttcatttgttatttagacgattttttttttttttgggtaaggaatatttagacgaatttaagtgcttacaatgtcttcaagtttgtaagctcttgaatgtactttggaatttcatcattaattaagcaattcctcaataccctgaatcgaaaaaaatcagtgcaagaacttagtaagtcccggaaaaccatggaaatagtctcataggataacagcagcagcatttcaagtcatattgaacttacaattctttcaacagcttcaactgtctcaaatcagggaaagttgtatttggtccccccaaatcagatattctcctgataaaaagtgtcaagtaattcaatcatagtattattagtacaaccctcctttggcaaaccaaactaaacctgtaattaacagataagcagctaggtctcacaattcagtcaagttttttaaatttgatatgctggaaggaaaaggaccctccatggaagtgccctgcatatccctgaaacaaatttagacttttaatttaagaaacttcccactattttgaaaatgagagaacagaaggaatgataaatgaaataaaaactcagtactcacagtctatcaagtttggtccagttcccaataaattcaggtatcttctctgatattctagtcccatctatcctactgcaaaccataaataatgtgagacatttctgaacttgaaaagaagagaaaaacaaaacttttgaactataagtaaacttctttgacttacaagtcggttaagttcaacaagtttacaaacgtctctggtattggtccagtaaaattgtttgcactcagtaggctgtacaagagaaaatgttaaaaaaaattgttcaacgcatatacggaataaatccaatctataacaagtttgccctttctattactaatattattattatttaaaaaagaagggacaagagtaaggacggcaatcttacagtctttccaagttactcaatctcccaatttctggaggaagagggccatcaaagagattattctctaataccctgaaaaaattaccatttacatataagaaagtcaacatttaatcttcactttgtttaattttaattgaagtatactgcttgcatgacttacagctccctgagcatagtaaattcaccaatccccgaaggaatggaaccactgaatcggtttcccaaagcagacctgcaccacaccaaccaatagttacaaaatcactgacttgtccggtactcctaaccaatgacaagtaattatacctatgaatataggtagtgatacaaatatttgataaaagagcacaaataacttacagaacgcgcaggggtgcacgagataagcttagtgggattgatccattgaggtagttgcgagttagatcactgtttagttattgaaaatactttagtcgtcaggcactctaaatttataatcaaaatatttatataaatatgaatgtattgtaagtataaagtaaaagcatgtaagactcatttctctcattaaactatgaagtgctgtgtatagtccccacttatataagtaattttgaaaacaattaaagacgcaagttattaaatctatttatgataaagttatatattccagatttgataatctcttcaatgtcctctataggtaacatgttctagcaatattctataaaattaaaatccaatgtaaatttgcatctaagtttgtaattgagagaataaccaaatgtcacttacagctcttcaagatgagtaagacttccaaattcttcaggtataactccaactagattgagacccttcaactcgctgtcatatcatatatttaaatgttttgaaaaccaatgtcatacttcaacaacaaattagcttacttgtcaaacatgagcgtcaacaaaggaagcatcaaacggtaattgtgctacaagaaatgaaaataaaaataattgaaaaaaaaaacttacatggttttgacatggcaaatactaatagtactaccattttctggagaacagtcacatgcgacattgcttaaaacatctttagggacaattgtcttattgaagccattgctatctgtacaagaacttcgactgatgttccaataaccgctcagctgtaactttctggatattgtttgaagaatttgaactgtcacatgccaacatcagaaatcagaagataagtcatggaaactcaactaagtaaatcaatgtcaaatactcaaaatataatgtttttggtcaaacttggtcattggcattgcagattagcagtgccttgtttatgtggggtttatttactggtacaagtatcagtttgttagttaatacagttgtatctagacagttatttctgttattttgtgtcaggtcttgtacttccttttttcgacctatatatataaaggtcattttgttatt

SEQ ID NO: 297600 - DNA, 1958 bp, Cannabis indica
tatttataccgcaaattaatctataagtaatcatgtttgtttgctataagctaattattagcctcgttttactttaattcgatctaatgattgattgatttttagagagtcggataaccactccccttactaactcgtcaagacatttaattattcaagtcaaaccctcccagtgacacgacaatacccacttgtcgttttataccacatttggaaaagagcatgcaccaatgcctaacatctttttataaatgacactttgttagtaatatttcttaattttttttgtaaggctaaatattttcttaatttatataacatctactacttaactaaatcaattatggtatgaaacaaagaaaaatattatacactaataatactttttaataatttttgaaaaattaacggtgtccaaacaggcccactctgatgttccttcacaagactcgcttcattcaaagtaaacagagttatttaacatatttttcactgtcataaagttcatgactcatcacaaacaagtacctcttaatatttatttttaaattttttttttttaaaagcagttatttaaaatataacaagacaaattaaatcacagtagtcaatcaagatctggcccgtccttggtcattttatcacgattcatcctcttaaatcaaagtgacatctcagaaactattactaatatcaaaattaaatttattaaaaattatcattttcaaaatagtacgtagtacgcctaggtgtgttttgtcctttttttttcttttgattttatttcgctaacgctttgctgaatttatgtttggtcaaattaagggtttggaaattagatgctaattgccacgtcttttcattgggtatgagaaaaacaacaaaaattttgtagtttttcggtacttataaatttaattactggttgaaatacataattaacatgcttatgattagaacaatcgatttgatatttacattcacaaatttattagctgtgtacatatattaactacataatttttctattattaaatttagtatacaaaaagcactaccctccaaatttggaagatgaagtgtggaggctagagaaaatcggcaaagatggagcttttcacagaaagcttgctgcagaaaatattcatacagtacaagacttcttgaagttatctgttgtcgacacacagaagcttaaaaatgtgagtactatttaacttaattttctcaatttatatatgtatatgcatgtgcagaatatatttacttatattaagtgcctttatcaatattaatcatttcatttcattaaagtttcgatatcaattacttatattattttataatgaaaatggaaccagattttaggcattgggatgtcagaaagaatgtgggagatgactctaaagcatgccaagacttgtgtaatgggcaacaaaatgtacatttaccgtgtagatcatcactccaccatattccttactcctatttgccaactcctcaaggctgagatcaatggagaagtatacggctctaaggagttggacaataatctggtaattattaataattattactctttcaaatctctaattaattgtggtcaatgttatatctataaaaaaaaatgttactgactatatttgtgatccaaaactaccttttagtaattccttttgtagaagataaatatatctaccttttagtaatgactatatttcttttaacgttttttaggcctactttaaaagcttggtaagggatgcatatgccaattggaattctcttgaagtagcgatggaaggagctattgtgaatgagatcactcctactgtcctattaacacaaggtgtgtgtatataaaaataagggtaaataccattttggaccctgtgttttgtaaaagttacagattggactctgtgttttgttaaataacaaaatggaccctgtatttt

SEQ ID NO: 297601 - DNA, 2858 bp, Cannabis indica
attttcttgctcgatatgcatgcatattacaagcaaaacgacctaatgtttggtcaatatcacacattatttaactattttgatacgtataatagagctttaatttataatctaggtagcctcagtggttatatatccctattaaatatatatttgactaattgcttttctgtgcgtagttttcaatcaatatgggaaatcccaggtacgaccactatatatataaatggtatattacacattcacaaataagacaataaaaaaaaagtccactacaaaaagttgggtttagaacctaattagcttagccattagcaagtcaaataacatttcctcccccattttttttaacaatatgggagtggtcgacgaagaccattcccttcagtccaccaactctaagcgtttgatcatcaactcctcccatttacggtttaatagtttcttttattgccttttctttggtattggactgtctttaggtgtcattctcagcttatgttttcaaagcttcccattcaactcacaagcctccatttattcattcaagttgcctcaaacagactctccacctccattatcaccaatattgccacctttgatatcggctcctccattaatatctcccacgaccatgaacgctagttgtattactaataataataaagaagagaaagttggggttgatcatctgatgcatgagatgaaagatgaggagttgttttggagagcatcgatggttccgatgatcgaagagctgccttacgaggatgttggtccaaaagtggctttcatgttcttgaccaagggtccactgccgttggctcctttgtgggagaggtttttccagggacatgagggattttactctatttatgtccacaccgacccttctttcaacgacacaacactaaacacttctgtcttctatggtaggagagttcctagtcaggtgatcatcactccctttcatctattttgctcctcattgataataagtactttggttacaaaaaaaaaaaaaacgtaactttggttcctatatatatatttgacaattctaaaagttataactttctctcaacaaaaaaataataataataataataaaaaagaaagaaagaaaatttcatttggccatgatttatattgagcaacactttatataaaattagtattgaaaattaaatcacattatatatgtggcaagactaatgtaatagacaaccaccattagagatgttctaatattaagtaacattattgtgattgtggccaacaggcagtatattggggaacgacatcaatgatcgacgcagaaagacggttgatagcgaatgccttattagatttcaacaatcaaagatttgtccttctctcagagtcatgcatcccactcttcaacttcaccactatctactcttatttaataaactccaaccatagcttcctcaactcctttgacgacccaagaaaggctggtagaggccgatacaacccccaaatgtcccctcacatcaacatcacccattggcgcaagggctcccaatggttcgaactccgtcgagatctcgcccttcgcctcatctctgatcgaaaatactaccctatcttccgagacctatgtcgaccctcatgctacagcgacgagcattacattccaacgcttgtcaatatgctttatgctccactcaactccaaccgaactattacttgggtggactggtccagagggggccctcaccctcgtaaattcggttgggttgatattagtaccgagcttcttaataggattcgattcgggtcgtctaattgcctttacaacggaaatgttagctctatttgttttcttttcgcaagaaagttcttaccgaatactttgaaccctcttctgagggtggccccatccttgtttggttttaattcgtagctacatgcactagttgatctattctattataatggaaacattttccaatactttttttttaaaaaagttaaatgaaaaaattaactatatttgtaatatatgacatttaaaacttcatgtacttagatctaaaaaaaagttccaaccacaatcaatgaatgaataatatgttctaattggcaatgagatgaatagtccattcatcttatgtatggtatttagttttcacacacaatgcgggactctctaacagtctttctcaagatggtggttattttttgctcactcaatttttatccaaatgatgtagttcaagggggattggaaaagttttttcaaagagaaactaagcttgtctaatgtccttatgattttgacattttcagcctcaaaaatagttcgcgagctctgttacgattttccaataaatttctaccagtgaactaacctacttgtaaaaatctctggcaaccataaattatttcttgaaaatttattggaaatcatgctagttccagattgatcttggcggtagcctctttcaccactcttttgtggattcagctaaagtgagggaaaagtagaagcactttccatcgtcactaacgtgtgccaccttcatgagtctatcataactagacaagtgaatcttgggggccatcttgccctcatacaggtccatctgaggcatccaaaaattatctggtaggactgtatctaggattcgtttaacacacgtctctggtgttagggtttatgccctaaaaagcctataaagatatttcagattattaataaagatttgaacattttgatctatgcttgaatgttaaattattaatatttattattgaataatttatatgtaaatatcaaaaaattcttcattcatatatgaggttgttatttgtagctggatagagaacta

SEQ ID NO: 297602 - DNA, 2447 bp, Cannabis indica
cttccacctcttcctccttccaaggttattctacctatccatccttactcactgctgaaagaagaacgttctcatgtagaggaagttgacaaattatttgtgaaaagattcaacgcagagtacgatgttataaagaaagtagctaatgtgctttccactaggtgaagtgtcgagtttgttgatattgctggatggaatgaaccacttcctttgatctttgatcgtcaagtggttgctgaatggctctaacccagagtaagttcagatctcgttcaatttgtggtggacttattagaccaaaaggctgcaacttataacaaattaggatctggtaagcccgctacaatggtgagtagttattcagctgtaattgtagatagtcttaaaagctaaatttgtgcagtaagttcatcaatcaacctttgtttcaatcgtggcatccaactattttacttgtgtttgacttcatgtaatttttcttttaggtgggtctgatggcagacaggttctcttctcttgtgactaagctcacctacaaaattgaagtctaatgactgagctcatgaattaagagcaaaagagagaaggggcagccaatgctttaaacaaggccaaagctcatagtgatgctttggtctagaaaaaggtcaaggcttccctcaatgatgctgttgccaaccataaagcttctgccaagacggagagggattaggaaaagaggtacaaagaactataaaaccaaacaagctctcgtattcccaccttagaagagaaagttgtagattttgagaaataagttaaggagctcgagcaaaagttaaacgttgcttcctaagaccacgatcattagactaaggcattgaatgacaagatcattctcatggctaacttggagaagaaagtgaaacatcatcaagggatccaacagtaggcagagacttttgagaagggtgctttggacaagttgaaggtatgtgaggctaatttctaaactaagcttgacaaagtagaaaaagctcttagcgtgtttcagaaacaagccatggaagatgttgagaaggctgaagcttatactgagaaccttaaacaagtgaaagctctcttggaacagaggtttgctaaatctgaagtaaagtatcaagaagcattgagaaagtccttattggtcactttgttccatcttcgaaaaattaacaaagatgtgctaaatatgttggaagaaaatgatagagaaaacttccttcaaaaaatgttggaacttgatgctataaagaatgctactgatgaggttgttcaagatgatcatgagcccaatcttccaaacgatgccaatccagaggaatcttcctttccagcttcagagaatgctctagttagtgattttcaaactgacatcccacctaattcaaccacataaccaactaatccaactcaaccttgaacctatctcttccagcttcaaaactcttttttatctttaacctttttttgggggggacacgagaccccttaatatttttgtagagacaaaacgccattactatgaggccttaaatatgcaaatattataatttctatttaatatctaaattcaccaagtaattcatgatccttgaatgaatttattttgctaagttattctcgtttccatgttccttgaggttctggttcctatggcctgagccttaggattatgactttatgcttagactttagctttcttttatcaaattaattttctaaattcactagaacatggtctgatggcttagaccttggaatttaaataatccattttataaaaataatttttagtaagtgttacttacttctagatccttgaatttctagttcaaagacttgtttcttctaattgcatgtctaattaacctgaaataattatgtttaagggctgaccttattttgtttcaattaacttgaattaatctttttgtagcctaaacttattttggtcaacctgaattgacttaataaacttattaactataagaatgtggtaagatagttgcttacttccaattccctgaggctctaatttcaggcagtactttttactcccatacttaatgttagttgttaatatttttggacagatataagatatgctacccttaaagtgattaagagtgtagactcttggtcacttcttacaaaactaaatatttaaataaacatgccttctatttttatttaattaattcctgccctgaggcatatatggaagtcgagcaaaaaataaaatgcagaaaaagaaaaggaaacgaccacccccagtgtactgatcgtatcgatgcgattggtctactttccatgctcttagaatttgtgatccattaatttgttttaaatgatacgttccatcacatattatttttaattttatatggtccttcccagtttagtccaaggacccccactcttggctc

SEQ ID NO: 297603 - DNA, 3818 bp, Cannabis indica
tcattcagaattcgccaaatgaacaccgattgtcttgggtgtagtttaagcttccaaagaattttccaaactggtttctcacagtgaaactgagattgctggaatgccaagtacgcatttttgaccgagaactttccacttggaccaaatttccaaaacagagtgtccccttcatcctccaacaaccttatagattgaattgcctcagcaacaccaggattaaaacaaagtttgataaggtcttcattccaaatgcgagtgccaggtttgaataaatcagcaacagtagcgaaagtatgagtcgtattgtaagagaagctatgttgcacctatttgggacagtaccctggaacccaaggaactgaccaaatatcagtgttcccactcccaatcaggcaacccacaccatcataacagatttttcgtagcctccagaatacctttccaaacacaaggaatctccattctgtttttcaactctccagaaatcgaaggtatgacaatatttagcacccaaaatccgcacccaagggttctcactttggcacagcatgtgccaagctaattttgctagtaaagccgtgttcatatcatgaatccttcttattcctaaaccaccatttttctttggttgacagaggtctggccaacattttagggccaagtaacgcctgctagagttgtcttcattctgtcctttccaccagaaacgtgcaaggattctgtcgatctcagaacagatagatttcgggatcataaacgtcgccatagtatagcacggaatgctacttaacaccgaatttatgagagttaatcttccagcctgagatagttgtttagccctccagccctcaagtctgttaaggatatttgtcttgagaaaagaaaaatcatgtctctttctggccgagataaagaaaggattgccaaggtatttctcctgcttgcccaagaggggcatccccaagatactaatgagcctctccttttcctcatatttgatctttggagaaaagactacaccacttttttttttcttacttatgcattggccagaccatcgttcatacttctcaaaacacgcaaggagaggtgaagcttcccgattatttgctttgcagaagaatatagcatcatctgcataaaatgagtgagtgatgggcatagcattccttcccacctttatccccgttaattctccttttgcctcagctttgcagatcaattttgataacacctcactacaaagaataaaaaggtacggagatagaggatccccctgtcgcagacctcgctccgggtatagtgcctttaaaggggctccattaagcagaacagagaatttaaccgaagatacacactgcataataaggttgcacgcctgttcgttgaaaccattcgcctcaagaaccctctgcaagaatccccactcaattcgatcatatgctttatgcatatccgttttgactgccacaaaacctgttttccccttaattttcttcaaagcatgcaaagcttcagaagccaacaccgagcattcagctatccatcgatctttcaagaaggcagattgaaaaggagaaatgagattatctagaatcggcttcagtctgttagttagaatgtgagcaattatcttgtaaccgaagttgcaaaggcttatcggcctaaattgatcaaactttgatggactctcacactttggaatcaagcatatgaaagtgtggtttaggtcctttgccaaaactcctgagcgagaaaaatcctgaaccaaatttccaacatcttcttcaatcgtgtcccaatatttccgaaagaaaattcccgagtaaccatcaggtccgggagcttttaaagggtgtagtttccacacgatctcccttatttcttggatagtcaggattctacaaagatcctgattttcactagcaagcactctcttctcaaagagaccttcaaactcagaatcaaaagtcggcttggaacttttgtacaaatgcttgaagttttctgtgaagtagcagccgatctcattcctggttcttttccaattaccattgtcctcctgtatagcccatatgtgatttcttcttctgcgaataatcgtggacgcatgaaagaattttgagttacaatctccttgggatgtccacagctcgcgggatttctgtttccagattcgctccatttttaattccaaatcagtgatctgtaattgaatcaacctttgttcctcagccaaagcccccagggatgcttgaagaaccgcaagtgtgtcatacaagcctttaagttttctatcacagaaaccaaaactgttccaattctattccttcagtgccgttgaagttttgctcagcttgcggatcatcctttatctgtaaggaacattacacggctccttccagactttttcaataagctcagcgcacgactgctcagctgtccaaacttccaataatctgaaagggtactttagcttttgttgtcgcatacaagtgtcgaacatcaagggggaatgatctgatcccaggattggatagtgacttaagcctgttgtaggaaactgaaggcaccaatctgagcttccaatggcatggtcgagacgcttccaaactctatcatgtttttcccgagcgtttgcccaggtgaacgctgatccaatgtagtccaaatcaatacctcctgtttcgaataaaaagttttgcaggtagtaaccttcattctttgacactttccttcccccatgcttttcattctcatgaaggataacattaaggtctccaatcatggcccaaggctttccactttcttgcattactcttcttagctcttaccaaaagacatctttttcctgagaataaggagttccatagacacagtacagaatccaagttttgagaccatacaccggattcacatttagaccaaagcccgactccaaagtagtagatagttgaacgttcacacctcttttccaagcaacgcagaaccccccagctaaacctctagctgggatgcaagccacatttggaaaacccaatctattacagatgtttgtcatgaaaaccccccccccccgccatcaacctttgtctcagtcaagaaaattaaatcaactcctgccccccgagaaaaactctgaagagttctctctgccgcaggtcttcgaagaccgcaggtctctgccgcaggtcttcaaagaccgtggttgcagcatgccatctaagatgaatatgatcttggatcgagatagaagaataccaagcccaattctttctgttgaataatatacttctatgattaaaaccaaaatggtaacactttttaggttatttatcttcatcttttaaaaggcataagttggcaaaacttaccctagaaataggtacatgtgaccaatattaccatttcttgaaaaatagattgtactcaattttttgaaaaaaaaaaatccaaaactacttttttattcaagctaaagaagctaaattaagttaatttatagtaggaagtccccccataaatacattttggttctatttgactaagccttatgttgaatgaagaatattttaaccatttattatttaaatgtatgaagagatatgcatacatacatccgaaaatatattaatctataacctatataatagtggcaaaatatattttgggtttccacattttaaattaccaaaaagtcctcatttctcactcttagtttattatgttgaggttgttcatagacaatacatgtggtaattttttttttaactaaattatttattatgttgaacgatttggtttgatttattaat

SEQ ID NO: 297604 - DNA, 4747 bp, Cannabis indica
tggctgaagcttggatggtcatctccattgccatctttgccagctacgaagcttgggtttgctgtgtgtagtaggacttgaatagtgaaatattgaatgatggtagatcaaaggaggagtttgtgatgaggaataagtggccgaaagatcaagaaatcagtggccattgatgagaattgaattgaagacattgggtctgtgatgtccgatgtggcattttcacttggccccatctaaacccacgtggtacttttgtggtagctacagttttgtcttaagtttgtgaaaataaatggagtttaatttcaaaaaaaaaaaaaatggagagatttgactagcaccatcccaaattactattaggtaaatccttttcatttttctttttctatgttctttagtttattgtatgaacttttatatgcatttgaagtaaaagtcagttgggtgccaaacactacagattaaaatgaaagtgaaatgtacagtagttattgatactaaaattttcaatgactgttggacattgtcattaaaatttaaagtgatagacaggagttgccattgacgacatgcagcattacatataaacaatatgagggtaatagtttgtatagctcattgaatttgaaagagcatttattcaattaccaaaacatgttcttaacaaggagcaaattcggtacagagagaagctgaaatgactcttaacaaggactaacatgttcttatattggaagaacatgttctattctataccaattctctccctcacgttcttgaatcttaagtccaatatcatgaccaggcataaatcccaacttcaagcttttgagagattgcactggccataggcctcttggaacaatcttcaatttacactgaacaatctccaattctctcagatttggcattgctccttcctctattctcaaggattctactgagttcatgaatgagagcttcaacaattgaagctgaacaaagcctccacttgagcaagtgatttctctgcctacgtatgctgcatgctttagtttcaaaactctcaggcttctcagtttcccaagcgtcttcatgggatcttccattagccaggattgtgtcaaggtcaactcagaaagatttgttgggaagtattgtatgtcaaacatcttttgcatactccctgctaaatgtatcttgtaaagatgagtgaggcatgacaaatcccactccggaactgctgcatgaattgtatcctcggtcataagtcttgttgcattgagctttaaacattcaaggcttttcaacttggcaacccaatttcccaagtgttctttcttaatacaaagacgaccatgcaaactcaatgatctcattgtggttagcttgctcaagaaatcctctatatcacttctactaatctcactgataaataaaccctttaatgtctggaggtcagggagatatgtactagggatggtgggtggtattgacaccattggttggacatcactaaaatacaagtgtctcagttgttgcagcctcaaaatctcatctgggaatggattaattagagttgatctcagatctagagtttccaaattggaaagatagcgtagagaaggtgggagatttttcaaccaagtacctctcagtcccaaatatcttaaatgaataagctttccaatagctgagtcaagcttagatatatatgaaccttctaaatcaagaactctcagtagtttaaacctctttacttgaactttaactggctcattgaggtcaaagcataacaaggagcgtaaattcattgttgtcttcttagatgggggaaaattgaagtgtatagcaagtcgacgacttcttgagagggtccttatagaaccagctctactttcaccatggatgacatgaagaaatctgtcttctgtagcttttgctatagcgagttctctcaaaagatcatgcatacgacaagttttgatccttccgtttgagttccttgtagcaacttgaaccatgcttcttcctacaagctcttctaagtagtcttcagagacatcttctattggctcttgacctcttggttgcacaaatccttctgcaacccacaacaagatcaacctactagcagatatctcaaagtcttcaggaaaaagaccaaagtaaagaaagcatggcttcaggtagaaaggcaaatcaaagtagcttaaagctaagatgtctgcgcattgtatagtgtcttgtcttagctgccaatgaacactttgcaaaaccttgagccactcactataggaagcttcccttctcgacaagagtccacctagtactacaatcgctagaggcaatcccccacattttttaacaattgtttttccaagctcatcagtccatggaggcaaacttgtaactgcattccattgtagggagatctttctggaaagtagttgccaactttcctcatcattaagaagacttggttcatggggtggacttctcggatcagcatgtatagcaatatctttgaaacgagtagtgagcatgattcgacttccatttttcgagtcaggaaaagcatctttcagattatcccacacttgtttcttccatatgtcatccaaaactatgacatatcttctcctctgtagaaacttcgaaatttcttctaccaaatcttctctatgcatcttttccaactctatcttagaaaagcccatgacttttttcgccaaatccctcaaaacttcttctgcactatattcttgagagacataaatccaagcacaacaatcaaaattattttttattccattgctatggtaaatcatcttagccaaagtggtcttgcctaaacctgccataccaattatggagagtacagatcgacacgactgtccataaatcaactgagattctaatatttttatgtcttcatccaaaccaataatatcatcctcaaaatgatgaggagaagatattctcctctcctgtagttcactaactgttaaagttgccccttcactcttttgccttatgttttcaataccataagttaatttgctatctgctatttcatggatttttgatttgatcctactgatattcttgttgattttgaagttagaaactaattcgcataagaaaaatagatgagagtacctcttgaaacacatgacaagacccttctctctttgtccatttgttttgtaaatataagtatcaatgaaatcatctgcatcaaaagcaacttctcttatatctaccacccaattgctaatccttgcatccttatcctgcttagcatctgcatctttgagaaagcactgcattcgccttagttctgcttcgatccattcgacatgttccttcccttttgacaaggaaatggcttcctccataagttggcttgccaacttttctaccactaggggaacaacatattctgccatatttcctctccaaatcaatcagaataggttttcacaagtacttggaaaaaaatattttgatggaagtaaagttagaaaagaaaatatgcattacaatttgataacatctaatttgagcaagctcttaaagttgttcaagtcaaacttatttgttggaaagtattaattacctaatctaaacaggtttgaaacaatgtaatatgttctaatagtcacctaattgttgtattaaattctttttatgtaagaactttcaactaaagtttttttttttacttttttttttttgggtctataatccttgcatgtggcaaaccaagaaattaaaatactgatttaaattggaaagcataattttagtcccactcaaaatgatatttactttagcaagtagaagtttctttaactaaaacaccaagctagagaagcctttcttgactataacaccaagctagaagcctttcttgactataacagcaagttagattgacacatggtgtttcacaataagtcttccaaaagctctagctaacttatgccgtaaatctaaacaaagatttgaaatatcacttttcaactaatgttattaatggtagatcctatggcaggttttacacattacgtgaaacacatttaagtaaaatggtacattattataggtggaagtcattcatttagtggaactgcaagtaacaaagctaattccacgtaagcttatgcagaaaagtatcaatacaaaggaaccaaggaaacattaaatcaatgtctggtagttggtataaaaaataacttactgcacaatcacattacttcaaatggtaatgataataatgcatatcatattatatttatctaaatacatagaagaatggatgatcataagaaacaaaagtgagtggcttgtttttgtctttttcaatttttttttatttgattttttttctttaatataacatttttaaaaatcttaattatatatattatctcaattttcctttttattttaatctcacttttgtttttattaaatttcaattatttttaatctcaattatatatattttaataattttttttgaaaaaatcttgcattttttgagttttttttaccccatttattttaaagaaatattgttttgttttaatcttatgtaattcattttttaaaaattatatatatttaggtaaatggcggcaaaactctcaaaacttttatttggtttcacttaactcccaaaactcaaatttgggcggtaaaacccccaatactcgtattctgttagcaatttaccctttgcgtccattttaggtgttaa

SEQ ID NO: 297605 - DNA, 2038 bp, Cannabis indica
gggtttctaattgggtctccgcctggccctggttcgacaaactttccctccaatgcttgctttagacttcccaactcattgtcagccacaattagcttcaagcactctcccaagaactcaaatagttttctcagtttctccctgtctgcgcggtaaaatttggtgctagataagtagtcaatccaaggttcattgatgccaaaaccaagaattgagctgagtttatcagctacatcaacaacttggcctttgttatttgttgtacgctccacgaatttggaaatcgctcctcgtgttgcttcagttatttgcttaagaagctcaacatccttgagaactcctttgtcacttcctctgtagatatcctctatttctctccccactgtctgagctaatatggatgggaacgatgtaatttcatcttcaggacgatccagcgctgcaatgttgaccagggttgctactgcttccatggctgttggaggctcaccaatgatatgaaggccacaagggagaagacgggattcgatctccatgattttggagtacacttttccaaccacactatctcggtctttaactgagagttcagtgccttcatcaggcaggtctacatccttgtcaagattacattgtttggctgtgctgatgattgagctgacaatctgtgggccacgaccagagtctttcagcgattggtacgaggagatgagttcacttaactgcttaagacccttgtagagccctgcattttcggctggtggagtaaggtagctgatggtatttgcatagctacgacgtttggctatggtagcttcagatgggttgttagcagcataataataaacattgggaatgttcccaatcaaactgtcaggataacaggcatcactcatccccacttgttttccaggcatgaattcaagcgagccatgagtaccgaagtgaagaacagcatcagctttaaagatcttttcaacaaacgagtagtaagctgcaaagccatggtgaggactagcagacttagagaaaagtaatctcataggatcaccctcatagccaaaagttggttgaactccaatgaagacattaccatactgttttccatataccaagagattctctccatctgagttcaaatttccaggagccttgccccagttttcttccaacatagtggcatatggagttagtttatgatattcccggacccccattttgtaggcaacgttcaggtttggactgctgaattgagcctctttgtcatgaatgacttcttcaattaaagcctctgaactctctggtaggccctcaacattgtaaccatcttctttaaaggtctttgagaactgagaagatggaggcaaagacattcaggtaagccgcacgttccaacattcccttgtcgggagggaaactgaagacagtgattgctatcctcttctcttcctgcataagaacattgaataacaatactcagcaaataaccaaatgttaaggaaattgattgagacattggaataaatctaactccacaatttagaatttgtttcaagcaacatttataatgccttctcagcaacatacaattgtaaatagtaataataaataatatctatagagtctcttttatttgtaaataatatctaaataaagcatcaaggttttcatatgggcatctctcatatgtaacagcttctatcttaacaaagtaaaatcacagtttccccaaaaagttattacactgtatgagctcactattcatcattagcaatctaagctctatgaatctagaacttttgcagattaaagaaaacaaatacctttgtcttctttgtcagttcagcccatttgattgccctggtgcacagttgttcaaccctcttgtgaagggcatgtgccttccctgaaaccattataacattatttgttaatactaagaaatttgagtgtgagaactaatagaaccataattgtatagcaataaagaaaccccaaagtttcagctcatgataaactacttggtaaagacatttaa

SEQ ID NO: 297606 - DNA, 6996 bp, Cannabis indica
taattgcattattcattctcttcatcctttactgcgattaaatgttgttatcccaatttttgtccacttgacgtgacatgcttatgtggacaatattagcgctatgtggtaatacagctcaccaacaagaagttcatgtcagcacctcagccaacgggtatcctgacactcaaacatgacaacaagtgatagatcaactaccttaaaagagctggtggccagccctatggtcggctagcctttggacaacacaagaccatccagcctgctcgctgtagggggctggccggccagaattggacatggcaagatcctgtgcacagttttacatgtggactgcgagttggcttgggaattaggccttaacagcccaataaaaaagctaaaaaatctctatgtttaaaggaaatttagtgttttgtatttaatatatttaatatacaaatatctacttattttattgttaaattcgagtttaggctctcctatataaagggccttaattcaaccctagaaaacctaggcattaagtgttaagcctcattctaagtctctaagtctaatatctctctctcgctctctctctctctctcatctacacgcccatataacattcacaacactggtcggatggccacactaaaaagattcgtttcaaaatcaatagagaattgtgttcctttttttaacattctctgaggtaacagaaaatttgaatggacaaaggaatgtgagaatgctttttaataacttaagaagcaacttgcagaaacccccacactctcaaaacctcctgacaaagaagaattaagaatctaccttacattcaccgaatacattgtatcctttacgccaagtctttgtaaagctagatgcatgcatctagtcagctgctcaaatggaaattaagttaagggagtacaaaataacttatcaaccgcgcacaacagtgaaaggacaagctttgtcaattttgtgactaaatgcataggcaagaaggcagacaattcaaaggataatgtcaagccaaaaagggaggaagaaaaaatagcccactagaagaaagctatcaagataagccaatgtggaagttgcatgtggatggattagccactgactagttttccaaagctaggacttctctgatcacacctgggggtgacccttgcacagagcaatcatgttttcatttaaagaatccaataatgtggcagaatatgaagcacttattgcttgtctaaaactcatttgggaagttcgtgctaaatatctagaaatatataatgactcacagttgatggtaaatcatgttttgggggaatacatggcttaaggagaaacaattgtggcatatcttagtaagatcgatgacctactcgcacaattgaaagggtactcaagccaattccaagggaagaaaatataacagctcatgcgctagcacagctggcgaacaagacaataacaaacaagaaaactttgtcccaatctagttttgaaagatctcaacaacacatgcacggaggaaatcgagatgatagacaatgcaacaaactggatgactcccataacaacctatcttaacattggattacttctgagcaataggaatgaagctcaaaaaatggttagaacggtggctcgatacataatgatggatggtgtaatgtacagaagaggtttccccatgccactattaagatgtgtaacaaatgaagaagttgcatggaacttgtccgaggtccgtgaatgcttttgtggcaatcatgctgggggcaaagtttatttaagaaaatactaaggcaaggttacttctagctgacaatgattgaagattgaaaggctcatgtgaatgacaaatgcaagagattttccaatgtcctctaagcgttgcccaatgagttaatgcagatgcaaagtttgtggccctttgccatatgggggaaagatctgattggacaatttcccaaagaaaaaggtggagtgcaatatgattacttcaccaaatggacggaagtcgaagcactggcaataatcacatccaagaatgttttggaattttatggtaaaaaatattatatgttggtacggactttcacaaaaacttgtttcaaataatgaaaaaaaaattgatatccaaatgttcacagacttttgcacaacaaatggaatcataaagaatttctcagaagttacacaccccccaaaaaacgaacatctcgaagtagttagtatacttcggaggaaatggtcggaagaactactagaggtactttggtcatacagttcaactaaaatgacagcaactgggcaaacaccttttgtcatggcctatggctatgaggcaatgttacccgttcaattagaacctccatcccattgaagattgacttacgaccacgagactaagcatgccctcctagcagaatcagcaaatctaaagctactacctcaaaaacaaaaaatggcttggtacttcaataagcaagtgaaagaaggaaatattttttggagatatggttctcacaagagtattcctaaacaaaaaagacagtttagcaggtgtgctcagacctaattaggaaggaccatacctagtacctaaagttacaaaatctggagcatacaaacttggttcgtatgatgaaaacattgaattagttctagtaccaaggtactgcaatggtgaacacctaagaaaatactaccaataagtgcaaaaggtttgtagaccacacaactttcacaatgcttgaacaccactctttagtgatggccttctgagcaagcctcacttaatggttaagaattcaactggtaataaggtcaggtgaccatttcacaagtacaattatttcaaaaacatttctcttgagtgatgtctttaggtagaatatactgtttaaattagctaaagatcatatagatcatgtaatagctttttataattcaataaatgtacgttaccgtggtaacaacagatagcaaacaataaataaataaagatattaatcatcattcaaattgtgtcaattttatgccttttcttttgtaaattatagcaagttatttaaatacctaaaatgtgtacaaagggtttgactgaacccaaaactaagatagatagaataaaacttatataaaatgcaaatgaccaagagtcaaaagtctacttggtcacttgagtgcaattacacccatacaaccattggtaaaaaacaagctcaagaaaaaaaaaacaaaattcagaaaaaggaaaatatttatatttagataacaaagcaagataagtttgggattaaaagtttcccgacaagccagttgtcttaaacaaaataaaaatatttctccaagttcaaaagctgcttggtcagccatattgtactagcaaaaaggctagtaggttgaacaaataaaagaggtttaaaatttttattaaaaaggagtcacaagctctgtttactaatcaattggatcttgagcgacaataatggagtcttcggcggtagatttttctagctcctggacggtaaaagaatcttcggtagctttccttgcttcttcctcagctttttgtgtctctcagaagctgagaaagctagcacggagatcccccttgagatattcaaaatttccttctggattttccttctagaatttgtagaaaatttcgaaggcagttgattcatagtctttaacttccttctaaagtttctctcgctcagtgtcaaacgactcttacaaggtagccttctccctgatcagcagtgtaatcttggcttcctagctttaaagcaaggtacgaagagttttttgctagtcctttagagtttgcacctccttggacaccgcctcaggatcctcctcgagtttggtcgtggatggcatgtcctttttctcttgcctaagttcttcaatgagcttgttcgtagcaataagtttcttgttcacatcgccaaactgatggatctttttctcaaccactttctaagcatcttctagtgacttcttcaattcattggtggtcgtggtggcctttagagctgtacactttgctcaagcattagtgtatgccaacttcatattaaccttcacggtaaaacaaagttaaaacttgtatgcggaaaaatatatacaaaaataatcctaagacaaaacacttacctaggtaacctcctttaagattccactgaccagtagctctactggcatctcctcggccctaataagtttctcgttcacctcaggcattagacaatcttggcagaaagagagcatctctattttggctttttggtctatggttgaagtgtgggcagcatggcccaagcttaggtagtccaggcccctcatggtttgccccctttgagttcttggttaaggtgcttgatggttgggattttgaagagttcttggccggaggaaaaacatcaaggatgtttgtggaatcaacagtaaaattcctctcagtatttacctaaggagtcttggagctcagatcaatgcgcttgagagcgtcgtcaggtctgcttgctgcaattgattaatactaatgaagtaccatcaagctttactgaacaattttcttcatttgatattaaattcaattacatcattgtgagctacgttgaaagaaaaagaagtagtagttatagaattttctttttcatcaaagcttagctgaagtgatccccactacactaatgtcgtgttcgactaatagggtccacaccttagcgatagacctcctaaccaaagcatgacttcgccacatcttgtcggtccgagaggagattgattcacttgcacaaggtaaagtgaatctcactacgaagcaaactgtctagggaacagttgctttattaataatatcgtcttagatgctccacgttccaatatcgtagtaccgacacgggagtcaagtggaagtcatagaaaaatccaacctatttgtcccatgttcaaacccttttgtgatgacataagatccctccctctttcattaggagtcttctatgtctctttcttagtcaatatctttagaggactcatatgatacattttcattgttgctcccctattcctgatcattgttggaaataaagggagaatgttcatcatggctccattgtcctcagtggaggcattaaggatgattcttcttcaaatccttgttaatatctattcgagactcaaaaaaaagataagcagtgtattcggttacttctggtttagaaaatcctctgacattcttgacagcttcattgagcttaatgaaactgtcagctatgtctagatactcttgactagtgtacactataccgacaatttccttcaagatagtcctccttagagtgacatgtgtagagggagttgaaccgattgctcaagcgtaacatgtctccattcacccatgggaagtattagtactattggccattaggacctcaagcgaagtacgaagctccttattcatcacagaagtaattctgagtgttgagcagttgattgatctccactctccaaatctcatacccttcattttcgtggtagagattctgagttcttcccttatgtctgactataggttcctttctctttacagggtcatggcgtgctctagggtcattagacttgtgaagtaaatcccacagaggagattggtttcccgcattgttcgaatcacttcgagtagaattgtggttgttcctattagtcacttgtggtggacttataggtctatgatctggagtttgagtcctttcgcacactcattcatagctgtttccctaataggtgaccactcgatatcaggcagagatcccatagatcaatgttcccgagtataagtcctttcggacacctcgcttgtagttcccttttttggggaatctcagtgtctgctgcttttggagtagtagcttgactacctagagtggtagtgttgctttgtgtgatcatggatgattgcttgcttgaacttatgaattcttttcagaacaaagctcctagcaaagaaatcaaaatgtagttgggtaactcaagttgtggctataaataaaagcaccaaaatattgacgttgaaaaatggccaacaccagctcgctagattggcaagatgaataatgagtttacataaaataatttagagagacacaaaaaatttatagtagttcactccccgtgtcatgattgtaatagagctacgtctacttcaagtttttatttctcacgagaattacaagaaaattagctaagtgtgaaaattttaatttctagaagagaaactagagagagatgctatgacgttatgggtacttttttgaataagaaaaatgagattgtgtagctctcattttataagggatgaaggtcctaataaattgcaataaaataatcaaaaaaatatggaaaaatacttttaagctatttttgaccgtagatgatgacttgacggtgaaattgactccagaggttggtcgttaattttagagcttgagttgcgtttgcaggacccacttcgggtaaggtttagcctaaattagtaatttctctaaggtaaaatatggagtcgatagcttgagaattgcgattgaaatgtgagaaatgacatgatagagcattgaaatagtgtcaatcgaatcaacattgagtgagttatggccattttactgaaggctattgtgggcctagcgcccacgctgacatctcagcgcccaagttaacatccaacgcccaagttgacatgtgatgtcaactttgacgctgagtgtgtaggaaaacattttgggaatttattttttgatgcctaagatatatttggacatcacttagtgtatttctatgttttgggaaattcttagagatgttgttgttttgtaaaaatgggagactcaaaactacccggttaccgagtacatcaccttaacagaaaagtgaaaatatgaagttgtgaatttgactcttctaacttcatggctctcagttattatgaaa

SEQ ID NO: 297607 - DNA, 1799 bp, Cannabis indica
tttatatgaagtgtcacatgaaaatcacgtgaatcccacgagtataagaatttcgttaatttttcaataaggtcaaataaattttaacttgtatatataaataccaaacacaatgattcataacaaaattggtcttcagcccaatacgtagctagattgaacacacgtactatacatctacacaatttttaatgataaattgattgaaaattttggagtatgaagtacgatcgatgacgatgaagatgatacattataagaaatgttactactgtgctgataaaagtaacttttactagcgtattttgcaaactacactagtaaagaggtcaaagttttatgcttgcaaaagttctaataccaacattaatttgtcaactccttttgccaacacatcacaaataaattctattttaccaacacaataccaacttttaccagcacaaaaatgtgcggacaaaagtgacatttcttatagtgatatatgaataaattaattttaatgaaagaactaagacaaaattaattaatataattaacacatttttaagatattatcatgagttcatttacttaagtactagaaccctaataactcaaacgaatgtcttgttgaaaaccgagttagaaattgatatatactaaaaatcatatgggaatccaaaagttaaaagaaaaactattcaggaaccaaaaatcttaatttggcgtgggggttgtacaccgcccaagtatatgctcaatgctagtaaaccttgtacttgcgcacagggtccaatatgcaagtcctgtttttgtatacttctttacatttcgggtgttgatcagttaaacaactaaggaaaatacccacacggggaagaaaactacacttgggcactgaaacctgcccttagatcatgtgtagggcgcctaacttgcttttggggtttaacttgtaattttggtattatttttttgtcaagtgctaaaaatattattcacctcatctcgttaaacttaatgaataatagatattaaatattcttcccgaactattctaattattaagttgtggtcctcttattacttgttccttcctatgtgactaataaaaagtttatttgtcacactagacattaacatgtcgttgtcacatcagtgtcatttgtataaataaataagtaatttcctttcttcacttgtttttgtttaagaagatatgaaagcatacatctctctatataaaaacagtgtgttttgagctgtgaagtgggagagaagggattacataattgaagttttaaattagacgaccctttcatgtcaaattatgatatggtaatcaccgtttatacggaagttattactctattctgaagtcgatgttaagtttcttagttatcggttgtcttattaagcaatgatagtgatattagttgtctcatttgaaaatgagagtttgcagatactttataagtaccgaaattaatttttcttattagacaaatacttaaacttgttatttttatgtgatactaaaataattattttgaatatgatcgtgattatttgatcattcttcattattactatacattgtatatgagtttgtattgtaggtaaggaaaaatagaaggtagatgagccatgagtcaaaggtttttcactgctacaaaaatgggttttcccgacacttttaaatagtcgtttaaagtattcccgtcagtttctataatcgtcgcctatacggccgtcgtaaaactggcataataggcgacggttcaaaaccgtcgctaatgtgggtttctcgacggttt

SEQ ID NO: 297608 - DNA, 5370 bp, Cannabis indica
atatctattttaagggagtgcattggagagggctcgtcggatctgacagggaattgacatttgggattagaaattttataaaatccctgattaaataaaaaaactattttttatataatttaaatttaatatttatgtatggcagaatagtttgatttaccctttttattttgatttggaatttgagttcggatttggttttttaatattggggtggtggtaatggtgaaaaaaatatgagtttgtgattaatgtttgtgtttgattttttgattagaggtgtagtggtgatggtaggtgggtggtggcaaagcatggtggtgttggtaggtattgtaataaccacatttaaacatggcactaatcaccaaaggaaccacaccaacaggcaacaacccatgtttcaccgaccacaccctaattctctttaaacaaagctcgagagatccgcaaaatacctagacacgaaccataaaatcctggtcaaggaatcaccaaaccagtaaccactaccatcgactgaacctagggccgatccaaaagtatatgaggcctaaaaaaattaaatttttgggttcctttaataataattatagtattttggtgtagtgttaaacatttttaaaactcttaagagctaaatgttcaatcctccatatagctgcatattaaatatttctaaaaaaatgtaaaagtaaaggttgggaatcaatcccttaacccttttgtttaaaatcacactctctaaccataactaaacactattttgttgtatttcttattatttaatattttatctttatactgataatttttttcttcataattttgggactctaagcgtacgggggcccaaggcgcacacgcctggctcgtttcaccttagaatcgaccattattaaatggccagagacccaccaaaactaccgattcaaaaccatatatgaattggaccactttagaagaaaagtccctttgtgaaccgaagaaaattctaacgaaacacgtgacccatcgcccgagaatcaacacgacctagccaaagagaaatcggtaaccagcaaggacatcacaggaacaaagaagcaaaccatgataatagccaccattgaacccagtctcaaaggtcaaacacatagccatccccctgactatggcctcaaaccaaacccaaaaaagggtcggagagggagtgtgaaaaagtactagacgacgacatatgcaatacctagatagaaaaccctaggagcgggcccaacatttcaagccaattggaggtcttgggccaaaaaatttaattgagttttttaattttatatgaaaaaaattgtgttttttaattagaagaagagagtcaagaaactggtcatataaaaattgtggaggtgtgtgtgccctatccttaattgattatttctttcttaattaattaattaattaattactgttgtttatctcacttttaggcaaaaacccatgtggaatttggaaaagacaagttggctcttaatgatcaaattcacgtgaaccataataatgctcacacgtgtgagtaattaatatatatgaatttcaattaattaattgatgcttatgagtttatgacacaaatataaatatacacctggtttttccttgccttcaagggtcgcttccaatattaatggtaaaaactaatacatttatctaattattattacaaaaactttattatttattttgtatttttttttcttctctatatatactaaagtttgacttgagcatcctccccttaatttgaaccattacgagagaatctaaactacctttacaacattattaatacataagaaaattaaattagaacaaacaaaaggtagtcttaattattattcattatatatatagaaatttatccaacttattttaactgtttattgtatatactcatgtagtttcgaagtacaatttttatagtactacttaattttatttatttatattagataaatttaacaaaagaaatgttcaattagaaatctgtgatattttatgtagctatatattccacacgaaaattcttccaactattagatataatcctacattttttcagttggctcttattactggtttagataatgcagcaaccacttctcctttgtgatttctaattacagctccaatgcctaatattggtagtgatgagcattatactccatctggtgtgtaagtcctaagaatgacaagtaatattgatcaattcttttgttcagattggcaacaatgatgacattgatccacgggcattgcatttgaaagttgtatatatcatagtgttcttattcacattattaataaaaataaaatatataatttacttataaatgttcatagtagttatgtgcgtctgtagatacctagtaattttagggccgactttaagtataagcgagtcagactcgtatttagggtctacactttttgaaagctcaaaacaaaaaataaaaaattttattagtcttttatttaagtaaaattaagagtaatataaataataaatattcataacttagtaattaaattgtatgagatattatataatgttatgggttcaaacctcataatattttttttaatatttttaagagctctaaaatttaattcgtcttacattcatatattatcaagaccggccaaactagtatatttatagggtgtaaaggtacgttacgtagcaaaatatcatttaaattaaatgagatgattatagtgtgttttcggcggagttgaccaagtaataaggagttgtatatagttgggtcccttatatttttgcatgcttgatttatcatcatttagaaattttcataattattagaacacctattatgtatatatacatagttatatatataatcattaataatgattgagtgaagctgattagtagctatcacatttgtcaatatcatcacttgattaattacattacaaatcaaacagcacacacattcttttttgcccatataaattttatcttaaataatacatacacacaagtacttataattgcataataattttaatattgatgtaatatatactcaaccaaaatatttatatataccgcgattttttttattttgaaaaaaaaattggtatttattttttacaatttattttcaaaatttagacaataaaatgtattttttttttctttcttttttggcttcaatatatttatatttactgttctgtactgtatttctttttttgagctaatattgtattataatgtatagaaaattgtataatttgaatatatatataatgtatcaattattactctctcaatttataatatttgattatcaatttttttaaaaaaaaaatataaatgtctgtcgtatgcatatattataaatagaaactatatatcttcttctatatgattgggcttacccatatcaataaataatgttatttccattttcatctagatatggagtatctatacaaataaataaatatatatataaataattttattaggtacacataaataaaaatgacaagcacacccacactttaggtaacgaagacatgtcaccttaattaatcgaaaatgtactattataatttataagtctgcaaagatttgggcatctcccatttcattcatacttttgtccttctattattattccttttattttttttttctctcttttgttttcatatgtggattatttatagattggtgcaatattagatataagaattattggattgctgacttccaaatttacatctaccaattacaactaaacaattaactcaagttctactaaatttatttttaacaaattttagagaaccaattcctatcattatagtttacacttttttaagcataattaaagtaattctaagttatactcttgttttattttctgtacagtgtttgaagtatgccagaacttttgattgcaaaacacattattttgaactcttactcagccccttcgcattatcaatccaacgaatcaattgactcagatccacagcttttgagttccattccatccaccttttaacctccatcaaatacttcttactatattggtaaagaaaaaaataaatggccaatattctcattcgagtctccaaataataaacatgtttaaattttaatccaccaaaggttcaaatttcgtttttttttttgttactttcatgtaatttttttgttgttgtgttgtttgtatatagtaccgtaaaaatataaaaaaaaatatttaaacttaaaaatataaaaattttacaaaagataacaaattatgtaaatttcccggatttacaatgggtgaacaacacaacattttttttggttacataaaacataaaaagtgtacatgaaccactgtccttgtaatacattttgatgtttttggcttgttgcgttactactgacaatgagacccttcttggtggcctcctcgatcaaaatcatcacctcccaacttatctgaataaacatcaagcttatgaattttgatcgagtcagaaaattatgtttataaatcttcacgaattatgagcatatctctaatgaaaccagagttgatgtcgtttggaaaaagctagaaaatctctttgcgaaaagaacagttggcaataaaatttctctacttagaagacttgtaaatttgaagtacaaggatggtggtagtatggttgagcatacaagtcaattttagagtcttgcaaaccagctagttgccatgaagatgaatatggatgatgagatgcaagcatcattactccttagttctttacctgacagttgggaatcgttggtgatatcgatttctaattccacgccagaaaggactttgactatggatttggtcaaagatagtttgcttaatgaagaggccagaagggtagcacaaggtgaatcctcttcttcttctggggttcttgttactgaaaagcatgacaggcggggacaaagtcagactaaaaatcagcatggttttagaaggagatccgagtcttaaaaagatatcaagtgttatcattgtaacaagtcgagtcacttaataagggattgcagaatattgaaaagagagcagaatcaaggaaagaaacataacaaagagactaatacaatttccactgaaggtgatattgtcattgtatgtgatgatgggtgtgttagtcttgctacccaagattgtagttgggtgattgattctgatgcttcattccatgttactgctcgtagtgatttgttcacttcttacactactggtgactttggcactgttagaatgggaaacaattgtgcatcaaagactgtgggtattggagatatttgct

SEQ ID NO: 297609 - DNA, 1438 bp, Cannabis indica
ggatcggatactttgtgaacacccctaggtccgtccttgtctaccatataaatgaaaactagtctaattcataaattaagtattagagtcagtctcttattaatagtctcacattaataatatgtagaaaaaaaatattataagatgaatagactatgagtttccgatttttaaaaagatggaccataaaaagagttgttgtattagagttaaactaaactctaatgagtatcaaatttctaaaaaaaatgagtcataaaagagccgtttatgatgtagtattgtggtctgtggtctttaacttatattagagttagtcttacattactaattactaatgtatggaaataaaataccattagatgaataacttactcctattaccggttttgaaataaaatacaccttaattacatcttaccaaattttaacattaagttaacgtttaaattagttctaataacttattataagttgattgcactacatcatcctctccatagtgaatactcttgacaattgtagcgtgatattataggaatttttgatggtgctctcatatttgctgccgcctttcctttctatttgtctctctgtttttgcttttggttctttctgatatcttactcgaatctcaagtaagagacccgcttgaagagcctgaagatctacatatagaaggtcctaatattatatcaggctttttttaataggacgaggttgaggtatcattatcattgactttagtagaattgagtgaggtactgctgtccgatctatgaaggtctgaaaaggaatctgttatttgtgagagacaaacaaagctcaataattaacacttacagacctctgttttgtcttctttctccgattcacgtgattattattaattaataattgctgctgcttctgacaataaaccattttaatttgctttactctctgatgacctgacctctggctatttttttactaggaaagctaattcaaaatattaatgtctatatttttgctttgagcacttcctattagtcaccactccattgtttcacttagaatagttagagcatttgtaaatgcaattaatgtacagcattctcttctttactctattattcaaaatactttactaaaatgttgagagtgctctaagatttaacttataagatatattaacttatattacaaaaaaattactttaatggtgtaccaaacttctatgccaaattttgcacacaatataacataatgtaatattattataggctaattagaaattttacccattgaactttgatatgtaccaaattatgctctctgaatttttaagatcgttaaaaatgctccctgaactattaagattgtttgatttaagaatttttttcctattttagtaaaaaagtctgacatggatgaaaattcaaggacatgatttagt

SEQ ID NO: 297610 - DNA, 2442 bp, Cannabis indica
atctaaattaccctatatattatttagttttttaactttttctttttaaatttacgggtttggatttctcaagtgtatttttccagttagtttctatgtggattgctatatgaatttcgattacaatttaggttgttccgttaattgcaataggagttctatatttacgtaaaaattaatgacgaaaaaaattatttagaaataaataaaaaaaaaaaaaatcttcgttttttttttttgggttcaggtcttagatgcagacctaacttgcctaagtccaatactgactctgacattagtgtacgtttatggagcttgtagattgcttgatatggtaagtttattttctaatcatctttgatctttgaagatttattggttttcgggtattgttatgattggtttatcaaaactcatttagtaggaaattatttagtttattactctattggaagctttatttgttatttagcctaattaaactttagttggtaatatcacttttgggaaatttgaatttaatcttcaaacattttgaacataaaacatgttttatcatcttaaccatatatttgcttaactttcattcttaatatgtatagactttctaaattcgttcttatttatacacactcaatattttagagtattgttatttattactttaagatgacgaatattttatcgatgtgtcactttataattacttagctatactttatattatttattatattaaatatataaaactcgatattagaatacaccaaataatattatgtcacattttgtaatgattcgacccttaatatttttcaattctatcaacaatgtcaacaattcaaagaagagagtaataaagatgtactttgagttgtgagagagaggattaaaattaaaaaataaaaacaattataaaaaaagtaatttatagtataaatatctaaatttaaccctcagttacagattagtatttaagttcaattttcaaccgtaataatacttaatttaaatttctaaaactgcggtaggtacttcagtgttaagttaatagttaaatacttacaaaaaatttaaaaatataatttgtattattatcgttaaaattaaaattaaatatttataattaaaaattaaatttaaatatttatgtcatgtaaattatttgaaattaatttttttgtttttttggcaatgaaaataaaattactttttgattaaaacttttaaagtaaagtatttgaaattgggaaattaggtcatgcatggaagaaaaaacaaggtccttagccatccacgcagcttaaaatcacaacaaaataaatatatattgtctttagtcttcttcttcttcttcttcttcttcttattattattattataatttataaaaaaaaataaaatatttaaataactagaaaacgaagcgtgtgtataaagtgccacgtggcagtatgttgttatgacacttcattgttattatgtaatgtaaagtaagtttggtgtcactactctacacttctactacatactacccttcattttatggtgacactatttatttgacaaaaataataatttaaaaaaaacaacaacaacaattttattagatattgtaaaaagttgttcaagccatgttagatttttatatcatatgtggatttagtaacttaagtattaatatgtgcattcaaaaatatgtactattataaaaaaaaaaatgtataatatatcttttaaaagaggtgttatgataaatattttatttgtttcaatgttaaggagaattttttagtctaattttttttgggtttgggtccagatctgtggtcgtcggtcgaggtttgggttgggattttgttataggttcgtgatccaagttttgagtccggagtctaagatttgggttttggattctgagtctagggtttaggtttcaaatttagagtttaaggttcaggttttggattcagagcctagggttcaagtctcgggttcggagtctagggtttgagctcagagttgagagccagttttggaatccagggactatgacctaagccgacgtctagagtacgtgctaaggttgggttcgtgtcggggtatagaatattaaaggttttctttactaaatctaaaaacatattttagaaaacatcaaccaaacaagtcttttaatttaaaaactataaaaattatttttcattctcatttataaaaacacaatttcaaaaataaaaaacaatatcaaactgttaggatttataaaacactttagaaatatataaatcacagatctaaacatattcttaaaagtgctttaatatagaaaaccctaaatcataaatctataaagcctttgctaaattaaagaagaagaagatgataaaaaatgagcggaagcattaacctaaaaccattgttggagattgcagagaaggt

SEQ ID NO: 297611 - DNA, 1687 bp, Cannabis indica
taatgagagggataatttaggagtatactaaaaagttaacacgcaaaatctatacatattaactttaattttaatagttaattgtagtctaataaatatatatttaatcaaattttccttaaataatatatagacatgtgaaccaattttcaaaatgagtacatcatctaggttgaaaaacaacactattttttcccctttctacaaaatccattaattctattagcaattttttaagaaatgaatgatccataaataaagggtgtaactattttattttattttatttgcaaaaaagtgttaagagtagtgtaatggagtggggtcctagaattctagggttagtataaatgaaatgagtggtattgtatatgttggtcattgcttggtttaaaagagtagctaggccaccaattgggtggacggttctacatatataaatatcgctttgttgctaagctaagctaagctctaagctactaaaaaaaccacaaaagacatcaccactttcctatttcatcatcatttttattttttgtggccttcttttcttcatcatctcattcctaagacctataaatatatgtattttccattccattaatatcttgataaaggactataatcttatcgcattatgaaaataattataacattaatttactatcaaatttaatttattttacttatctatactactaaattttagagagacatttttctatacttattatgtatttataggtcctttagaaattttcattgctgcctatttattttaaaactaattgcactagtggaatgatgttagagctggatgcacaatagaatgaatgattgaattgcaatgagtacccttataataaattatggccaatataatataagatatatacccttatcttcgaacaatatatatatacatattactcgttcaatatctatatatagtttcatatatttaaaagtatatataattattaatgtggttggccattatggataaagtaatttcatgatagaaaaaaatacaacacgatcgatatatgtataggaaattttgtttaatgtatgtatatttaattagtagtaaagttttaatttggtccatatttttaattgttgatcaatgttgactcagtcatgtgcggagtatatatgttaaataatttccaattaatgaagcttcatatcatctaagtatattaattttgatttcatataaaagtattaaaaattctacaatgcaccccttaaaatggatatattgatatacccttatcaaatctcttagccataacagaacaaagaaaaggaacaaagagaaaggaaagagagaaaggcagagaaagaaaaggatgaagattgaaagaataatcttactttattatgaactattacaatagttcagattatatacaagtgatcaagcaacagaatacaacaaacaaaatctgttacaaccgaaaacaagctaatgtacagctggaataacagaaacagttagagagcaactaacagaggaaataagttgttaactgaagttagttgctcacttgtcttgacacccttatctgttttagcatccgaaataattttttagttcaaattttttctcaattagactaaattttttttctggatgccgaaacaagtagagggtgcattagtacatcccttttaaggg

SEQ ID NO: 297612 - DNA, 1240 bp, Cannabis indica
tctctctctctctctcttttgaagaacaagaaacaaaatagtgatgttgaaaaacacttttacaattcacatatttgtctcaatcacccacttataaaaataatttaacccacacacaatttatctccttcaaacttatttctaagcttatggtataattcaaaggacaaggggaacatagtaagtggattcaaagttagcttaataaagtggttaaaaacaattgagcaaattaaggcttaaatacgtaaactagtgataataaaaataaaggtaagcttgaaaatggcccaactatccaaagaaaattgcataaatcattttataaacaagcattgtcaaggatttcgtctcaagaaaaaattcatgcaagttctattctattcaatcaatcttaccacaacctaaagggccaaactatccaaagaaaattgcataaattattttccaaacatgcattgtcaaggatttcgccttaagaaaaaattcattctatcttattcaatcaatcttaccgcaacccaaagtaaaatatgtatgatataatccaaatactgaaaatttacaatgatacaactagttataagaggcaaccaagttaatctaaagagtagtcaagtcaagcacacagtttaattttaatccatcctacaagtgacaaaagtagcaattattcatctatatcatcggcttaatttacacacgcacaaggaaacaaacaactaaaagaaaataaatgcacaagctaactataaaagaaaataagtccctcccccaaatacaaaaaaccaggagagagagacttacctgatgacccctatcagaaggggtttagtggtggtggctaatcataagggtggaacctcggaggcattgccaaataattttcatcctccactcctatagactactactggatcaaggtattcaactgcctcacttggttctcatcataagtactacgttgtactttgtagttttgcatgtggttgttgttgaatgatgtagctcaactggtcatgagtgtattgcatggtagggtgggtgttcatcatcgccatttgtcagtgtttaaacaatctatttaacacaggtagaaaataaaagaggtatgcatacaacaaactatttaaaccttattttaacgttttaaatttttctaaattacttaaaattttgtaaaatattttaaataattataaagtacacaaacatggaaaaaaaaattaaaataaatttt

SEQ ID NO: 297613 - DNA, 2268 bp, Cannabis indica
tccatcaagacttcatcctctaaatttttgttattcaaagcaacaactgattccaaagacttcttctcaagttgagctgcatccttaacaatggcatttgtgttcaccaagaatccctttttcattccatattcacacttgtcttcaccaagctccttattaacatgaggcatctctggcattgctaaaatcgtgggccagaaagaagaaaatgctatattcacaaaattcgaaatctttaataattttttaataaagaaaatgagaaataattatgaatgcttctttaataataacaataattatgataaatgaaatcttttgaagaaagaaaatctcaaaaattaaaaataaagacacatttaacagaaaaattaccttatctttagagctagaagcactccactcaacaccccaatttacagtctatagtaattgaaactataaagagataaattttacacacatttatacacgtataagggattgaatgccatatgccaaaatcattatgaagaaaaatgtaacggaaaccaatgtgtcagaaaaaaaacttattattgtaacagaaaggaatattgggtcaaacaaagactcaaacgtagtgaattgacaaatattagggcaagaagaggaggaaagagagtttaccagtaacacattgatagagtgaggtttgattatgggtcaccttcaccaccaccgacgatgatggtgattggcgagtttaggaaaatcactaaaacacgcaagttatcaaccttccattatcaccgcagcacacaaagtctcagaacttacttccctatggatgaatatataagatattcaaactcttctactgaattatatgtaatataacaattatataaaatatacctccaatgtacatgaaaggatcaagtgataagttgctgcagaagttgagactaaaattcccacttgcaaagcaccaaagcctaagaaataagaatagaattgcattctcagtttggtaaatgaaaggacaatgatgagtagacaaaaattagaaaacaaatgatcacccaaacagtgaaactgagtcaaacgactcaagccattatcttaagcaaatagtaatacatgaaagtgttaaccttttacagatatttgagtcaatttcatttctaaaaacttaagaaaataaattaatttaataacatgtaagatattctcattaaaaagaaaatacgtatctaaaataaattcaaattaaatcaactcttcatgaaaaacttatgaaacagataattaaattaattacttaagaaaataacaatcattatgatctgaccaactaaaaattattgcttatatatatatatatatatattaatattaattacaaaataactatttgtatataacaatcctgcaaacaggattaggattagaatataagaattatcgaagaaacgaggtagtggtgagtttaatgtgagcagagagagagaaaagagagaggtagagtgagagagagagagagagagagattaaggtgaacagcaagaaaagctaaggcgaaatctacaacaatttaccaagaaaaaagcaactgtccttcattagaaaaaccaaaactaaaaatgaagaagaagaacctagatcagagaaccaaaacccatcaaactaaaaacgaactcaatataccagagagagccctaacctttcttagatcagaaaacctgatcgaagagaatcgtagaagaagtttcaatgaaagggacggggtctcgattgtaacatggatttacattgtgtttgatataaaggatttttgggaggcgtggacagcctttttgacaattgaaaggaaagaacgagtttggaaagatgagatgaatcacctctggcacaccatttacaattaccagaaattttatttggaatttataagtacatttttaatattaataaaaaattaacttaaattaatttttaataattacttttttttttcttttgtaatattttttttagtatattttattatttttttttggtagtgaaatataaaaaaaacaatttattattttttaattatcaatagttagctttattggttttttaaaaaaattaaaactttaatttattttgtcacattttttttaatttctatgtatgattttttttaattaaaattttattatattaatatttaaattatatttattatttattttattaattatatcacagaaagtgaaaaataaaaaaaaataaagtaacaatatatattatataaat

SEQ ID NO: 297614 - DNA, 1734 bp, Cannabis indica
tcactgcattaattgaacatcttctatttgctcaaccattccttatagcacactttattatgaatagccgtgttgacttatgtaacagaatttaaagttttgattcttttgaacatctactagatttgctcctaaatttaacaccatcaaatattgtgaggagctaaaacactaaacttaaaagtttagtgtattgacaaagtatacaataatagtctagttgatgtgaagaagtgtattgactctactcgtatatcttttgcagatcaacatgcttctatttttccttgtcttgctccgagcttggtggatgtctggcatcctcctcttcagtattggctcaagctgaattgtgatattaaagtggggttagaaaacatgtatactgtagtaagcaagaaatcatctcggcacggtggtttgggttcaaataactcggttagatttttctgatgcggggaagcaatggcctgctgctcggctctggatgtagctaaggactacggttccaagtttattattggggagagtgactcgagggtagttatcaatgctcttaatgcatgggaaggagttttattgagcgcttgagaactatatctcattttgtaatagatcatgtcccttgtttgttagttgcattttctctaatattagtagaacttgtaattttgtagtccataatgtggcaaagtgggcgtttacccaccagagatttgattgtattctgttatcttttattcctgaaaatctattttgtaataactgtgagatctaatcgctttctatttatctaaaaacacttttttaataaataaataaataaataaataaaagttttacaaattccttttcaaaaagaaaaaaaaattacaaaaaattacttattttcttcctaacaattacaaagagctgcatatggaaatgtcatcacttgtatatttgtcttggatataacaacgaacaactcaacggttaacactgattatgtatatacataatttatgagtatatatcttaaaactaaacattactaatttccaaaacagtactaatatatatttttatatattccccttgttagttattttatgaaaatattgaaattttattccgaataatatttatttatagtgagcgaatagacttctttaagtagtttttatataatttgaattaagtttataaaatttgcaagtaatggtttggtatatattttgtgacagaaaataaaatatattgtcccacatccatttcaaggggtctttctttaacttcactattctataaaatacatttttaaaactaggtgaagtaactaacatagtgtttcaatataaattttaaataatttattttttattaaaccacacaaaagtaaatggtacattatttgttatattatttgatataatataatatagattaaaatatttaaatgtgacaaattatatattaatatgagattaatatattttatgtgttggaggttatattatatcatatatagtataataatacacataaaattgtaacatatgaggagttacaaatctgaaaatagattgtaacctaaggatcacaattgataaatatgtaattatgtgagttattacatatgggagttatggaattaatgagataagtttctagctgttagaaactgttacaatactcaattatatcattaaaaggggtattgagacgttgggaaaagatttcactcggagagga

SEQ ID NO: 297615 - DNA, 2859 bp, Cannabis indica
tatccaaggtggaagtaaactacattgtagattatcctattagttaaaccatgtgtactgataaatcataggaatacatttaatcacacaatcttgattactttccactgtgttgacagcacaataaacaaggatatcaatgtgataaggatttagatgaatttataaatcaaataaataaataaatgatcacatgaaccaaataacacattaaataagtaaagaaaataaatctatttctttattgataattgaatagaaaatattacattgaaatagcattttatttacggcacaaagcctaacacaaacttcctaactcacttaggggtagtatacctagctatgttccttaaaaaatatacaagttgcccaattattgcttcttgtttatacacatttaattttgtcattgcactttcgtttgaaaattttcaaactaatagttgaaaatactaattggatttcgatacatcttcaaccctcattcttgaatggtggaatcgcttgaagtctattacaagtccaacttagttttcacctttagtctttggagtgaagccacttgaagactatgcatgtccaactaaattctcacaaagggcacatccaataagtttttagcattgtccttgaaaagggaacattgtttggatactactggagttgccttggtctactgaccatgctgacgaatttcttacaacgagtgaggaaaagaagtacgcctagaaaccaaccgtggtccagcaactctcttatcacaaatttaggaaaagtctgtgtaatgttgtgccatctttgttgcattgaatcgagataggatggtctaagtgctagcacaaacctatcttcatctccctaaaaggaacctttctaggattttgtgcacgcttagttcccttccctaattagtctaaataacacaaatttgttgtagtattctgcctagggcaattaaatgagaaacatgtagacgggaggtaagctccacaactcctataacggtctgagaacttaagtttacaatccctccgtgtaaggttaatttgctagaagtgtgtgaaatgtcgggatgaagattttgacaaaatttgacgcctaaagaatgtgaagttttgcatactttgaaaaagttcaaccgaaaagttacaaagtcattaagctcaaaaggtatcaagtttcgactattggaaccaaagactttgcaatatcctaaaaagaaatttgtcaaagtggcatgacaagaaaacatgcataaataaagtaattgtcttaaaagccattacaaacagcctcacggaaaggacatgattaaaattgtctttgcaaaactagatataaaaaaagaggaaaaaaaaaagaattgctggatagaaatcattctctggttggatcttttggcctatccttaagaagctcctacaacatcctggattacagttcgtgaataaactactacccctactggatgctcgagttccaagtccccgacttacttgtctctagactcctcactaacaccctgaaggacatagttctcgagatagttatcattgttaatggaaagcctactctgggtatattcttcctcatcttttcgaagatgcttcaagatagaagggtccttcttcccgatagtatggaggaacaatgagaagcacatttccatggattgaagcaggagcctttcagcagtagccttagccttagcctccgccttaatggagtttcagaccaattgcacaatagtttccccggctctttgcatagccaccaaggcaatgaaatctttggggccattaggtggttgatgaatgtcttccctaagcaacctctctctggtttttctacgattataattgttatgtggatgcctcgcataagaagagcttgctaatcatagttggcctttaatgactccttctctttcttcaagtcctcaagatccctcttcaaagcttcatttccatccaagtacgctcttgatcctctcctcaacatccttcttggctttgtccacctcgttagaagtttaagatttggcttcctgaagctcaacgagtagggtcctgttgtgaacatacaattattttctctttgcgttggtctactcaagctcaatgattaaggcacctacttctttattggccatttcagccatcaaagccatatagtacaataaagaaatgtgagaaaataatatacaacattgaaaatagaggtggaagagttgaagcttacccccactacctgttatttggtagcatgagtcaaggaaaatgcatcgacgctactataagttgtccatgtctctgagggtatattagatgcactgatggccactttgtctaatagctctgcagtgaagggtgtggcttcccttcccacctttggcaccaatcacttccgtagggcctctgtgtctatcattggcccagctagaatgatggcaaggagaccaacaaatctcaaccctcctaactcctgagagactgttagctctcttatgaagaaatctcctttcagtctcgtgtcgctgtcccaaggagtttttggcctcttctactctcctcaaagtggcgtgacaaaggagggcagacttcatggggaactcaaagcccacagaaggaatcctaggtaggaaagtgaatctttgaccatgtaagtgacattgcttgtttgatgatagttggtgttgttgttgattctagttctgctattgttattggttctaatgacggtgttggtgtggggggtttttgttaaatgatgataaatttggtggaactggggagttggtgttgtaaatattttaccaggatctagattgactaacaagtatgtttcattaacatc

SEQ ID NO: 297616 - DNA, 685 bp, Cannabis indica
gcactcaaagtattgttgtttagtttcatattaatataatatctcccactcacaaaacgtgagataatgttcattatttaatgaaaaataggcttaattagcaagtgggataaattcattaaattaatatgtgattgaatgagcaatataggtcctgccgaataatgaagataaacatctcgatataaaaatatgataaatgtgtcaatctcacctaatcactaattcatacttacgctacctagttggacttgggtgcccatatttagcagactatacgaatgaaatctaaacttttaagttacaactactctattcaattatttatttattttgcaacatttgaactactttacaccatatatgttttatgtctaaaattatgataaacaagatatgatatccctttacttgggttgcacttatctatcgtttgatcaaatggttatttattttagagaagttgatgatgtagggtaccatatattcatctttttgttgtaaagggaatatatttttttttcaataatggtctttggctttattgtcattcttttgtttggtttttcacataaattaaaactatagtgaaattattagcatggctatctaaagtttgtaagaagatagagtactctttgttattaagaactgtgattgtcaaaatgaagcgttatgccttcaa

SEQ ID NO: 297617 - DNA, 610 bp, Cannabis indica
aaagcgacatgtctagaggtgttgaataccgctcatgctcaataataatgctcttatttgttctctctttcactttacatgcaattgagactatttttattacattgaatcatgtatatcatatgatcacatgatcacaaatgggtttatgttctaattataaatttaattattagcaataaaattatatctatattcattcaaaggagagagaggcacttccttcgatgcaattccaaatcatttgtagtactagactagtactccttcattacttctaccttcaactttggattctgtgttttacttttcttatattcatttgaaataacaaactttatatttaagagagactaccactcacatgtaaaagaattcttagcaaatctcttaattaataataaagtttataactctagaagcttcttttggtccctactctttatttatctttctccatctattcttgataaaacatttataggagcatagtatatagaactattacaatgtttgatttgttgtaataagaattgtaatggaattaaattatccattaacaatgtttgctttttttaaaaaaatctattacattgtaatcataattaca

SEQ ID NO: 297618 - DNA, 7054 bp, Cannabis indica
tttttttaatttttttcttcatgctttttggagtattgctaaaagggtattctatggtccttgcagcttggtttctttgtctttttgttgagagtgatgcatgaattgttaattatgttatgtttttttgtgaaattatttctgttagaatttgaaagtgtgtcattatggtatataagatttcatctcaaaattaattgacaatgaaaataataatacatttattttgtatatagtattattttctacacgttgtcaggacaatttctaatagtttcttaataaaaagtaataacgcaacacaactgtagattaaaaatgaaaaataattagtatttttatttcctaaacattttacattgcaagttctgcctcttatagtatatgactggttaataatatctcttaaaatataacttttatgataacatattcttatcacatttattcaattttatcgtaaaatgagtggggtagtagatggtagttgataaatagatactgattaaatacccttcaccctttttacattaatgaataataaaatagaatacttttttcttatataataaattttagttttttaatcattaaagtaaaaagagttaaaagtatttaatttgtatccatttatatatcaactaccaataaaattaaaaagaagatgatagaataattgcgtctgcattataaaagttatattttgaaaaatattattaacgagttgtatactataaaggacgcaatttaatagtgttaaaaattcaaaaggcaagttaattattcaaaaataaaatgccttggttggaaggattaattcctcctcaataaactttggtgattttatcaaaatatatacatataaattctatgcatggtgacaccaataacactacttgacgtgttttaccgtaattggtataatgaaaatgtacaataacattaacattagacccaatattaatttgtactatatacattatggtgttgagcacatatatgatatcaattttcaaatagttcctatagaatcttaatttattaatgagatatactgatattatatgtatatatatacatatatatgcaagtcaaaatcatatattttaaacctttcatgtaattagtagtacaagtatttctttggaattggaggagtccacaacatcaattttacattctaaaaaatatctcttctggtcccaaaacccaactgtaactttcttagatgagatcaattcactgagcatcataatcaaatttctaaccactaatctatatatgtacttgtttggaccattttcacaatgcaaattgcatatatatcaaaacctctttcaaaagaaaatttttttccttttcattttctcaatataagaatgacattaattaatccaatacagcaaatttgtccaaacaataacgtgaaaaagaaaattggtgacatagttttatccttatccgaagattttcatgaacactcacactctaaaagtcattctcacataagaaaaaagaaaactacttattcttttggaagggtcacacaaaagtgggaaaaaaaaaaaagaagaagaaaaaactctatacaatggatgagatcacttagagaagagaaaaaaaattctctgattatttgacatatcatcttcttcttatatagttatagcctcatgatatgatatgatatgatcatcaattcatttcaagtgtttgatatttttagccattgaatttctgttcagttgtggttgttgttgggacctgcatacatataagaccaaacatcactcaatatcttataaccaaacattaatgagtattccttatttgtcccctaaattattaccattaacaaaatatatttctttgattcaaagaaagtgtgatgtgcttagatatcgatacgttttacgtaaatattattttgaactttatattttataaatatattaattgcatatcttttgacaattcgaaccctttgttttttaaaattgtacaaaatattattattagcttaatttttgttaaaataaaatttaataatctgatttaaaagtattataactattctagctatttgttttaccattgttcatgctagaaattgactttaagtttaggttggttttattgaaaaaaatgacgaaaattaaacttagtgtattattttgtactattttgaaaaatacatgactcgatttgtcatttaacaaaataaatagtttaatcaataattttaataaaacacaaaatccaaaatagtatctatctataaattcggtaatggtaaacttgaacaaggggtaaaaaggggtaacaaaaataaaaaaccaaagaatttttgtatgaaaatatagaagaatggaagtatagatagtaggatgaagagtttagttgtcttaccattttcatagcatataatatttgtgtagtgaaaatgaaaattaatgtgtactcactactcaccccaactgatgtcacaaaattgcaaactgcacatttcacagatcttgctccatattggtacatcagcaacatcctgcaattcccacaattcacatgtgccacctgatttgctgtcacattatgcatttcaaccacacttcaaaatataaaaaaccgagaaaaaaagagaagttcccaagttcgaatcaacccctaaaaaccccctaaaataataataaataccttccaaggcaagattaacagtgtgacaacaagaacattgcacacttgttgctcctcttatgtacattagtaaagtatggcaacctccacacacaagctgagccatttctgtgcctatattttggtttaaattttagttaagaaaacagaacagaattagttttctctaaagaaataaagggagtttgaaataacaaactcaccgggtggcggtactgctgtgactgcattgcaaacagcacagcataccgaggtagccccgaccggatacagtaaaagattccggcatccagagcatactagctggctttgtgcacctgctcaacattattcacataattaaagtgttttttttttttacttgagatttgtaacaattgaatgaatatccaataacataagctatgttagtataagaaagagataagaaatgaaatgaaatgaaatgttacattattattgaatgaagagattttaagataccatttgaaggtggagttgtatatggtgctgctgctggtggtgatggatatggtgctagtggaactggcattataagatttcactaactttgatttttgttttttgtttttgtttttctaagcttttaagaaaaaagcttattgcctcaaaacacagaatatcataataccatacctgaaaaagtgaagcaaccaaaagaaaaactcagaaaaagtatttataattaactatatgctatatcccataatgtttaccataaaaacacaaaaatatctttcatttgagaaacatttattaattttgagaaaggtttgtggaaaagaatggggagtgaggaaaacacatacctcttcttgttgccaagttgcagaagaagtgaggagacaaagaaaaagagagtgagaggatatagttgagcatttgggagaaagagaaagagaaagagaagagaattaggtgggggccaaactaattaaagagtgttaaaaagtaatttattaccttttttttcttcttaagaaatattatatagtataatatcaggtcttatacgttttaatttaataaattatattaaaaattgttcattaattataaatgtcacatttatatgtatcggggtatcaatttaaatttagaaaaataagataagaattgacttgaatataagtgttatacatactctattagtatgaggttcgtgaggacttagacttaaagcggaccacctaataaagtgaaagaacagggcccaacaaattacattagagccaaagatttagaagatagtgtcttgtatcgaaagcctacctaatattatggtcggcgtattccattgggccaacaatatggttttcgcaaggtgcgaaaatctacttaatttgttactttttttgtcttaagaaactagttcttaatataaagtttcacacatttaaatttattaaatcataataaaaattgttaaccaattacaaatattgcattggtatgtgttggagtattaacttaaatctcagaataaataaaagttatcttaaatataagtgttatacttattatattagtacaaagtttcgtgagggcttaaatttaaagtgaatgatccaacaaagtagaagaataagacccaataaattgtatcaaaactaaaaattttaaaatgggtaaatactactttggaccttgtgtttcacaaaagttactaattggaccctctattttgttaaataataaaattgatcctgtattttctaaaattatacaaataggatcttgaactgattgatttttgttaaaataaaacttaataataatttgatctagagatgttattataaaactgtaattattttctgtatttgtctgtattagattttgtcttaaagttaattatattaaaaaataaaattattaaaaattgagtttagaatcttattttaattattttgaaaaatatagtgtagattttgtcatttaagtttaattaataatttttaaaaaatataaagtttgaaatagcatttattattattttatatcgaaagtctacgtgatattgccgtggatgtgaattgggcccaactatactgtttgaaacaagaatgcttttgtgccttgaattgaagtaattcatttataatttgaataagactttgtttgttgcattatctttctttcttgttaattaaattgttggagattaacttccaattttgtgttggtggcatatcaagatcaactttgtcagtaagtctggtggccccacacaaagaaatgagtcatgaattttacttggtttgttattggtgggtatacaatgcatgcacgtgatttcaaacaagaagccacacgctcaccctagctagctagctacctatacctcctttctcatgggaaggaagaaacattagattgaattgaattgaattgaagggcatagaagcagccacgccactacaaaacaatctcatcattcccctcatcaatctcatctctttaattaataactcccccctaactctttcttaattaaaacaaaggctttaaacattgtatattatatctatatattgattggaattttcctcactcggaatacagagaaagattgaggatgaaatcttaatccagagcaagttatactaaggttaaaacttttacaatgacaaaattctctatttataagtgaaaactcgcactataagaaaagaaattccgtaacttctgtcgtgccgaaaaaagattaatggatatgaaaattgacggcatgccataaggtacttttttttgcacgataacatggcatgttagaagctagagtgtcgtgcccaacttcaaaccataaatctctaacaagtttcatttttaggcacaaccaaagagttaataggactactttgtggtgccaagtattttaatttaaaatacatattaattttatttttgtttacagagattctcaaaaaccaattaagaaataaattatgtttaaagaagaacaaattaaaggtaatgcaacacgaatttttacgtggttgatcaggtgttaatgagcgtgagttcccgagtcaatattattaagtttgaaaagctttagagtattattacacaagagtattcttgccaaagttcaaccctactttttagcccttgaattgtgaaatgattttcgaaccctttgtatgaagaggcaatgtcctatttataggcttgagttaaatttatggataaacctgttatggtttaatttgttaactaagcccactgatgagatagaatacaatttctattgactttgggtcagttaggtaatgcccactttatgagataacggtcgtttgtatgtgtgggaaccattttgatagtgacaggtgtcatgcgcagcccgttgtgtacaatgtatgttagagaatatggtgttggacaaaaagtatgctccttttggtagtgcgcgcactaacatgtctgacgtaggggacaaacttctgacgtggtaggaccatgtgtctagaggatgccatggaggatggtttccaaatgtctcttcagttgcctgtttcggattaccccatgaaggtatccggatacactttaatggaccttttgtcttctagccaaatggtccttctgggaccaatatggttcagctttatcatgtctatgagttggacttgtggtcggaactgaagtcgtaaccccaatcccttatgggtcgatccattaacttaattgggcctaagaatgggcccatcttagttaattttaagccttggaagtacatgtgtcactaatccataaacattagataatatttacctcccaagcctttagggttcaagagtcatggagacttgcagattcctttcagattcactgttgagtgcggaactgtgaacgggttcgaccttttggaattccaaggcaataggttgtgaaggcccacaaacctttcactttccctaattagaatgcacttgtcatgagtcctttggttcatgcatgttacgcacctcaagaaactgtgtgaaacctaggtatgcgagatgacagacgatatattctttgtaaagatcaatctatagagctcatgtctccgaaagagatcttgtatttttataaattggagtcaaatatgatgaggaaggacaagaccaagattggcttctacgcattgaaggtggtatgtccaaccagctattagaaacacccccacgacttcacagaatactagttcttcatgttcgagtttccactgaagaggcatctgactctcacgttggactataatgtcacgggtattgtaacgtccccgcttcaagcctccattgggtccttacacccacggaataaatggctcttatacacgagtacgtca

SEQ ID NO: 297619 - DNA, 3006 bp, Cannabis indica
aaaaaataaagaaaaagaaatagagccgtctcttatgaaaacaaaaacaaaaagagaatcattgaggactaaagattaaattaatgcccagatagaattaagtagtagtacatccaaaactatacttaaaaaacaataaaagtacaaggacaacacagaaatttggaaccattgaggactaaagattaactatcattaataatgtggggtaaaaataataaaaatgaactcttaccgttaacaattaaatattttagtacatcaaatatttttagttttttcacaaatggacaatcgtcaatctggtgtagagtgaagaaacatcacagatggatgattgttgtaacaaccttcatcttcgaaaactagcacaatagttacctatgggttctacttatatttcccagtcactaaaacccaaatatcataactaaacacctaaggaatgcaacagatgctgcccaaggaaaaaaaaaatagccaaaattttttattcatgaataaatgattcaacctctcaagcaaatccatcaaaacacaagggaataactttctcacgactgtgtcgaagaaccggttgaggtctgttttgccacataaatttgcttcatttttgaagaatgaaaactcttctctccacccacggattgattccttccatggaaaccctgtcttcgatgggtccactcaccggtggagctatttctctgagaaactccacctcctctatgataattatagccagaggaatgaccgtactgctggccagagatattgctcttatgctgagcaggttgagccttgacattggaggtagtgttctggccactaccactgctactaacattttgagatacatcaggcttgctagtatctgaattcatgcttacagatgagcccttactggctacattgtgtgctgaaactactttaccagtggtacttgaagggtctaccaaaccaagctcatccggcaatcgagtcacagaagcatcagttgccatgggacagtttcgattcttgtcagaggacatagtatttcgagattcagggaatctgttgcctgataatgattggtctacaggagaagcatgggtaagcttagaaggaagtgcagtgtctgtttgttgctgcaatggcatcgataaaggaacagactgcagagacgatgcagggacatgaggccagcgtgcctgaactgacatgtcagcagaggactgtaaacagaacaatcacagaacactattaatcaatgtagtaatatatttggctatgcccagtccaaaaaccaagaaagctatcgaaattctaaaggaagagtgcaaattcaatatcaatgcatggacaaccatagcactttaaacttgacattcaggacagcacgttggatgttacctggaaaggagaaacgtcaaacattgccatcggtgaagccatgggcaggagtggtgaccccggggccaaatgctgaatgggagtgggcatgcttgcaggattgcgctgcccagaaaccatattcaaattattcatctctccctcaccaaccaccatggcagaagatgcagggctatgcttccagtcgggctgctttccagatggtatataggtagtacccatgaaactcaaaccaacttgcccaaactgtccaactggtgcaaaatgattgtaaacaaacatgtgtggtggaccttgaaccgctgggatgcccccagatggactaatgaaaggaccagtaaatccagcaggtgtaccatagaatgaatctacaccagaatgacattgctgccaggtccctactggtgctgaagttggtgcggtgctcttctgggactgtgactgggtggtacatgcagattcatcatgtggtccataagcaaatacaggtccccctaacattggattcatctcgtagaagggaaaatgggaaggtggaccaccagggaaatgtgaaagcatttggctagaagaattctgaggacttggtaaaggaggccacaaagaaattggcggagtctcaactgatagatctgctggaagagatacactaagagactcttccgcccttgattggcaagtaaatcgtgaatcactagctccacctacaaaaacataaaacataaccaatatagaattatgctagacacaggaaacaacaagaacttgaatacagaaaactttctacctgttgtcatcccatcaattccagtgcttccaaaactctttgtatcagaaactgagacagagcaagttccccgcccattaccaacaatttcatcactagtaattgctgcaacagcaacggctgaagcagctgcttcagcttcagcttcacaatcttcaagatgcacacaagatttcgtagtgtgtttatctttttcaaagagaatatcacagttctcagctccgccaagaccgtgagaaagctgtacttctgttcggcatggacctgggggcccaattccatgtgaaacagcacggctggtatgatgaagaattgttggagatgtgactgcacctgaaaagatcaggcctatacataagcattaggaacataatttatgtgcttttcagttttcagttatgtgccttttctcaccaaattgaatcttctccccagcaagcaatgaatttactggactagcagcagaagaaaataatttctcttttgtcaaaatagatgatgaagccatgctggagtcactaactgagctagtttgatttcccacagaggcacgagaatcaaattggccaggcttcatagcttcatcaagttgagtctgcgtcagggccataacctacaagaagtaattcgtaagtttcagagctctaaaattttaatataacttggttctctcaaatgattttttcagagcagtttttacacaaggcatatataaacaatatttctgcggcaaagttcaagcagaaacctgctcatttcaacagcccaaactttctaaagacaagcctttttatgatacactaatagagaagcacagatgcaag

SEQ ID NO: 297620 - DNA, 2597 bp, Cannabis indica
gctcaatccctttgtgccaatgccaagggaatatcttttggcacagttcaacctaatagttgcttatcaaattgatcagatataattattttccttttaattttataattaaccatttcattatttgttgtatattaattcacattattatcatttatttgttctattcttttactgatgtaataccaattcttatgaatatatatattatatttgtaacatccagatatagtcatctaaagtcactcaattaaaaatttcaaactatattgttgcctaatctaattatttgctaaaatggaagagaagattagtaatttgaacatgaggtatctctatatccattatccaaaatcagtcattacaaattgatcagtatatatcatttaagattctaatagacaaacaagggtcaacaatgtctaaatttttgcatcaattttggggaccataatgattctacatttatagaaaaattcacctatatatgatatgtagctattaataacaaagaaaggatgtacaagtataagaccaacctcaccaaaattcacattcctttctctctctctctctctctcagctcagctcagttgctataatatatcatatcaccttgtccacctccaaaagaagaacacaatgatcacagtgaataacatgccagcgtacttgatcgatctgtcaacccgatgcctcctctcaatcagcttcaacacggtgttggacagccccactgtgttaagaacatcaagtgctttcctttgtgccctctgatccaacaaaaaaaaaatcaatacttggatataaacacagaaccaaaaagcagagaacataacaccccaacaactattatcgttccatttcttgttctacatatgaaatcaaacatacttatagacaaccccttttgggttttgaaaatacatgagaattctttatacatcaataaaaacatttatacagaacagaactgtaacgcctattatgaagaactggacattaattttctaagatacagccaattcaacataactaacactcactcagagaaggtatcaaggaccaaggcacacacattagtgacaaaatcttccatcaaaaccaacagtcatctaaaagtaactaagagaaaaagaatccaattagtaatttcctcatgcatattccttacaccgtgaggaaataaatccaattaaacagccgtgccaggaggtatgataggtacctaatcttagacttattctcaatcttcattgtttgtattcctaatcttagtcatattctaatcttcattgtttgtattcctaatcttatggattgtttatcacaaaaaactcttgatttcaagcttatttcaaaagaaactcttgcattgtattctaaaagatacttatgcagagacctagaataatttaacaagaactatgttaacaactaaagctaattcagacgaaataaagtccatataatactcttcttgaatggttaacatgattgaaatataccttcaagcgttctctttgctctgagtatttgaaaagtatggcctctccagtggcactagcttcttcaagcatccgagacgaatttcgaactgactgcattgcttgtgcttcctcatcaaaaattctcaaaacatgagaagactcaccattctatacaattaaaccaccaagaaaacagaacacattttagacacaaaataaagattaacactaaagaaaattgtaacaaatatttatttttacatacagctcttccaatcaactctgccctctctctagcttcatttattctcttctgagttcttagaaaatacttgtccaaactttgcttcaaagactcagcctcctctgctacttgttcaacctttctgcaccattatttatcaagatttgtgtttaagactgataatgtaatcaattaaccaaacaatccgaatcagttgaaccctaagatcgaaatggaatctgaaatagatttttaccttttccagagatcgcgctgggacttagcagcaacggagcgccatagacggtccatatcgaggcagagtgactggatctgagcgatgtctttcttgacggagaaagagaggtcaggggaatcgatggcagtggaagtggaagaagagtactcaagacgttcgagacgttcgaggccgtctcttgtcctgatgagaagcttcctggagttctggtacatctccgatagcgtaactccgccgccaccggtgccaccaaattcgacggccattgtcgatcggacaattctgatttttcgatttcgaagctctgcacctttgatctgtctctgacttaaaaacaatctatttatttagttattttatgaaatttgggaatgaaattaaaaaggctgcccacctcatccctccaatagcatttcgccacgtcatctgtccgtcgcttttttaagttgttaatttcttttcgtgtaagaatataatttcttggctaattagtaatttttctcccgaactttgacatgtactaaatcgtgctcctgaacttttttggctgttaaaaattcctcccgaactattgagattgttaaatttaaggacttttgtctaa

SEQ ID NO: 297621 - DNA, 2740 bp, Cannabis indica
aagacagataatgatcagaaagacatgtgtatacctgaggaggcttcatgatctccatagaaacgtactgagaagcaacaaggaggactggtaaaactaggtatgctgctgtgtcatgccaacccagtggtggatgaccatcctgcatgacagaccaagtattatgagacagatatggcacatataagcttgctgtcttcaacacgcaccagttaaacataaattagaagagttgtcctaaacaagttcagcaagaaacatgttgtaagagtatttacattgaattctgtaggaaaaaaaaaagcctaacctccattcttcacaaagaaacgcaaaggcttaggttaaactttggtgatacaaattatggagaacttaaaatttttgatacaaggctaagaatgcttccataaaaaaaaaaaattaaaaaaacaatggggtttcaaaaaagaacagaaaaagaaattgatttgtcaaacttcagaaaacttccagaaaatattcttaaaacgaaaaggggaatcagatttgtcgagggaaacaagtatataagaaaccatgacaaaagattaatttcctactacttatagattacagagcaatcattattataaacgaacaagcattgtaaggagcatgcatagcatatcatcatcaacacccaagtcacccacatatacttggtctattgtgtttctataatcactttctcccaagacaagaatatgattctgggatcatttggcattaagagtcaaaacatgagatttattaccacaaatggaataagccaagaaatgccggatccactctgtctagcagctattgttgtagggccacccaatgatggaatccaaaagaaaccttccgtcaacactccctaataaaacaatggaatgcaaaaaatcagccaggttcaaatttcaacatttaaataacaaatacatcaacatcacttaaaataggtggtacctcattggctacattggaaagagcttggtaaagaccaatccagactggtatagtggccaaagtcggcaagcaacctatgataaagtatgactaaagtggttaaaattttggtaagcataaaccagtgtaccaatttttgaagatgcaataagttaagcaaacataatgagagtgacaattagaaaatttctgatagaaacagaactctcagaatttcagttgaaataagaagacagtggttcttttgaattggcaacaaactgacacaagaagactcaaaccattttcaacataagcagagacccgtaacattaacttaaatagaaattagctccctgagtgatatccgtttcttatgtttgagagtgaaactaaacatgtgcagatagatatatatacaccaacataaataaacaaattgaatacctgctaatgggttaaccccagcctgcctgtataaccgtgaggtctcgagttgtattctttccttgaattagtaaaaacgaatagatagataagagaaaaagaaagtttacttgaaaacgataaaatatacacttgtaagagtttggaaataaatgtagacacaaagctatagcctcacttggttgcctttgtatctttcttgaatagctttaagctttggttgaaggttttgcattgctaacgtcgattccacctgcatgttaaaccatttaccaccttatcataacagtgaaaactattaaatgctcgattaatcataatctgagattctgaataaacaacccacctgctgttttgtcaggggaagtgtggcaacttttacaataacagtcagcaatataatagcaaatccgtatgcatatggcacatgaacagctgaaagtccatcctttaaaatctgacacaactcaagcacaccaattaccataattcaatttaaacacaacggtaaccaatagcctgaaccagcaaaaccatctaattttcacaaaaaaaaatccaccaatattcgacatgtgaagtcgaaattaccttgagaacaaattccatgccgtcggaaatgaagccaaaccagccaccactcttctgagctgcggcagcgtcggtagaagcaccggaggccgcgtccccggcgactgcggcgtctgcgagagtgtaaagtaggctctccgctcgtgtagcaatagcgctgaaatcgatagtggaatcgaaggaatgaataggaggaatttcattgaggctaactcttactcttgccgctaagagcttacgatgagttaggcaacaagtgccgttgcgagaaagaaaaggcagtggcgtgccgaagaagggtggaggtgaagagattagagttttcgccatggacgagtcgagaaagatgtacggattttgaaggtcagacggaatcagagagtcttagtccgagtgtctcatgaagctcagctgagtggtggagaggagagacaccaagaccgagaaggaggatgggatttttttgtttattattttttattttatttggtcccaattatccatattttatattaaataaatataaaatatgggattgatttgagctacacgatataacaagaaattatttcagccaatggctcttttccactctgcgctacgtggcattttaatgtttagatgccaagagtattttcaaaggaaatagtagtgaatggtcttttatttattttttttagtgaaatttaatagctaatgatctttattattttttagtacttaaaataatcttagttatataagggtatta

SEQ ID NO: 297622 - DNA, 2771 bp, Cannabis indica
atcacaaaattatacgccagcgtatcaggcttcaaacccttatcgagcatggtatcccagagtctgattgcatcgtgcaaattgccccgtctacaatgctcgtagataaaggttgaataggtaacgcagtctggaaaaacgccatggtttgtcattccaacgaggagtttcgaggcctcctcgaacttccccattttgcaaaaacctcgaatgagaatgttgtacgttacagtgttagctaaacacccttcgagcatggtctcgtggagttgtagggctttatccatttctccttcgttgctaaggtggtccaagaaacaaccgtacgttacatgattcggaagagagttgctattcatcatgtcattgtaaagaagctctacttgatgtagatatccagctttgcataagccgtgtatcaaggacgtatacgttacaacgttaggaatgcagccttcgccaaccataatgttccaaaccccgaaagcctccttaaacttccccgattttccatatgcatcgataatactcgtgtatattacattatcaggtctcagttgttgatcacgcatcttcttcaagacactgaagagcttttcggtatcctgttgctttaaagttccataaacaagtatagcataacaaaccagatctaagtcaatacctctttcgagcatctcgcgacaagcacccaatgcatcttttaatctcccgtccttgcataaaccgagtagaagtgcactgtaacacatctcatttaaattacagttctcattatgaaggtggtttacaaaatcattggcttcggaaactctacctgtagtgcatagaccacttattagagctctgtaagtatatgtgtcgggcgtaagacccctcttcaccatttcatgaaacagttcaaaggctcttgtggtgttcccttccctacagtaaccatctatcatgacattgtaagtaacctcattgggcataattcttctttcgatcatttcattgaaaagtttacttgcttcaagcatcaaattcacccgacaaaggacagaaatgagagcagtgaatgtgtaaatattaggcgcaatgcccttcccagtcatttcatgatatagtcgaaatgcctcggttaattctccagatttgcaagtcccgcttatcagtgatgtataggttacaacatttggcactacaccttttctgatcatttcggtgaagaaagacttcgctgcagcttgatccccgaacttacacgccccatttatcaaagaattgtacgtatacaccgttgcttttatcccagtctcgctcattctatcgaaatatcgtacagcagcatccattttaccacttctgcagaaagaatctatcaaaatagaataagtaatatcattcggaaacaaatccttcgtccccatcttattaaaaagtgattccgccttgtctaccttcccatctttgcacaaagaattaatcaaagaattataaacaaataaattaggtacaaccccaactttaccaacatcattaaccaaatcaaaagccacttcaatcatccccttcttcctcaatccctccacaacactcgaaacggctgcctcgctaggaacaagcgccaattcaatcatctcatacaacaatcccataccaacctcaaactcttgaactctacaaaacccaagtaccaacgtacaatacgtaacaatatccgctctcaatccctttcgactcaacaagttcttaacctcaatcgccttactcgccttgtagctcttacaaagcccatgaataaacacattatacattacaacactcaattcacacccattagattcagcacaatcaatcacattctcagcttggttaaaatccttcatttcacacaaacttttaacaacaatggtgtacacataaacatcaggctgaagacctttattcacaaactcataaaacaattcaacaacaagtttgaattgcctaattctcacaagtccattcaacaaactactcaaagttctaacctcaggcaataactccaccaatctacaatccctcatgagcttcaaaactctaacaccatccataaatttcctattttgaacataacactgaaccaacaaatcaaaccctaaagaagattcaaacttgaaactctgataagtatctaaaaaacaattaaatacctcattaggatttaatccacgaagaagaagggtttgcaataacgacgaggctggccaaaacagcttagactgaaccaaagaatgaatcagaatactaaacgacttcgttgaatgagtaaagcctctgtgaagacctaagaagttgaagaatctcaaggctaacctggaatcatccaaagttttgatcaacagcttttctatatggtgaggcttcaatgttctggaaatgaaggtgtcgtttaatgcaattgtccagctcttgtcaccgcgtactatgtcgtttaagatcgaaacgaagcgagtgtcgctttcttcgttgttacctttggagaaagtgcagaggtttctgagatttcggagaaaccgatgatgatgttgatgatgatgatgaggaagagctatcctcattcttcttctttgttagctttagcgaatggaagaagtgatcggaggggaaaatggcagcggggcaaagcggcgaccggagagccaatctcgatcggagggagagagattttcagaccaaatctcaaactcaatttaggactaaggaaagagaaggcccattatgtgttgggcctaaagcccaagacc

SEQ ID NO: 297623 - DNA, 1207 bp, Cannabis indica
tataaaatactttttaaaacaaataaaaaataagagattataatattaattattttttccttcaaaaaaacattgttattttttgtaatatataataagtaattaaatacttttagtacaaaataatttattatactgtattttaattaaaataaatttttcttaaagttgggttgtaccaactttagtttttagctatagtttctccataaattcttcaacaagttgttttttaattgcttaccaaacacgtttgttatcacaacttttagctatttcagattttgtgccaaacgggccctaaatctcattaacacttcaaccatgtaaaaaatctcattttatttatttcttaatcatgttttcttcaacttaatcttcttttatttcagtttttgaaaatatcggtaaatattttagtactttcattgagatttgaaaaagtttccaccatatttgtcatctacaaatatggtagccataagaacagtgattgagaaacgaggcaaccaagctacttgcaacaacaccaaagcccatgtggctgatggcctaaactgacttgctctagtagatgctcagacaaccactgcaggagacggtgaagcgtcagtcgcgagaggtcaacctcttcaaaatgttcaccaactacaagaacaacacaatgaaaaccctctcaaagaggacaactaggaagatggtgacaatgatgaaagatgagaatattactaagactatgaggaagaccccgaggttctacggttatggcagatagtcatagaccatgatgctaaaatggcgtagcaagaagaaactacccttcaaatttaggagaccctcctgcaaatgcaagccctgatagcagcaataggtcttagctcaaaggttcctccaataaacaaaggtcctgggggttcatattaatgatgacaccttagttgttgcaagaaggttcaacaatccttaagctggaccctcccaactgggaaacaaagggaaagttgtagatgatgaatccaagaagaaaaattttctaccaagtcctgcacgttaaaatccaaatctccaaaaaggaaggcctgatcaaaccctagggcaaggtcactcaactgatctgcaaaggagggtcatgcacgtgctcaagcaccaggactcaacacccagggaaaaaaagtgtgctagtgcctcctgttgggttttgtgccct

SEQ ID NO: 297624 - DNA, 1941 bp, Cannabis indica
agagagagagagtactttaacattaagatactccccaggctgaaaatccataatctgcaaaggcaagggtccaacaatgtcaaataatacattaaaattgttcagaaccatagaagtcaggtttaagattggcatggaacaaggaatttacatggacattgaagtcataaggagtagacgttggcagaagcttcctgagctcaaagatctgacaagaaaataggttgtgataagtaaaatatatgtgtataagctcaatttaaatgtacccccatgcaaatctgacaaaaactcaaaacaaataacgaaccaactactacataaaagttttttttgacttaataaagcacactaagatttccaagaacaaggacaccagagaacataagtggaaatttctcatcagacttctcctagataatttctcccaaactctaaaactaatacaatacaatacaatacgacctaatacgacgttccaaacgaacccctactcaattttctattttaaactgagaaaacataagaaaatagatctagatatcgaataaattcagtacttacctcccctggagtgtcaagaagtggccgctgatctgttgaacctacaatcagttcagtaaaatgattctccaaagaagcatgcctaaaatgaaaagaatatattaggtacttgaatgactattaccatgactatttgaaatattcctggctatttcttatatgttgtaaaaagaaggaaaaaatattcatgatgatggcacgcgatctttcaatcatcaatcgtaaatacataatgtaacgagcgaaccttctttcaaataccacaagagttgcagatgcatcacacttgattatatgttcaaaattaggaggtagataagcatatgaatccacctgtatttcatatgtgaacagcatcaaatgtctattttaacatctgtggacaatctataagagtcatgtcattctcatgaattcaaattctcaataatcgtcccaaataatctaaaaaatctcaattgcacttgaagctaacaaaaagactgttttggaatcatcaatgaaatcaaaatcgattttaaagtcttcagagtaacatattgtattttaaagtctttagagtatgtattagatacataaaggaattacactttttaaagagtgcaatattaacgagatgatagacaagaagcctaagagatatgatttatatagagatgagttgtagagaatagtaacattcactacagctaggcaatgtcatgtttaagggttataatcaaagcagaatcagtttattctccagtacatggttactgacattgttttaaagtcctaagaatatctattagctagagaatttagaatttaattgtgaaattcagcatgaccagttttaagacaaaaactgccatttgttaaggtcttaaataactttgccatggcccatttgtcaaaatggctagtaagttttgtagaaaatggtgaatgaattgtattttatatatcatagaatagtatatatttatatacaaagctatgagactaaatagaaaactactaaatacaaatagaaaattactaaaaacaatttatcataacttttacagcaaacaaaatgacaattaatctcaacgtgcttagtgcgctcgtggaacacgggatttgaggcaatataaaaagcagcttgattatcacaacacaattttgctagaatagaaatcttaaacccgaattcagtcaaaagttgataaatccatattacctcacacacagactggtcataactctattttaattcagcactgaatctagacacaacattttgtttcttactcttctaagagagatcaaatttctccgaataaatacacaatatcctgaagtggatcgtctgtctaccttagaacctgcccaatctgcatcagaaaaacactc

SEQ ID NO: 297625 - DNA, 4472 bp, Cannabis indica
attaagagactttattaagtctaattaataaatatatattaaatggcaattttatttgataattaattttatttattaaataaatagttttggcatttaagtggttgaattggaaaatatggtatttgtgaaagaataggataaatagttgaaaaatggcaaacttacaagtggtgggcccacatcctatggccgaccactaaggcttgattttaccatttatttatcaattttttaatgccaaataattaaaacctaaacctagaaggattcctataaatatatagtgatggactcaaattggaagatgatagcagttgatgcacttaagcctttcagtcaaaatttgagccctctctttctatctctaaaatctcaaatccttctctctctttttctctcttcaattttcgaacccttatagtgatagagtacatgcccacgcatagcaagttggtactcaatcatagtgtgtaaaactgtgaagaatctaatcaactaaaggagaatcgggctcaaatcttggtgatactctgctacagaaaggatacaagggttagggatctgagtggaatgagtcatttaattctgctgcaaccaatgtaaggtttcttgaactttatatgtgtttaaattccattattttagaaattcatatttaggatgttaaacaacatacatggtagtaaatcttgatcctggtaaaataatccccaacacttggcacgtccataagaataggcgtgctttgcacaggcatgacgtcacattacaaacccttcaggagggaactaaagagtaagaataattgcaagtccaaactcacaaaactatgtatcgggacttgggggtaatattatctatattttcttactaaaatatatggcaaatggagaataggccacgtgtctacacgatccacatgggcacacagatgatcaaacattaacataataaatgtttaatattctcttcaaagcatgaggagcgtccgagagtgcataacctagccccaaaggaattttaaagtcaaagtcaaatattaccctccgagaagatgcaagattctcagatcacatagcatccatgtacttcccatgtgttcaactcgactcccaaggcaaaacactgtagatgactgcatcaatgcaagttgtaaagtaaacatatatactctccaaatggagatatcatttggactcagcccatactattctgacattatattttgctatgaatactaattgatggctaatccttgtggtctcatcagtcgcgtataagacaagtcttctcttaccaaactcctacttcaaaacttaccattggtatacacaacaaacatcctttcctacacatattacagaggtcatgtacagcctagaggtaaagggaagatgtacccatcctccaaagaatatcctattttctcaacctataaatacacagggaatgtaaaggaaaaggggattggaaggattcaaaagcaaagagaaaccagaactctaaaactctaacagagaatatattctcttgcaaaaaaaaaaaaaagatattgttcattaataatagtgactcgtcgactacagttaattaaaacctgaaccacgtaaaaatattattctctactcataattaatttcttaatctaagatttagaaatttccaaaaatctcggtcaacaccaagtaatcatcattaactatcattagagtcttcttcttcttcttcttcttcttagttatttaattatgaatatgattattattgtgattatatttgtcattatgaacttaaatttttttttctagagtgttgatggaactattttaaattatgaattaacgttttaagattattcacatatttgctcttgctatttatttgtgcaattctattttaatcatcaacttgttaatgcttgatcaccattaattagtatatagattttaggttttatacttaaaagaggtaatctaaaatcaaacttagaattgcatgacataagaaaaatataagattgagagattccactaattctattagtttcatttaaagagaatcacattgctttatcattacttgattgattaatattgaacatagatatcttgttagttaataagttaattctatcatcactcgagagaggctagtagattacattaggtttcttgaaactacaaattatagaataaattgtgataattggaaaactaagattcatagtttgtaataggaaaattaacgctctaagtctttattatctaattgaaattgttgattgtctgtttaccttttagttagcttatcatctcatttttaattatatttactttgaagagtctaatttgagcataaaacctgaaaaacatagtaattggtaatatttaatatttaataattaatctctgtgagtccaacaaccttttttattattaaaattttgctaaacaacattgtacgcttgtagtaaaaatcatgtatcattgatcctacctttttgccaaaccctttcctgagaagtgacaaaggagacactcttcaaatttagaggggttgtgtcagaatggtgccacgtagaaaacatgcccagattattggggacatcaaggaagcagttggctcttggtgatgtatttcctaccctgacgacccttgaaaggattgtttgaatcggtcctagtcctctattcagtttttgggtctgagcataaggcgctggcataaagctggttgaccctacatttctgactagcttgataatttctcactttgatgttattcagggatttgtactcaaaaaaaaaatattcatggacaaatgtgagtcgatcttattaaacttggcacccttcacccgagaccatcttcgaatgatgaacttgggtcctacttcccggaggacaataaatgggccgagtttcagcctttgcttgtggactcgagataggtcttgttaattatagggtttttacaccacatactaaaaattcaaattttttagatttttattgtggggcgaatttttttccataaataatgtgttttatttccaaaatactgtgtaagttttataatgtgtactgtgttaagttttaactgttgttccatggttgttttaattgttctattttgttgttttacggtttctgttaaaaaattccttataacagtaaaattgtaaacttttgtccaaaattcaatatttttgtaaaaaccccttactatattcgtggaagccacgtgtcgtgataagagaaatcacagataacatttaacttttctaaagtatcaacacatgccctaattacttttatcaaccttaccaaaaatattgaaaaaaatctacatatatatatataagaaatgtataaaacggtgatatgttactctaaaattgctttgttttagtcttatttcgttttttttttttaatatttttaagtaatattaaatattaattaatatgaaaaaaaagattaatactaaaaaaaaaaataaattaaatctaattatataatgatacctaaatttgtgggatatattatagttttattatctcacttataaggaaaaaaaattcaaccgtgtatagtacatattactattattatatattttaaattttcaaataatgatatttttagttagttatattttataaaaaaaaaagaaacctgtgtatacatattactattattatatattttttaaattttcaaatatatatttgtaattagttatattttatataacattagtctagaactatatatattacttcttcattaaaatttacaatcgaaaaaagaacatagtcgatcaataaagttcaaaaggtggtaaatgcatattgcttgttttttattttgatacacgtgtaactttctcatgtagtcttctactatttcttatgttattttctcatgcattcttctattatttctcactaaattttttttgtgtaaatattttatttgtagtccttaacattataaagtatggtgaacattatagaagtgaatcaggttatatccatcaatagttttcatttatttttaactagggaactaagccgcgcttcgcgcggtgttgttcaacttttataatttttatgtatatatataccatatattaaatgatataatttaaaatataacattttaatgtgtatattataaacaaattaatagtgttgaaactaaaaaatataatttgctattttaaaatagataaaaaaatgaagattttgtgaaaaatattatcgttataattattaaaaaaaattagttttatgattatttttttcgtattttttatttcataaatttatattccaataaatagttgtaaatatttttactaaatgagtaaaaattttataaaacaagaaccgttgttattttctaattatttttaaatttgaataaaataatttttaaatttttattctatcaccttaattttct

SEQ ID NO: 297626 - DNA, 3149 bp, Cannabis indica
tgtcgagaaagtgctaggcaccagcaatgctctaccttttattactaaagaattaatgacatgtaaagtgtaattggaattagaatgaatgtgttaaaaatataaaataattaaaaatattattttatggtgattatttaatggttatattttttttttttgaatgaaaatttaagctttattattatttttttttttggaaaaaaacgttcattggataaattaataaaagttagacctcatggtcattacaaaataggcctgaaagaattgtttctaccggaatgactccaaacctctgaagggcaaaagcccatttaaccacattatgggcatcaaaattacaagttctacccatagtagaaaaaatacaactattaaaataagaagagtaactattacaaaatgagacacagtttgctaatgcccaatgagaatccttcacgttaagagcattgataactatcctcgagtcgctctccacaatgataaacttaagacccaaattcgaagcaaccgaaagagccaagcagcaagccgccgcctctccacataacgcatcagtgaaatccaatcgcgtttgaacccagaccaccctacgaagatagtttctggtaacaaccgcaatacacatgctttcaaaacccactttaacatcacaattcaatttaatccaatctgtaggaagaggagaccagacctccttccagcacaaagcgggggaaggaaaaataaagtcatgtaaatctgcaaaagaagtacaaaagttgtcaatacacttctttatgtcaaccggataattattatgaacatttttattgcggatacgccataaagagaacaacaattaatgcaaaaagaaaaaactgctcagcatcaattcccttgtgtttgaggttccagatgaatttgacctaatcccacaggcgaataccagtatcacagataggatagatacccaaggagaggctcttcccgcatgcaacaccacatcacacgagagaaataaatgttttaaagattcttcttccagtccacataaaaggcaacttgcatcatcaatttgaaatcttttcctgatcacagaacggaccgggagagcattggaaagaattgaccaccaaagaaccttatggtgctccaaaaccttactattccacagcttattccagagcgacgacgcaacctcacagggggagccctctccatggcctgggtaaggtaggaaaatttacaagaaacgaacattacgttttagagtccaaatccacttatcattaccatggccagagggaaaaccccctttcaaaattatagacacagtttcctggtcaaagagactattcaatttgttgatatcccaacctccaccaatagagagaagatcatcaactttgctatcagtagaagaaagagcaccatttgattttgggtaaaagtctttcatatggggaatccagggatcccccccaatactagtgtccctcccatctcccatcagtttacacgcacctttcctcaagatagatttggttttaacaacattcttctagaaccaagagtctgaatctttatacgaacgatttaggaactccttcccttttagatatttggttgccaagattcagcaacaaagagactgggaaccattaagtatgttccacccccatatagccaaaaaggtctggttcatttccttagtttttcggaatcccaatccaccacgagattttggaagacaaagcttgtcccacgcttttagataaagcccgtggttgcctttttcaaagccccaccaaaaatcgcgcactaaaccatcaattctagaaacaagcttgttagagaatttggtagtttgtatggcataaaaaggcatagataggcccactaatttaataagggtagcccgacccgccttagacagggttttagctttccaaccttgtaactttgaagtgagattatctaggatgaagttaaaatcagcattttttatcttgatctgaataggggaagtcccaaatacttaatgttgccctccgatgatccgactcccaacaaatcactgatctctcttttaatgctttcaggagtattattgctaaagaaaattgaggacttaagcttgttcacttgtccagaccaagagcaaagtttcttaagacaattccagtagcccctagcttcaagcaaattggatttgccgactaaaattaaatcatcaacaagaaggtgtgggaaaggatcgggcctcccctgctaagcataatgccttgttgcgcttaagccttcctcaagtaatctagataagacttcagccgcccaaataaacaaatacagaggaagagggtcaccctgacggaggccacaagaaggtttgatctttctaaccggccttccattgagacaaatgttgagggtggtagtagtgatacattaagagacccagttacggaaagtttggggtataccatagcaagaaagcacatggttgataaatctccaactcagcttatcctatgctttcctgagatcaatttttaaggcaaaataatactctttgcctttcttccgtttgaacgaatggatgatttcttgcacaatcacattgttatcttggatatttctacccggcacaaaagcagcttgagttgggcagatgagtgaaggtaaaaaagggttaattttgtttgcaatgatcttggaaataaccttgtacatcacattccacagagaaatgggtctaaagtgattggttcttttcgggttttggactttaggaataagaactatattcgtagcattaacccccttatgtattttccaggcctaaaaaagtcataaactgcatcgcaaaaatcatcgcctatagattcccaataatgcttaaagaacaggacagacatcctgtaacgccctaatgctaaggcatgctacagtgctttttcaattacagtgcaatcttcgctaatcgaagagttttcttgaaaaacgtgtcaaattaaaactttttatattaattaataaactttacagtataataaaatatttacaagtgccgggatcccgttttcaaactttttaaaattaatattccaaaatacacatttttcaggtcgcacaacgactatcaaaatacaattcccaga

SEQ ID NO: 297627 - DNA, 2400 bp, Cannabis indica
tgactctatttgggtgattgtgggtcgatatactaagtcaacacactttttaccgatgctaacaacgtatgcagtggatcagtatgctgatttatacatcaaggagatagttcggcttcatggtccccaaagtcgatagtttaaaattgagatctaagtttacatccaagttctaggaaagtctacaacgagcaatgggtaccaatttaaagttcagtacaaccttccattctcaaactgatggtcaatctgagaggactcctcagatacttgaggatatgctgagagcaggtgtaatggattttgaaggttcttggaacaaatatcttcctctgatcgagttttcttataacaatagttatcagagtactattggcatggctccatatgagatgctttatggaaggaagtgtcattcgcccattcactgggatgaagtcgatgaacataggtatcttggactagaggctgtccaaagacgagtgaggccattgaaaagatttgagctggtatgcttgcctacaaagtagacagaagagctacgttgatccaaagcgtagagatattgaattccaggttgggtattttattttccttcgggtgtccccaatgaaaggaatttagaggtttaaaaagaggggaaaacttatcggttggcttcaccccctgctctatctagggttcataatgtgtttcacgtctcgatgctttgaacgtatgtctctgatacaattcatgtttaagttatgaggatttcgagcttcatactgacctgtcatatgaagaccaattaaatccacgacaggaaagaaaatgtgttgcggaataagattattccactagtaaaaatgttgtggaggaacaactaggttaaagaggtaacttgggacttagagtcacagatgcgggagcagtatcctgagctattcaggtaaattttgaggacaagatttctataaggaggggatagttgtaatatctcacaaaataatatggtaattaatttggcatattttattaaatatgtaattattctggtaataaagtaagattatggtcctacttaggttaattaatgtgaatttaataaatgattagataaagcgtaattttttaataacagagattttattagattatgtgggtatcatagataacatttttgaaataaaatattttcaggcccgccgaacgtggaaacttggcagagtggtcagaaatttcacgataataaaatatggattggaatgggaattataccgaataagtttagaatattaagttgtcagtttggcggattagttaaatttactgaattacccctaagttttatagaacttgaatttgcaagcgagggtgtaatagtaatttcataggtgtgttttcttattttgtcttgtagtgctttaattattttaagttttaggataataggttatatacttgctgaaatgagatttattgaaggataattaagaaaataagccaaaagtaacccttttcttcttcttccttttgagaaacctagaaaccagcctagggttggagatttctacagcaaaattcatttaattatagttgttattactccttaaggcaacctagaagcatttgaagtaagaatttgaactctacccttgatgttacttaagttttatgtaagtttgattgaacttttctagagttttagaactgtatgtttcgactgagtttaaggtttattttgggtgttgattttaaggttaattaggttctattagcttaagtttgtggttgttgtgtgtgaagatggaaaagattggattttaggatttcaatttaggtttaaacatggatttatgtgtaatatgatgaattgttgtgaattgttgagttgaatactttatttttatgtttatatactattctagagttgttgggaagatttggttaagtgtttgtggagtttaggaagaaaaccaaaagttttctggtctgccagagctggttgaccggttcgttctggtgcaccagaattggtcaaccggttgccctgtagggggatttcctgagttttcttcgagttcggttttggcttagggtggtgtctagtatctggttcagcttatttatgtgtagtatggcctattttgggttattggagattaggttttgttcggtttcggattagggtttgtctctggagttttgatttaaggcatttattgaattttagttgtcgtgacataggaccgggatcgtctagttttgtttccacttagttcggcccacacacctgatttctagactgaggtaagaaaagtgttacgcatcagttaggattaagtgattagcgattgtgtttgatatagttttaattattatcgagatcttggttatgtgtttgatatgcctcggtta

SEQ ID NO: 297628 - DNA, 2349 bp, Cannabis indica
aaaaaaccatatttttagtttgattggttagataatgtcatatttagtgacatttactttttatgccatatttatcataaccttaacaaattttcccatatttttgaaaatagcccatttatatatgataacttttgttcttttttaaatttttttccaaaataaagccctctacgtgacttttgttggcccaatctttctttggtttctttcattgaagttcacttaatgaggcaatatccacgtggaaacaaaaacaagatgaagaatttgggctttagtgagttgacactttgtacataataaatgggctttagtgagtccatgaacaatttgataaaaaattaatttaaccaattcgacccaaacaacaagtcacaaatctatatttaagtcactacaaaatcacactaaattgagaaaaataaatataaaatgagaaactaattaaaactaatataaaagaaaactaaaattaatatctgttcaaaactctatttaaaatttaccaaaataaattaaaaatatttgagaacaaaactaaactaatgcacacaaaaagctagataactatattttttatagaaatatcaataataatactttaaatgctcgacgtttcaaactctaccatagacagagtcattaagttggcgattcaatagggaccttcctagttatcaccaaacacaccatgtctaggattgcgagtatagggcatgactttgtgaagaaccatgtctccaattcgcaacttttgttccctgaacttcgagttgtaatatcaggaaatgcgtttttggtatgcggccacttagagttgtgcttgatcgcacttttcttccaagaggtgtaggttgacacgctgcccatggtcaagctcttaatatctagcttgttgtaggtggtgctctcaaaaaaataactatgttattttactataaacttgcttcaatggttatgattcaagctcttaatatctagcttgttgtaggtggcgctatcttgtttgatagaaatcctcaagataatttactaatgacccaatcaaagtaggttgaggtataagacctctatagctagcacgtggttcccaaaattatcaaaaagattgaagaggtaggaaaatgatctttatgcatgatcttttttttttaatacaataaccaattttattgctaacatgatctcctttttgttaagaaaaaaaaaaaaaaaataacacttaacattaaaaataggctaatttaatatgtactaaatcatgctctctgaacttttatggtcgtttaaaattccccttgaactattgagattgttggatttaaggactttttgtctattttagtaaggaagtctaacatggatgaaatttcaggtgacataatttagtacatgtcaaaattcgaggggtatgatttggtagatatcaaaatttgaagagcatgatttagcacataaacaatcactgaactagtaaaattgaatgaaattaggaaaaagtccttaaatctaacaatttcaatatttcagggagaatttttaacggtaaaaaaataaatcagagaacataatttgatacatgtcaaagtttagggaaaaaaaattctaattaaccttaaaaataatacttctaccattacttcagtgggtctactttagattatatttttggtctttgtaataggctccaagctattaaatttagacattgtaatagattttgcaatggcgttgcctatactttggctaaagttgctttaacggcaggtaaaagtataatttggtagctagagaatcgtatttgtattcttgttgatagcgaataatgctataattaaataaattttcgcccccaatttagtaaaatacttgttgcttttggtatttagagttgagaccatttctttattttttttttcatatagttaaaatatttaaaattttatgctgcaagcacttcacttaatttattatttcttaaaaaaatatttttaaaatttcaaaaataataagttttaatattttagcatataagagtatttgaagtgtaacaaatatttttagagtttttatagttcatactgaaattataacttttttatttttttactgtgaggcagaatttttttacaaaaatactatattttttgtttcataaatactgtgtaagttttatactgtgtactgtgttaagtttttacggttgttctatgattatttttttagttattcctctgttgttttaattattcaatttttttattttacggttattttataaaagaaaatagtatttttataaaaataattcgtgtaacaataaaattataaacttttattcaaaat

SEQ ID NO: 297629 - DNA, 1104 bp, Cannabis indica
aaaacagatagtctaattgggaatttttgcaaaatacacgatccaaaatagtatttaatcatgtttaaatgattaatttaagtagacaaatctaattatgtttacattgtgtatagtacatatagacaatctaaattaacagtcaaaattagtggaatttttgagtattttgtagcacttcactttataaaataataataatttgagagtacgtacagaatataaagtgtaatataaagggtatttaggatttcccattgtaaatttcttacttttattctttttctttgtaattgggtgggtaaagcaaattcctttttttctcttaggaacgtgtttcagtttttctaattttggttttggcattacatcaaacatctggagtgctttcccaaatggaacggagattcactgctgttttctgataatttaatcattcaaaacctgtaagagcctcttaaataagctttctttagttttcaaaaccgaaatttctagttttgctggaactaacattcacaattgttgtaaggtgcagcaaaaagagaaatgagttgtagtcgtatagtggcagagaacgtgtggaaacaaattgaatcaacttccttaggtaatactttctatttcaacttacttattcttattgtacttatttccttaagctttatgattgcaattttcgttttgtttttaacttttgatgagaggaaacaatgtgaaatgggacagtgacagatgagcaactctccatgtgagtaacttgttattgatgttgtaatttgttgggtttatttaaagttcatataggtgttaagttatgtttgttacttcaaatttagcttaaatttcttgtttggaaagaactttgagcgagctactaggattgtggatcaaagaggtgttaagaggatctcagggttacccagtggacgttccatctttcaggtaagattaaagatgttgaattgaacaattaggaaaacccatttcgattttatcatgctcaagctcatccaaacttgaatatatatatttatatttatacatatatatatatatatatatgttgaagaaaaagtcgaccaaaaacacaatgacaaacac

SEQ ID NO: 297630 - DNA, 5986 bp, Cannabis indica
ttatttcttttatgttaatttctctttttagtttaattatggatgtgaatatgaatattatgaactaatttcccaatttagggatatgatgaatgttagttgaagttttcccaacttagtttatgtgattgttagttttttttctctagattattatgatttgttgttatttgtgttaatacatgttttagactggccatcttgaatatgatttatgatcttaatataaaatctgagaattaaatgaatattaaaaatgctctaattgaacaaacattagttttgatctaaaacgagagtcatagcatctgtgacaattacattatgtactcaatgcaaattatatgttaatttatttcctaaatgcaaatagataatatatgatttaggatcttaatgatctgagaagagttaaggttatttctttaatctatcatcacttaaaggaaaaaaaacagatatattgcattaacaattgggtaactgaaacaacaggattcatattcctaatctttcatccgtagtcaaacacattaaaaattgtttctatttttttttccttttatttttttgtcaattattttccaacactgtttcgactcaaccgaatagaaacataaatctaattaagtagtacttaattttaatttgctatggttcgacttcacctgtgtgagtaattgcaatgaatacgtacacttgcgtagattataattttaagcgcaatagtgcatgttgatcctgaaatcgagaaaacttgtagaagaaattgaaaaaaaaaataagaggctagaaaggagtatagtgggggttgaataagaagtagagatggctaataacgacaataattgaggtgccatagatgacaaggctaattgtcttaatctacctgaccgtagcttgagaggctatgtcctacccaaccgaacaggggtctagatcctgtataaggccaccttccattgaagccaataattttgaaatcaagccagccatactgtaaatggttcaattcatagtccagtttaggggctgccattagaagatcccaacatgcatcttgctaattttgaggagctatgccagacatttaagataaatggagttagtgatgatgaaatctgattaaggttgttcccaattctccttaactgatcgagccaagggttggtttgtgtccttgccacctaactctatcaacacttgggaggaattggccctgaaatttctctccaagttctttcctcctgctaaggttgccagattgagatcagaaatcaacagcttcatccaacaagacaatgagtctctttatgaatcctaagagagattcaagcacctaatcagaaagtgtcctcgtcacaaaatagagaagtggatgcaagttcataacttctacaatggatattgaccagcatcaaccgtacacttattgatgttgcctctggtggagctttcacgaagaaaagtgctaatgaggcttatgagctattagatgagatggccataaataaccaacagtggccaagcaaaataatccaacagaagagagtagtgggtttgcatgaaattgatgcaattactaagctaattgcccatgtagaagccttaactaagatggtgactactcaagtgcaaaaggctccaatgatatgtgagttgtgtggagggcctcattcttatgacaactaccaagttgatgtgaatagtttaccaatggtgcaagctcaagccattgtatttacaaacgatgatcattatccttaccttgacggacgttttcattatcacgataggtagctatcgggtgaaacacagcaaggcttcttcaaccataaatataggccaccatttcaaaagaattatcaaaaatctacccaacatccaagtaatagtggagggtctaacattcaagtagatcttttgctccaattcatgatggagactaaatcctttattaaaactttgaagaaccaagtgggacagttggctacgcaaatggcaaacagaaatcaaggttattttcctagtactactataaaaataatttaaaagaaaactgcaaggcatttattttaagaagtggaaagaattatgccgagtcgagccaagagaagtcagatgaagaaaaccaggatcaacaggcaacaacactagcacaagaagaaaagaagactactgaaggtctacaaccaaaataagcctcacctccaatcaacatttatcatcatgtgaagatccattatcctcaaaggctccacaagaataacatggacaagcagttcatcaagtttcttgaagaattaaaaagctgcacatcaaaattccatttgcagagcccttagaacaaatgctgagctaggtcaaatttatgaaggatatttgtctaagaagagaaagatggaagattttgagacagtagctttgacggatgagtgcagtgcaatattacgaaagaagctcctcctaaactgaaagaccttgggagctttaccatactatgcactattaggagtagagaatatcaatgccttctatgatctgggggctagtatcaatcttattccattgtcaatatttaaaagactccaacttagagaagaaaagacaaccactgtaacattgcagctagctgaacgttctttggcctatctaagaggggtaattgaagatgtcattgtcaaaggggacaattttatttttcctgctaattatatagttatttacatggaggaggatagcattgttcccattatccttgggagaacctttttggcaacaggtaaagctttaattgatgttcaaaagggtgagttaaagttgagagtccaaggagataaagtagtattcaatgtactcaaggccatgacttatcatgaagctagtgacaacttcttttcagttgatgcggtagacaagttggtggagacaaagaagccaattaaagaccttcataatctgactttggtgcaagaagatgtggttgatcaagactgtaaagaagaaatggaatatgctttgtggcttgactcatatgggctattgaacaaaaagtactatgaacaactcggagtgattccaataaagtcagttccatccatcgagaagccaccagaacttgaatgaaaagtcttgtttgatcacttgaggtatgatttttttggagagaataagacatgacctgttattgtgtcaacctccctttctacggtggagacataaaagttgttgagggtattaagaaaatacatgagagccattgggtggacattggctgatatcaaggggatcaaccctcaactgtggtgcctaaaattctaatggaggaaggagtaaagccaatcattgatgcacaatgaagactgaattttccaatgaaagaagttgtgagaaaggaagtgttaaagtggttagatactggagtggcttagcttatttcaaatagtaagtgggtgagttatgtccaagtggtgcctaagaaaggaggaatgacgatagtcaagaataaaaagaatgagttgattccaaccataactgtaactgggtggagaattcagatagaattcaccagatgcttgataaattggctggccaagagtagtattattttcttgatggctactcaagttatcatcaaatagtcattgcactagaggaccaagagaagacaacatttacatttcaaaggtgtatgatgaccatattttctgatttgattgagacatggatgatttctctatttttggttcgtcttttgatagttatttgagtaatttagaaatggtgttaatgagatgtgaagaaagatgactaagaaagatgtaatccaagactaattcgatgggttcttctccttcaagaattctacctgaagatcaaagataagaaagtcacagagaatttaatagcagatcatttatcaaggttggaactagaagagagccagaatacaaaggaggtacaaattaatgaagagtttcccaatgagcaactctttagtttgagggaaagctcgatagtaccatggtttgtagattatgtgaatttcttggctgccaacattacacctccagacttgagtaagtaatagttgaggaaattattttttgaagtgaaagattattattgggaagagtcaatcctctacaagcactattctgataagataattacgaggagatgttttgtatcttaactcattgccatggtttacatgatgtggaggctatttcaatggaaaccagactgttgcaaaagtcttacaaagtgggttcttttggccaaccctattcaaagatgctcatgaatttttaagcatgtgatcgttgttagagaattggtaatatttcaagaaagaacgagatgcctttgactggtattttggaagtagagatgtttgatgtttggggtatcgactttatgagatcttttctttcgtcttacaataattcatacataacgtgtcaaagtgggtggaagcagtgacaacacactctaatgatagtaaaatagttctaaattttctacaaaagcacatttttaatttactcggttaggtattcctagagccatcatcaacgatgaatggagtcatatttgcaacaaacaatttgaggcattacttgcgaggtatggagtctgtcacaagacaacactaccctatcacccacaaagtaatgaccaagttgaagtatctaactgggaaatcaacttaattatggagaaaatagtgcaacactcttgaaagaattgggcaaagaagctagatgatgctttatgagcttacagaactgcatttaaaagacctattggtatgtcaccatataattcggtgttcaagaaagccgatcatcttctagtagagttagagcataaggcacagtgggccatgaagaccctgaacatgatttagcagcaggttgtgaaaagagactgttgcaacagaatgagttggaataatttcaaaacaaagcctacgaaaatgccaagatctacaaagagaagaccaagaagtggcatgatagaaacttggtcagaaaagagtttcaacccgaacaataagttttactttttaactcaagattgaagttctttcctaataaattaaagtcaaggtggtctggatcgttcacagttgttaaagtattcccatatggagcggtagaactcaaaggagataaactacagcctttcaaagttaatgaccaaaggttaaagctctactagggtggtcagatgaccaagccaagtctaccattctcttggcaccgctatgaggagaagatcagtctctgactatatgacaataacgacagtgcttttaggaggcaccttaagttatttattactttaattaagtttgagacatttgcaattttattcataaaaatgtaggcacagctagagagtccgaaacacctataaaaatgtagtttaattttgagaaaatctcataaaaactaacctagccacaaagcacaatttttaggcggacgctttttttgatatgtagatataaataattaatattataaatgtagtttttattagaagattatttaattataattttcttaaaaaaaattaagagaatgttcactaattgtatattgtatacacgtgcaagcacatgtccacttatgcacgtgcaaaataagtcgtgtaaactacagattgaccaaatataaacagttttatatatagtttatctggaatggggtggaaatgaattatatattttaatggccgaccaaatatcatttagccgccggagagattcatttagtaaaattatatataaatcatgttcctgtttattagaaacaaataatgttttctttaatttttgtcgtacatacaatatgtttgtttataatctatttagagagagatctatcatctaccagacatctatatctataactactataaaaaagagaatgatttgggctttttaaagttaaattacaatattaaccttttcttt

SEQ ID NO: 297631 - DNA, 5416 bp, Cannabis indica
ctcagtcaacggcttttcaatactgtaacttcagacgactttctctatcagtttgttaacagccttatcaagtatcatatggcgatctgctacaccttatataccgcaggtttgttgtatggtggccatttagattttggtatcagacatttcatcttaaagcatgttttggtaaatttggtttcaatatctgttagcattgcatttccttgcttctttgtagttagctataatttagaatatagattcttttcttacttcccattgcaatttagtaaatttttttgggtaatttttaactgggttatcacttgtatttatacatttatttttattttgtggttcggcttaggttttgtgtggttcatcattacattgaagaagaagagaatgtacaaatatcaatttggccagtatgcatggacgcacatgattatgattattgtgtttacgcaatcctctttcacagtagccaacattttcgaaggaattatctggtaaaaaaacttcctatggaaatcaatctgcttaggttcttactaaatctacctttaattccacctctcagatcttttacaactttctttcttgttttcttttttcgctacaaacttggagcaagaaattacatgaaagttggctgatttcatcattttatatcctctataaatgagttaactgtgacgggacttattcctatataataactttagaaggctataaaagagttaaattctttcctcagacctgcctgatattgtatgtggcgtccactaattacatgctgaatattttatgaatatactaagcttactttagtattttttgttattccctgaatttggttctgtttgtcttcattctggactaattttttctttccaaactctttcttaatactcttttcaaatatggatgcaggtttcttcttccagcaacacttatagttatcaatgatattgctgcatatttctttgggttcttttttggaagaaccccattaatcaaattatctccaaaaaaaacttgggaaggattcattgatgcttctgttacaactgtcatatctgcatttttggtaagcatgattttcctatgctacgcacgttttgcattcttgtgcatattcctgaaatttagaaactggagtattactaagtcttatgcagtttcccctcatttagttataaagtggtgtatgtggttcagtcctggtcaccatctcatgttttaaggattaattatgtgtagatccacagtatagtttggctggtaatgggctcaataagtatctgcatgccctaatttctactgttaccacacaaccttattatattatgttttgcccatttaggaaatgttgactgatggagacatcttgcgcatcagtttctattatctagttctcttttctttctctcttataaggtctcaagttctttgacctaaatgattatataggttgtgagtatttttcttgacacttgatcacatttctttttttttttgtttgtgtgatgaaatgatgccctgaacctagttcacctaatgttatattcaattgttcttcatgtgtacttgaattcatattcccttttgatcaacatgaaaatatatgatggtaatgtcaatgtttggcttggtttgcaatttagttacccagtgtatttatacttgcttgtgcagttagcggacatcatgagtcgttatcagtggttgacatgcccgaggaaggtaacttttattaacaaagttttgttcattgatggtcggaaggagatactattttgaataactgaaacttctgctcatgaaatttgaggacttgcaggatttatcaagtggttggcttcaatgtgatcctggtcccttgtttaaaccttactctgttatcttacctggatgggttcctcaatgggtgagcagattgacatactcttgaacctgttttcggcatctatttaatctctactcatacttaattttgttctctgtttcatatcaaatatgtttctctttgtacaatttgagaggaaggatttcttttgccgattagacaagaatgttttctaattccctggtctcgtatgcatgttttataattaggctcttgaaattctggcagtgtcctctgttatccagtaacagtaattaggcacatcctatcttatgattttgttatcttctaatataacctgatttatcttatatcactatggaaaggaaatttatcttttctccctctatgactgttagccagtccatcttctgttgctttctgatgagcatacattaccagtttttcacctctagatgatacagctgccttgtcatgtgtgaagtaggctaggtcctgacctgaaatgctgtatggttgggcttggcctatgacatgtaagtggccagggatgcctgagattccggccctcgttgatgaagagtcaaggctagcctcatttatttctgaatggaaactctaatttctttctactatttataagattatttaaaacagttaatatattttttttttctcaagaaagatgctagacaagcaaatttgttccagatacttgaaccaaattatgtgccacaatttgtagtcaactttaaaaattaaaaatgtcccattttaaaaatgttttaaaaattattgttatgtatatggtgtaaatgtttttgtgctaactatgattgatgttgacagtgtttcattgttaaaattgtggctgaggctgtctttcctaatacttaataaaacatattttttgaaaaataaaatacattaacctttttcttgagaaagatgttttaataaagaggggtgtcaaggctcatgctggcccctaggcttcaacgtttacaagtctgactagggcatatgtatttatattcttcaacataaacctacaaccctacttagtcttttcttgtcctttcgaaagcttgttttaggcaaattcattcttgtgtgttaaattgttcatgcatcactatttaaatgttttttttttggtgttcacttatacagtttccttggaaagaattctcagtgtttcctgttcaaattcatgccttggcctttggtttatttgcatcaataatagcaccttttggaggcttctttgctagcgggtttaagagagctttcaaaatcaaggtttgctcttgcaaccattctaatttttagtactgtagtttttaaacagtatgcttttagaatatgtcaacaactttccccttttttgtttttcctcatattcccgttttctttgttacaggattttggtgatagtattcccgggcatggtggaattacagacaggatggattgtcaggtaagcttggatgaaatttgagcataaccatgcagctttcctataatctgttaccattttatcaccctcaaacactacacttgccatatatactaattgtgaaggaacataagatgagaatgggaatgagagtaagaattatatatatatataaatatatttatatatatatatatatatataaccttttcattcatatgcttacctgcactgcacatgacatacaagctttggtgagtgatattacaaagaaggatgactcaatttctgactcattctcattacacttcaaactccttcctcatacgatacttttcactagcgataactagacattcccttagtaatgtacttgcaatttaaaaattggtacaaaatggtaccctgtgttctcaataataatcattggttactctgttcttttgaaattggtataaaatgtacctcggaaatatacctatttggtagctataatttattgagtaaatttgagtccggtactattttataccaattttcaaattacaaggtactcaatgatcattatctaccatcctctgcactgggtctctttcattattctgtgcgaatcctccacttaagcgtataaattagctaatgtattgaatccaattatgcatacttctccttaattgagctgctctcatgcagatggtgatggccgtattctcatacatctatcatcagtcatttatcgtgcctcagggtatctcagttgagatgatcttggaccaggtatggttcatacatgttcacaacgataagatcatcttcaaattttatgaacacatgctgattaatattcttattcttcgttttagatactgatgaatctcacttttaaggagcaacaagctctgtacgcaagacttaaagatatgttgcatgagagactgattgggcagtcttaagttcaaaatctatggcagtcacttgctagaatggtctctatgattgtgtggcaaggacagattttttatgaaaaattcatgtaatttgcgttctgtagctgtcttctgttttcgaagtgcaatcctccacactactcaaagatggcggtttttatgacctgcatccacaccacaccttgtatagtctttctctcaggcaattgaattggcagttttcaccgcaaagagagaaattaagtgcttctacctttgttttagttggttatttgtttttggttctgtcctaattttttcgggagggaatcttaatattgttggatttaacatacttttcctaatcttttgttgtcttcatatgtatgaatacgatccaattatggcaagcaattgattaggactgagggatttggttgagggggaattcaaatcatgaaactatgtttttctcgttgtatttgaatgtaataaaaattaaattgtttataagatcgttttagttttgtggtcaggggaaaaaaaaacttgtgttttgggggttctttttgcctcatatgagattaatttttaggaaacgtacattcattcatataatagaaatagtcctccatatcaaaatgttatgaagtgagtaaaataatacaatatgtaaccaaaacaatgagccaacaaatggaagaacgagctaacgaactaatccaaactcataccactccaatcccaccaacaactgcagaaatagagatgttggttgtatgtgtgtttaatatgagtatagttctaaattaggggttttcgtagtgcaggtagtgcggtttttgattattttttcaaatcaatttgcacatgtggcttttttaatttctcaaaccgcactcgcactgcaaaactaaaaaactacactgcaaaaaatagtgtgctgcggtttctgcggtttggactatcactaaataattaaactatcacaaatacaacaaagcttgagcaacacttgtcaaaaataccataaggcttgaaaataaatatgaaaaaaaagtttcaaatttcaacaatacaataattagtgggctcaggttggatcaatattcacatattggacctaaatcaatataaaaattggtatttttataaggaataattacataagac

SEQ ID NO: 297632 - DNA, 8502 bp, Cannabis indica
agtgttacaaactgtaaagtttatgtggtttagccacgaatatccttatatatttttggaaaattttacaatacaccccttgaaataaatatattaatgcacccctatctattttagcattcgaaataatttgttagtcaatttttttctcatggtcatgtacgttatagttatttaagacatcttaccaaattttaaaaaatttagaaaagtttaacacgccgaaaactatgttcaaacagtgtgttgcacgcgtgactattttattttatacacgtgtaaaatagactgtttgaacattgttttttatattgtaaattactctgaattttttaaaattttatagaatatcttaaataactataacgtacatgaatatgaaaaagattagactaaaaattcttctggataccgaaacaagttaaaggtgcattgtagaatcatcctatatttttgttaaaaaaattaaaaattattattatttcaattgggatggactaaacccctgcaaaaaccctaatccagaaaagaagaagaagagaagagtgaaaatggggaagaagaagaaagaacagttagggaatctactagacaccttaggagacttcacaagcaaggaaaattgggatgaattcttcaaaatccgaagctcagacgaaccattcgagtggtacgcagactggtcccaactcaaaaccccactcatttcccacttctctcaaaacccccaaattctcgtccccggttgcggaaattccaggctctccgagcacctatacgatgctgggttcaatcaaatcaccaatgtggatttctctaaggttgttatctccgatatgttgcgtcgcaatgttcgccaacgacctggtatgctttggcgagttatggatattacaaaaatgcaggttagcttagaaagatgaggtttttatttttttccttattatgttttatggaaatttgattgattgattgattgttgttgttgaatttggtagtttgaagatgcaatctttgatgttgttgttgataaaggtggtttggatgctttgatggaaccagaattgggtcctgatttagggaagcaatattatcagaggtaggtttgtttaaagcttaaacctttaggtttcaatctgtttgaatttttggattggttttcttaattttgcttatttttgaagcaatattgtacaaacaaagttttaatttttggatttcattttggtttcttgtgttttgttttgttatacaggttaaaagggtgttaaaaattggtgggaagtttatttgccttactttggcagaggctcatgttcttggtattgaattttaaggaaattattttcaacatcttattataatgtctttcattttcttacaataagggcacaacttttgtcagtagggaagtctaagctctttatttttagtacatagataaattattactcatattttgttatataactattaactatgtagattgtagttatagtaggcattttacatgttttcggaaattttaaataatttacagtgttgaaaagaatgttcaatcattagtttcactcatggttatttttgtgaaattgattactttaaattcagttttcggcattgtaaattattcatttttttttttcgaaaataagtgggatgtctgctataaataaccataatgtagaccttcatataaaaaagattgggttataatttttcattttcgaaaatatagatgcccctactagtagggataaaagtgataaccctactatagttcctacatataatattatgtatatagtgctcatgctaatgttggattaatcatgaattatattcttgtttttgctgttctcatgtttattatgtggtgttgcctatccttagtgtgttcaatttctccatgttcaggtttgcttttctctacatttcgctttggatggaaaatgagtatccatgtcatacctcaaaaaccatctagcaagcctagccttcaaacatttatggcggttgtggaaaaagagtcatcaagtatgctgcatgagataatgtcatcattcgataattcctctcttgtttgtagtggagatcaggtaaaataatctgtctacatgttttctctaattttttaaggattattgtgccttgaaatatgataatgccatgagggcgttagtctctctcctgccgtttcctatttcaaggtaattttatttaatttccgagcatgacataagctgctatgtttgcttcaggcccgtggtctctttgaggctcttgagagtgagaatcaaattcgtagagggaactctagtggttctgatatctcattttctcttgaaggcttgcaacttgaagataagccggatttgtcaaagctcagtgaaggccgtcggttgcagcttacattgggaagacaagggagctcctgcttcatttataaagctgttcttctcgactctcagtctcagtctggcccatttcaataccattgtggggttttcattgtacctaaggtttatctcactgtgcctagtacttgtgcactcaattgaaccagcttctttaatccttacacatgtaaattaagagtctcaataccaagaggtctcataccaatttccaagccccctcaccaatagaccaatcgtagtggctttacgactagttttactattgtttaccgaatgggctcgtttagcttttcatgcttattaatattgatattttaaattatcctttctttgatttgaattctttgccgattcgattgataaatactttattctctactaagtaatcactgtgtacattttgtcatatattattttgaaataagtaactgagttttagatttcagactcggagtcgtgaatggttattctcctcagaagaaggacaatggatggtattcgaaagtgcaaaggcagctcgtctcataatggtagttttttctctttgaaagtgatattaatctacggatgtttgtctaactgtttaattactctagctaaataaaacttacgtgctgaattaaggttttattggacagtagccacgccaatgccagcatggaggatattcaggtaaccttttgttcctattaagtattaatgaatagagattattatgataaactatgtgtaagtaatttgctattttctaaaaaatgtagtgtttggtctctctttcagaaggatttgtctcccctggttagacaattggcaccttctaaagatgatgttggagctcaaattccgtaagtacattgtaccatttgattttactcactggatatcttcaaaatttcctaatcttcttgagattttgcttggcttgcataagtattagttaagactagcaaaatggaagttagatttttttcgggtagtccagaagttgtaactttttcttagattatgttttaggcacaaaataaaaaaaataatttttcattattgatgctattgatagatttaaatctgataatgtagcttttattatgaaatggttttgtgaacataattcttttttacttgcattcttttattttcattggcaagaaaaagaatcattgtcactccacggtatttggaaacaaaattcaggacgacacattttgctttgctgtgattcaataattatcacatgtggttttatgcatttattattactcttgcaggttcttgacggctggagatgggatcaaacaacgaaatgttgttcatcaggtacgaacaatatttgttttagttaaaaaataaggtaaaaataagcagcatatgtgaataattatgcagttgattttcttacttaaaaaataagtgataactattacctaaacatgaaagttgtatgaaatttaaggaacatttgcttttgtgtgattttttctatagccaattagccatggcattattgcatcgccggtagggattgccatttaatggttataaggcttattatatatagatttagtgtgtatcccattcgaaaaatatgtatttactgtaagcttttttctggaaagaagatggaaattatttgtttcaactgattgggaaattctatggcaagactgtctttttagatgatggtttaacataattttgtaatattgacaccaattttaggtggccgttatctgctgtggacttaatttgttttactaacaagttttgaagtgattcatattatgtcattttcatatcatctcagttgcctgccaacatctgtaggtcacatcttcattcactgggccaataattgttgaggatgtggtatatgaaaatgtcgatgatgatgttagtcgcatttttccaaccaaagatttgatatttcgacgtcttgtttttcaaagaagtgagagtctagtgcagtctgaagctttactaacaaaggaaagttctcataaaactgttggtgacagtgaaaggaagaaacccgtctcatcttccaaatctaagaaaagaggaactcagagaaaaactggtggtatgaccatatttcttataatttgattatgctttttttacttgagttttcttccattgtagacaggattgttctctttgttcttgcgtttttcgaaattcatgaattactctctagtcttttaaaatgtttgaacacttccatgctctttgtttctgttgtctcctagtactctgataagaaaaacatatgctttatttcatcttaaaggtgtattctttgactttgtggtgataagtcaatttcagctattgcgattattccttatttagtcttatttctaagtttagtgttgccgaaagaaagatgatccgtgctcacaaatagtattccaaagctaaaccattatagaaatattatatattgacaataagaggaaaaatccatgattgagaaattccatgtcaatttttttctctgctcttgtcactcatttgcttagctaattattctcatttgtaaagtagcttcaaagtcttaagtatgaatctttctgtttctttattggtagaatcatttgaccagctgaaggtttatcatggctatctggctagttcttatcataccgggattctttctggatttgtgttgatttcttcttacatggaaagtgtggcatctagtaacacatcagtaagcacttctgagctctctttgtctttgttaagaggaattgttggaaatttatatactcacttcatatcaagaaaaaaaggtattttctgttgattatttattattgtaattgctagatcttttgttttgaggcaactcttataactagattgattgatcgacaacactttgttatttctttgttatttttgtaactgtgtaaggaaaatgactggttgggtttgtatctttcatggcatttacattagatctattcaagagtttattttttcgctaaattctaaaaatcgtttttaggctaaagcagttattattggtcttggagctggtttgcttcctatgttccttcatggatgcatgccctttttgcacgttgaggtaatcttcagctttacatcccgaaccaatcttccattataataattataagcggtgataatatggttttgtgctttatggcttataaggtggtggagttagatccagtggttcttgatcttgcaaagggctactttggttttaccgaagaggaacatttgcaggtaaattcactaatcaaataatggcaattcacgattactacccgtgccccattttgtactgtaaaaagtcattgatgctaaaagaaacaatttggaccatttttagtactttttgactacaccataactgtctttagtgggttaaaatttgggaccgaaactcgatttctgatcactgtagttaagttggaatgacagataactgaaactttagtttgactttgctgcaatcataattggctgttgaattttccatactcattatatcattcatatcttaaaattttacaatttgtacaatatcaaccaattctagcttcaatttggtttatcaggtacatattgcagatggtatccaatttattagagacagtaatgtggtttctaattctggaaatgatgatgctgcttctaatggaatttgcacgacatctcatggaaaaggcggtgtgaataatacaaaggtggacataatcatcattgatgttgactctgcagattcaaggtgaatatatacatacaatccctattattacatgtgttgagattgaaatacaaaggaatatatctaaatgagactatttgttgttttgcatatagctctggtatgacttgcccggctgcggattttgtagaacactcatttctacagactgtaaagaagaatctttctgaaaatggtctatttgtgattaatttggttgcgcggtcccaagctattaaggaccaagttatttcgaggatgaaagaggtattgtttgtgatcttctatttagattttgtttattaattttggttgctaattgtgattttcttatttcaggtcttcaaccatctgttctgcctcaaaggcgaagaagatgttaatgaagttattttcggtgtttgttcagagtcctccattgaagaggattgcctaccaaaagctgcctgtcgactcgagaaattgttgaagttgaaacaccctgagatgagccaaagtttgattgatgctgcaagtaaaattagaagattgaagtgaattacatctctcaaaagttctactttttgggttgaaatctctagttgctagtcccccagtgaaaattataaagggaaaaaagaaagggaaaaaagagcattgtattggctccaaataatgctgcagcaaatgagaaaagatgtttagattaaacaaaaatggtcatattaggaaaaatatttaaacattttcttttgtcttttctgaacaaaaacccatgttaatgatatgtgcaccaaattatggtgttttggtacatatatcattacttttgttttttaggacaatgtaagtcactagattggcatttgaaaaggagcaatgttgcatgactcggattatacatgacttggattgtgagtttcaattcgcatttgaaaatgaactatgttgcatggcccatgtaagagccctaactattatacatgactcggattttgagtttcaattggcatttgaaaatgaacaatgttgcatatcctgattgaagctcataacctaagccacattgttgatatatgactcggattgtgagtttcaactgacatttgaaagtgagcgatttttctaattaaaacaagtcatgtgagttggcttttgtagtttgcaagattcttaccatattcacgcaactcgaattgtgagtttcaatcaagaccaaatacctttttctttgaaaaatattcaaattaacaactccaataatagaactccataataataagttaaaaaaaatcacaaagagtcataaaaacacaaaccaattagtaccaactttactctaatacctaaccctccatataaatacataattaaactctagattaagaaaagaagctttacaatcataatcataaaatcacaatgaagaatgatgtgaagaaaagttgttcttcaatttgggaactttgaattttgcagagaacaattttggagcaatcacaacagactttgactttaactttgactttgacccatcaccatcatcatcatctgaatttcttctcttcaatcttcttccattaaaaaacgaatctttttcaaccaacaatcttccattttcttccttcattttcctcaattgatttcttaacccctcaatacatttatctttctcaaccaaaaccctaacaaaatctcccaactcagtttcagcatactccaatctcaatttctcaatctcagcctctctttgcttcaaacccataaccaattcgaccttagaaatttcacgcgagtgttccaattcatgaatcgaagattcccttttcacctctgaaatcaaatcttccaatatacgaacatcggagacccatcgattgtgttggattctgattcgatcttcgagtagttttcgctctttggtgagttcctcgagttgggtctgttgggtttgtagaatctcgaccagagatttgaatattctttgccaattttgattatgatgatgatctgattgaggtttcgggtttctatctttggccattgttaaattcaaattcaagaagaagaagtaatgaaaaaaagaccgttggagctttatagagaaaattcaaattttaacggttgagaaattttccatgagttaaatatcgttcaatctccaccgcccattcctttttaaaaaaataaaactctctcttttttcattttttcttccatgttgtataattttcaaaagttaattaggatttttaccgtactaaattatgtcctttaaacttttaagtctttaaaaatgctcaattattaagattgtttttttttgaaggaaaatggtaaactttattagaatgaacgttc

SEQ ID NO: 297633 - DNA, 4299 bp, Cannabis indica
ttgacagaacactatttttgttttctgtttttaaaattgaaaaacaaaagtagtcacagaacgtatttttgtttttcaaaaataaaatttttaaaaacaaaaattttactttcattttgtgattataaaattagaatacaaaagtgttacaaaacggcacctaaatttttattttttgtttctattaacggatagtatatgaactatgatcttgttacatgaatggcaatctttaattaaataacataaccttttaaaccacacctaaactaaaaaagaaaattttaaagtagagtaggaatatttctctgtatacattccattctatttgctttatatatatatttttattgatttaaattcaataaaattatactattctcaagtttttatttttctaaaaatagaattcttaatttattcattcaatccaaacatggagagaaaatggaatcctttagatttcttttttattctttccaattccaaacatactattctttttttcttttaaggaaaccaatacatgttaaaataacaaaggtaataaagttacacaactagtggaagattttttttcatgtataaaagttcattatctatcctaaagacatgcagagataagaactagacaataaaatcttaataacagaaaaaaaaaaacttcaaaactgagagttgtgacttctgcccccgccaatagaacacctgtaaattacttaaggataggctacactcattgcgccaccaagtaagtggtcgggaaagccactccacctacctctcctcctcataaacgtatacgtacgaggattgcaaccattgcactctaggaccatttagaaaaccaaaattaaaactaaaatctaataataatatattataaattattccgattatcattttaatttcattcccattcttgttattattgtaatttcattctagctaaccaaatgccctctttggaataatactaaacactggcaaaccgaatgctgtcctaggtataatactgaaacacccaaatttgcttttagtgtgtatatattcaatttctttgttaattggtagatagagccagttatattcctgaaaatttgctggaactgttaactcaattcctttctttgtctagtacgagtgtccatctaccagctaactaccgtatatgctaatatcacttgagggctttaaaaaaatcagctcatgtttaggttagtgaggttgcaggattgaacatgcccatgtctatgtggcatctttatccattccccggaaagcagacgtggcccttgcaaatagaggacgttccaggacctctttatctggaagctgactcgtactctactatatggcccaggaaccagaacagctcttgcacagtttgcttaatttacttgcatagagggattgtgaacatatatttctggtacctgctggcttttttatgaatcttgggccaacctattgttacagaattccgcactggatgaataattttccgctttggaactcaagctgtttgggtgtaacttgccaaagcaagcattacaatataagctattggaagtggcttgttcagtatatgagtcttacatgtgagggcttctctcttgttatttggtttaggtccagacagaatctacttctcttaatcgttgttcgaagcacaattgttaacacaaagtagtgatttttgttcatgattagagcttgtttgagagaaaaaatttttccttgagtaattgctagagacttaagatacaatttgtagaatcaattttattgagactgatattgtcttcaaaaatctttttcagggtacagaagatgacgttgtgaattggttgcacggtgatggactgtggaaaatggcaaaggatccatatgatccactatggataaaaggaggtggacactgcaatttggagctctaccctgattatatacgacatctttgcaagttcatccaagaaatggaaaacatcaccacagagattcgtctgaaaaagatacgacaaacactaaaattgcacaagagatctagctctacctctgtctctacctcaagtatatgctgcgaaatcaaatgctgtcaacccaaatttcccaaatgttcaattcctaaatgcagcacatgctgctggtggcccaaatgtcctgcgtgttttagacccaactgtggatacagttgctgcttcagaccgaaatgtctgaaatgttcgtgttgctgcaggagaccaaaatgtccgaaatgctcgtgttctaagtgttcaggatcctgctgctgttgcatgccgtgcttgcaatggcgatggtgtggcggtggagaacatagtagtgggatgaatggaaagcacgagggctaatgattgataaacgagcccgtgtatagattggcggaacttgctaacacccttttctaatctttgtgcagttgtgttggaaagcaagaggaattagttggctgaataattttcttgattatggtataattgaatattcaactttggtattattctctttattctattcgttttgagaacctctcaatttacatatgctctcaacatttttcactttgaagttgaaagatatttacacttaaattatataattcatttcatttcgaagtcggaagatatttagtatttacactagattgaatcagtggacatcttgggctagtcaactaaaagatattggacaactttcagtagaaaaatagttgtttttttaactatcatttttcaattagtgttgtagtgtcctttgtcagagacacaatattaattacttttaatgctataaggaatccgtcaacatgacagatgaatgattaaattaaaatactaatgatgcaaatgctcagtaaccccaatatccgtcaacttgattttctcgttcctgggccatatagattttctgggatgataatgctgtagagataaaattatttaagattgtatatattatgagtgtttagttaccatctttaaacttgattttatgttatacattatagaatgagagtataattagcagatgatgactgcattcttaatttatttctgtaaagaaaggatagtgatatcaacatctttgtatcaaatacaaattataattgagtgatggttgaagaaataacatagttttgggagagtttgcttttgaattaatccctcttcaaagacaattctttgggctccaatcagtggacaaagccgccgagcacattaatcaatcagaagaaggccaattacaataatactatgataaaatgctcttttttgtatagttttggaattctgtattggctttctttccacaataaaaattatgtgtttttgctacttgtagttggagaactcaaaggaaacaaagtgagcaattctggttcagaataacctggttgactcctgggagaagggtgcaagtaaaatcttctttcttttatggctttctcttcctcttggctgttcaacgtaactgattcctcctcttttttctcttctcctattgacaagtttttgaaaatagttgagggagtgcccaatgggcttgagtgaaagcccagcccacttcctggtttagagggtgaaatgctctggttcttatcaggggaagaagcaaagactgatctaacatggaaagtgggcttaacaatctcaagcttgggcctcatgtagtgccttctctcgtggagtttggatgtaggtggtggggccgttggtgttgtgaggaactgcctctttgggcctgttgccttgctgtttgttgttgttgctgctacttcttgttgggctacattatttggctctgatgggcctgtcagcctctgcacaacctctctaaaagattttgtgtctgtttgtacaaatgtggttatgggtttacaaccagctgtgacactggtcactgctggtttctccatggtggtaaactatttcattgacaaagactctttttactctgttgagaagttgaacctgtaggtaatagattcccgtttcatatgctaaagtagctttattgagcaatatttcaatataaaaagtaaatgttaaattgttatccatttattaacataaataaattttaatcagttagcgacacatattaacatgtaggagagaaacactattacttgcgtttggttggaggtaatgaaatggaatggaatagaaaggaaacaattttcatttcattcctttgtttggttacattttaaagtattggaatgacattccaatagaatgctctttccaccattttggtgaaatgactattccattt

SEQ ID NO: 297634 - DNA, 1561 bp, Cannabis indica
aactgacatacattttgcaaaaacacggtttttcagattctaattccggtgagttgaaattcaagatttgtaaagctcaactcaaatattttagagacttatacagaatatcaagagccataaggctcgaatacagctggcacacattctaacagaaaagagaatcacaaaatattccatgatgcaataatcattgcaatactaacgacacaatctgcctagggatcagcaaggttgacacctgtccaaacaaggaccacagccaaaacagaatacaaaaacaggggagacccttttaattcatttctgtttgcttcttaattgtgagtatcattctttgatttataatcagttcttttcttctctgaaacctacattctaattagatattttctcaaattgcaatgggcttagttagggtctgagttctaaggagaagacaagttgatcaacaaggttagttcaatctgattcattacttttcaatttaagtttctatggattttacttgtttcacttgtggtgtatgataactgggatttgcttgcttcagttgcctataattttatttattcaatttgtatgagaaaagtattattaagctcaatataccctgttactgttggtttttatattctttgtttgggtactaatatattgttttgtttgattatttcttttttcttcatttggtctagagtatcatagtagcattggtagtaataggaatagtagtgttttggtccttactagctacaaatcgactaccactgttaagaattcattgatatgatcattagtaacctctggcaaactttaagttctcatctctgaataagcagacttcctttcttgagttgtagttgattaatatggagtgtaacagaataattgtttgactcaaatgaatgatatgccttattcttgtgcactatttgttctccgtttagttaatgtaccttgatgtacaatcaccttgttctatattaatcaatgactaacaccctactctctgggaaacataatacaacgtgggcaaacttattgacactagtgaaaatttattcaaagcaattgagacatagaaacaaatatagccgttattctatgttagagcaggaataaccctaacactaacacacaactcattggtatatttttgtatactcaccatttctttttaatatgcaaggttcgtcaatctcttttatgttttaagaaatgttgaacgaagatatcttattagaagaagtgaagagtttgaagtatgcatctaatgaagaggctgaagaaaagagtctcgacagattagtgacatgtttacaagcctccaattcagtctctgaaaggttaatggtctgatttaaatgtttaaatatatctctgtatttcttttttcatatttaactgtgatcaaaattataatatatatacatagctcgagcgttaagctttgtgaaatcgttgtggaaaaaagcttcacaggtgatttgagtataattgagaaggccacatcttgttaggctatttttagcctatgttatggatccgatttatgtgc

SEQ ID NO: 297635 - DNA, 3141 bp, Cannabis indica
tttatgggaagagattgagttttgttttgaattttgtataaccgctattgtgagtttaaagaaaggttagaatgtgtttctgggattagttaaaaggttttgagggttccgaagcttagttaatagctgaaagaatggtagaaccaagcatgagttcttggaactcaaaacttggtcattaatgacactttttttatttttgatttggttttggtttttctaacttgggttatgttctattggtagtataaaactgttcaatggagttgagctaattttgttaggtttggtggctttcaaagacaagagaaacttggacttcattttctgcaaaaaaaatggcagaatacttttggaaaactgatcaactgtgttttctgggaaagaacattcatgaaatgttctgccatttcgggtgttgttcgggacctgcactttttaagttttcttgatatttatagtatttcaatgctgtctatcaaatagggaaacttttggttacgaatttaagacctaaaatggtataggtcatgtggtttaataatttactattgttgtgatttagggccaggatcgttaggcttttctccatctgagttgcgtgacatgcatgaatctggaattaaaggtcaagaaaagtactttggtactgcatagcattttacgttagaatgcaattattatcgcttgtgaatctattgttatccaaactaagatacaatgataaccttcatatggcaaaaaaggttatcttattaagcaatgatgaaaatgttgtcttattaggcaatgatacaaaaaaggttgtcttatcacgcaatgatgaaaagtcatgactacaaactgaaattgttgttaggtttctcatatcaaggatattggttgccacgtatcaaaattgtcttattagacaaagatgatgacattgggatacaaaaaaataggtatcaggattgtcttattagacaatgatgatgatgtatggatatagatgataggtatcagggttgtcttattagacaatgaggatgatgtttggatacagatgttagatatcaaggctgtcttattagataaagacaaagatatttggatactggttataggtatcagagttgtcttattagaaacaaaagagagtttggatgcccggttaggcatcaaggtcgttttgttagataacaatgaaaaatggtttctttttttagtattgggtatggattgtaatatttaacacgtaattttatattgctaaatatggttacattgatgtttatttatgactaggcatttatattaatttggattgaattatatggacaacgtatgagtatttaaattttctttttgagtttaattatggatacctgagtgatgacttataatgttgtatcactacttttcttgctgagtctttgtgactcgtgggtgctatgtgatcgatgtataaagtagaaatgtttggacaatcataagtcagggaatgtctccagctaatgtacacatcatcttatccgacaagtggtgctgagttgctaggaattgtattatttcaattattctgaacttaattctttattttgtaacattactataatggcttgccttgtaatgttttaaaaaaggaatccacaattgtaaaatttattatgaaatgattttataattcggattggtttgtaaaattttattaacactcgttttaatctcaactgctagtttattttcataaactagtttataaaaggacacacatgtcatccctaagggttagggcattacatgtctacactcacagataagagaatggaaaacattcgttccagtggccttttttaaaatgccaccatcttttgtgcaggtactagatagttggctaatgatcctattcccgacctttgtgcttggtcacaaccacatgtcgagtaggggccatacttccccatcatccttatattaggtgcgtcacttattattacaacatatgactgacacatattagtctgaagggattctagtaattatctgtgttgtacgtattgtacacacaacaaggctggttgaagccttcgaatccaactagcgctgttgcaatgaaaggtatttttatttctccttccttaactacaatttgctggattatacatcagagatcataaatattgtggtgtacttgaggactatttatcactaaggatgtatcagccaaacacctctccttctatcatgttggactattcatctgtcctacctagaccttgaggcttagaaaaagggtgcgccagatactcaaaatcccaacaaaggaagggaacatatcaagcctagctactgaggaaaacttttgtaagtatgacttgtacccatctaactccaattccacaaatgggcatgaacttaccaagcccaaagagaaggtgccatctgcctactaccgatatagataggaaaatgcagcccacgaggtcctcctcatcgtagagatccctttgtccatccaactcatattagtgtcaaggataacatagaaaagttgatgcgctccccttcacttgaagttgaaggcaagggtaaacttgttgttaaagataactttagggaagtatctaatgacgatgaaccataaatcattctatatgaggatggataccaagtagtcaagggtgtacatagtatgaatgtcatcttgcaaatattttatttttctttttatacttgtatatttttgaatatttgtttctaaatttttatttccctttgaagttatgtattttttccatgtacaaggagattaacaagaggaagagtgacgcagtgcctcaagtgtccccaccaaaggtgccatgaggtgactctttgactcagagagaacaaatgactttgctttcgtcagttgtctcatccaaaactaatgagaaggcatctctaagccctacgactccctctgcctccagacttaggttgcatagaaagttgtagagaagactgttctgctgaaaccaacaaaacacgccactgctggggttaccatccaataaccttcaaactctcatcctcccattgtccaaatgacctaactagaaagacgagtactaccctggtcaccataactgtaatgaccgctttagtaatttggattag

SEQ ID NO: 297636 - DNA, 5999 bp, Cannabis indica
tggaatttttagattttgaattcttagtctaggatgcatttgggtcctgtgaattacttttgacatcatgtagatgtagtttctaaatttggtagctttatttattttttaaataataataataaggttttggtataaagttttccttaagtttatgcagttattcaattgtatctggaatcactttctagttgcagaaagaccttggtttttcaaggctaggattggcagggcagttaatcaatagaataaatttcctagcagaaatttaaaaaaaaaaaaaaaaaaagacctgttgtctgattaatgacagtgtttttgttttggtttacttcttatagtactttacaaatttccaacatgtgtttatatatcccctacttagattttattttgttcaatgctaagttgttgtcattgttgaaaatgaaaatattctccttattatggtgataaagatcacttgtgttttatatcattacattatcattgtagtcttagtccacatatttttgccattggctgtcccattattgtacttgcttgtctagttgtcatagaccaaagagaaattatgattacctgttaaaaaaatgtcaaatttatgatttttattaattcctcttaaattgctctatatgtggatgtggatctagttcctggaagagttcgagttgctgtaagattgagaccccgaaatcaagaggaattgatagcggatgctgactttgctgattgtgtagagctacagtcagaggtaccctgtttctatatatggtgtttttggtaatggatgccaaccatcgtcagacagtattttctaatgcttgtggtaacttaattaggctcctttttctttgttctcagcttaaaaggttgaaactaaggaaaaacaattgggactctgatacattcgaatttgatgaggtgctaactgagtttgcatcacaaaaacgtgtttatgaagttgtagcaaaacctgttgtggaggtacatatacatgaaatattcttttcattatttgtattgtgctaatgcatagcacttttcattacaaactatattttttcgttgatatttcattaacgtggaacttttctattctctttacccagagtgttctagatggttataatggaacggtgatggcatatgggcaaactggtacaggtaaaacatatactcttggaagactcggagaagaagacacagctgctcgtggtataatggtgcgcgcaatggaagacattttagcagatatttctctagagactgattctgtatcagtttcatatttgcaggttgttatatcatattttgaggcaaattctgtgttttttttagcccatagtcataatcctttatgtatattctgaacttgtctgatatttaatttttaatcagtcaaacttgttttgagctttgattagtttgtaatagtttccaaatgatcctagtttttttcatctatgcttgcagctttatatggaaaccatacaggaccttcttgatcctgcaaatgataacatttccatagtggaagaccccaaaactggagatgtttctctacctggggctacaataattgaaattcgagaccatatgagtttcatggaattattaagacttggagaggctcaccgttttgctgcaaatacaaaattgaacacagaatcttctcgtagtcatgcaattttgatggtaatacttaatgtgtatttctttgatcttcgatgcttgcaattgttacaagttttaaatagtttgaggaggatcattaactatcacacaaactgctacaggtaaatgtgaagaggcatgtgaaaggaagagattcaactctttcaaatgaaaatggcaacaactcccacataagtaaaaatctgaaggcccctttagttcggaagggcaagttagttgtagtcgatctagctggttcagagcgtattgacaagtcaggtaaagagttttagagtctctaattacaaaatgagtctttttaattgttttcaccgttgactggcctttatttgtaggaaaaacttatatttagcaacattagttaacaatgcagcatatgctttagtatgaggcaattctttctccacagtttatactaatcaaggtgcatctatgattctccatcaggatttattttacattccttaaaagtatttttgcgaagtgattgatagaaataagaaaatacaacatagttttaagcaatggaccaaccatgcatgaagtaatgaatggtttcttagatactcataaatagtaaatggaatgagaaactcgattcagtgtagctggcatgctcatccttgagttcaagtcttgattagtcatgcatttagcagaattttatacatacaagccaatttatttgtttagtaaaattgtttgaagatttatttatgggtgtgttttgttatgagtgagcttttgatgtagattttaccttcatatttttcaaccacttatttggcttttaaatggagggtttcacaggaagtgaaggacatacattagaggaagctaaatcaatcaatctttcattaagtgcactaggcaagtgcattaatgcactggcagaaaatagtgcacatgtcccagtgcgggattcaaagcttacgagattacttcgggattcctttggaggtaagagtaattttttttttttaaaaaagatcatttcttgttgtcaatatgaattcagttttgttgaaatggtattgttgctataggtaattgctcaattttttctactcatggtattaacaggcacagcaagaacttcacttataattaccattggcccttccccacgccatcgaggagaaacaaccagtactattatgtttggacaacgggtgtgtttcaaatcctttccatattccttaataattaaggtccacagctggtctagctgatctagtcttcattattgtatttatgcattatcttaaaaagttgagtgcagtgattgaaatgtgtttttctttaggtttttttttttttcttccaataaaaaaatcttggaatcttgtcatcgcaataaatagggtttcatgaatatttatttgtgtccatgagtcttcattatctgactgaagcatgagcaaattttcttgggagttttgtgaacgatgaagtttcgtcatataattccttcattcagaaaaatgtactaaaattctctctcctgataggctatgaaggtggaaaatatgctgaaactgaaggaggaatttgattacaaaagtttatccagaaggctagatatacaattagataaacttattgccgaacatgaaaggcagcagaaagcatttaaggatgaaattgagagaataaccattgaggcacaaaatcagatttctgagactgaaaggaattatgcagatgccttggaggtaaatatttgtgtagatattatccagaagcatcattttccttggaaagctaattggacttagtagcttttcattttattattattactattactttttcccataagcaatagaagtagctcgtctcttttattttttaagcacatagaacttccgatttcattagtgcctgtatttgatttaattttgtcgtactcatttttcgtattatgtagaaagaaagattgaaatatcagaaagattacatggaatccataaagaagcttgaagagcaattgatgatgaatcagcgaaactatggcagtgacaaaatcactaatggacagaaagataatagcactgatgtgacatctaacaaagaggtaattatatcagatgaaaaaaaaatgcttcctataaataatatcatcatcatcacaaaagcaggaaaaaataaggcatcaaactacacatttacttgttctgcactatgattcaccataagcatttgtctgcactgatgtctataaggatgtaattgtgaattatgatgtcttatacaactagaataaaaataagcattaactatattgcatcccatcatctaaatatgccagtcattaaactgaaaaatatgcttataaaatgatgaaatatgctgctttgttataatgccttaactttaatgtatgaaataatacaactttatcagaactatatagaaatcatgttaggcttctaattttcataccatatctggtctcttatttcattctccattttaactaacatttaaaattatcttgtaatgagttcccggaaatgtatttcacagaatttgtctgctctagaggaagttgttgagctcaaaaaaatgctacagaaagaaactctgctaaggaagaatgctgaagaggaaatcaataatctaaaaaatcaactttctcaatggaaaaggtcagaggtatgtttctttctctcttcttaaaactctatttcgctcttttgttactccccaatcttccatgccccaaatatttttctttcagcttcatgtttttcatacttactttattgtaagtgccaggcggtggggaattctgagatcttgaagctacgcaagatgttggaagatgagacgcatcgaaaagaaaaactagaagaagaaatagctatgctacaaagtcaattgatgcaaataagttttgaagctgatgaggtatgatactaatttgcaacattgtatatatctataattatttatgtgtgtatattctaagctccacttgtgtagccaaggtcacaaaagtacaagtgttcatggtgatcatattcagagtatctgatatgtgttttttaactggttaaattttcctttgtagacaagaaaacaactagacctgagtgagcctgggaagattcttggaggtctagattctcttatggagcaagtgaggcaatcacagctaaaagaatcaggaaatgaagagaaatcctcaatagcacaactctttgaacaaggtagtatagcttgttcttatactgctgggcaatgttttctttccataataatgtaaactccaaggatctaattcccttgttcataaataataaaatgcaatttactgcagtgggattacaaaagatcttatctctgctagaagcagaagatcctgatgtgcgaatacacgctgttaaagtcgtagcaaatcttgcagccgaaggtgactatgaaacttatccctttcatcacaagcatgttcttagttttttcaaaatattgcccatgccatcaaagatctatttgtacacaaaacgaaatgtgtcaagctttgtacatggtcaaattttcaacatggcagaagtattttacatactaatatgaattatatctaatgtttagaatccaatcaagagaagattgtacaagctgggggtctgacatccttactgatgctattgaaaagcactgaggatgaaacaatacatagagttgcagcgggtgcaattgctaatcttgccatgaacggtaaagtttccatatctggttacttattatggtttataaattgtgtggtcttggcttgagagaataaactcatgtttcagctctgatttgtcttgaactttcttatcagaaaccaatcaggagctaataatggcgcagggaggaattagtttactatcaatgacagcagcgaatgctgaagatgcacaaactctcagaatggttgctggagccattgcaaacctatgcggaaatggtaaagtctcaagatgttttgacactagttttgaagcttattctatcatgcatgagtcaagttttagtatattaacaaaattaattaccattcagataaattacaaaccaagttgagaggtgaaggtggaatcaaagcgttgctaggaatggttagaagtggtcatcctgatgttcttgcacaagttgctcgtggaatagcaaactttgctaagtgcgagtcaagagcatctacacaaggtaaaatcagccaaagagttaaggtggctagtggttgagaggaatgaaaacataggaatggaaatgggaatggcaataagaataggaatggaatggaataa

SEQ ID NO: 297637 - DNA, 3056 bp, Cannabis indica
aatgagagcattgtaggtggaaacattaggttcaagacccttatgttgtaattcttcatacaaactcactgcttgcttcaccattcccacgatcccaagactgtgtattagattgttgtatgtgaaaatatcagggaaaattcctctgctctgcatttcattgtagagagatagagcttcttctactctccgcgatcttccaagtgcgtaaatcaaattgttatacaaaactatatcaggactaaggtcagtctgctttagtacttcaaagtaatacagagcatcatcagtttttcctaaatggcataaaggtaccagtagagacctataagtatacaagtctggtctcattccatctttaaccattctcttaaacaattgacaggcagtttctacatctcctgcttttccgaacccatctataagtatggtgaaagtcacataattcggtttgcatccatataatgccatctcttcaaacaaaagcattacttcttcatgtcttcctgcctcaaaaagaccatcaataagtgggtagtatgtacgatgaacgggggaaaagtcccgacctacatgatcatagtaaaaatcgatagcctcatcgacactattagatttcactaaacccgaaatgagtgtattatatgtaattgcatcgggtatgatatgcaaggatttcatcttactgaaaagtttaaaagcctcatccaatctacatgatcttgatagtcccccaatcaagatgttgtaagtataaagatttggtaagatccctttctccatcatgacacccagagtatcaaatgctttatcaacattgccagctttgcataaagcatcaataagagtggtgaacgtaactacatcatgatcaaaaccatcagcctccatttcatcccaaatttcttttaaagtttccaattctccacagtctcttaacttgtccaacagaatagtgtaagttgtacgattaggtttgagactgttgatggctttcatcttcacaatcaactcctttgcattatcaagtttacctgctttacagagagcatcaataagaatgctataagtaataacatttggctcgcatccctcttcttccattctcttcaatatatcataagcctcatcaattttcccctcctttccaagaactgtaatgcatatgctaaatatataaacattaggcttcaatcccaaatgttcaatctcttctaacaaacccattacagtttgcgtatcccggttcttaccaaatgctaccataagtgatgcataagtctttaaattcggcttcatcccttctatgatcattctgttgtaaacctctaaagcctccttacaaaacgttgactggagaagcaaatagatcaacccgttatacgaaaaagcattcaaaacaaacccagcctttctcatcacctcaagcgcagttggtgcttgtcgaattccacccctaatgtaaagacctttaaaaatggctagataagtattcaaatttcggtaaacgactttcttttgcatgaaatcaaaaacaacaaccatatcctccaccctcttaagactcatcaagatttcaagcatataattgcatgtttcagtggtgtgaacaacataaggtaacttagcaacaaacttaaaatagagcaaagcagaatttgggtctgttgtagacttaagagcccttattacttcttctgaagatatcacaacttcattcttcttcttcttggccagtttctctccttctttccggattttcataacaaacccacataaacccatttgttttcttctcaatgcaaacctgtttcccaagtacccatatgcacaaacatttaaatttccaaagtttcttccttgtattgaatctctatgagtccaagcagctattacagtctctgtaaaggcacaagtataaccaaaaccaatacaatacatactcgaagaacaacctgttaacagacccaacaaagtaattatcacattaaattaaaagaaactataaatttaagtcattacaaatgatgtcaagaactaaaaccgaagaaaatgacaaaagaatattgcaaacaatagcctaacattttcattctgcagtgacagaaataagaattcaagtataggaagcaaaaatttgagtacatattaaagaccattcatttaatttaagttgatttgggcaatccaaacaaaaagtaccatttgacaaatgatttaaaccattgcccaactcaaaagagaacattttttcgaaaatgcccaactcaaaagtcattgcctttactctgccattaattaaacaagctgaaaagctctaatgaaagattaactttgatatgaaaaaacctattcacatccaagtgagtaattttgctatgcaatccaaacattccttgtgaaacaagatcaaaaaaatcaaaagtaaaataaataacaacaactgagtttgaagtcatattcaaagataatagattggaacttcaaagtcatagcttagatattagaaaacagaatgaataagtgagtaattagtagtgggggaatacctgggtgatggcagtgaacacaagagaaatttagaggttatggaggcaaaaagggcggtcgtgggtaagaatgtagtgggagaattgagtggacagggttagagaagaaatgaaacacaagaataggtaaaggcaggaaggttttggttatggcgaatggaagtgagagagagaagcagagcagacgcaattgggtcagcggttggaggaaaggggactctgactgtggtgcttcagttaccgaagattttttcatttttaagtatcgtttgctttcgtaatttaaaaattatgtactaaattagatttaatgacttttgttcaattttaataaaaaaattctaacatgtttttttttgaaggaaaatggtaactttattaataagaagattcaaccactacaatagaaagaaaatcaggaggaacatcatcctcactaaaaatacgatctggatacaaacaagagctacgagcaagacaatgtgcagctttgtttacagaacgttt

SEQ ID NO: 297638 - DNA, 6886 bp, Cannabis indica
caatatgaatcatattatttaatctataaaaaatgatacgtattagcttgtattataatatttgtaatgagtctagagttggggactcgaccttagactcggatctcatcctgaaccctaacccaaccccagactccgactcgatcctgaccccgaaactcggactctagccctagactccgaacctagcctcgaccccggacccgaacctagccccaaaccctaaacctgaacttaggccccaaactcagaccccagacccaaacccggacctagccccaaaccccaaacctgaacctgaactctggactttggccccgaacctgaacttggacctagccccgtcctcgaactctggactcgaactcgagccccaaacctcaaaccttagacccaaaccccgacccgacccgacccgacccgaccccgaacccaagcctgaccccaaaccaattccaggccacgaaccccaacctagaccttgaccttggactcgatcctgaaccttggaccctaaacttaaagtcagacccttgacctggacctgaacctcaacccaaactcggacccagatcccaacccctgaattagaccccaactcaaaccttgaaccctcgaacctagacatagaccctagacttggacctcgactcgactccagaccttagacccaaatctcaaacctggctctaattcttgaatgggagttagagttggggtcgagtttatgataaaagataacataattttacacaagctatcaatacaacttaataccaaatatagtattaatacaatacaaaactatttaccacaagaggccttagtgcctaataataatttgtgtgatttactattatgaaatgaaaaacgccggtgggtatgtactatgtaagcctacatttcgtttttatttaccttctagtttagattttggaataaaaagctcaacatggattataataatgggtgtaagcaataattttttcctaaccatatttatttgtagataaaaagaacccattatttaagaaaacaatgtcacacatcactttctctaaaattttagtgcagatgcataaatcaatcactctttcaatatataaatagctcttaatttaaacttatttccttctgttggttataaaaaaagaatggacgttgtctattgtctagcttgatgtttgtggtgctgccatgtgtgtttgaactcaataattagttttcaattcttttgtctacgtaatataacatacaataagtatcttcactagcataggcattagccaaagaaaattaatattcagagactaggcaaggcaattttctacctggaaaatgtcaatcatcattatggtgactccacgtggaggtttaaccacaacataatatgtattttctgattcagcaatatatatttataatatatatatgtgtgtattttctgattttttagtgtcggtagaataagtaacacaaaatgatatatgtatattctaatttcttttgtctgtagtgtaggtagcattgtctagacaataaacaaaccaaccctatctatctagctgaataagctacagtaaatataaggtttgaattgattaagtaagtcaactaactagttagtttttaaaaaactagggatacataggtttattatatcatcaattagagcttaatcaaatgccatttgttgtataggttataatatataatatatcttataatagatgtttgttttgacccaagtaagacccaaataccagaagtaatatattatcaacatttcttaaactaaaatgaagattaggactctactatggcaaattatataaatgaaagtaagaaaaatttagagtgctgattaagatttttgtctctcaaactttgatatgtaccaaatcaaagtttagagaacttgatttgatagatatcaaagttcagaaaacatgatttaaaatattaacgtgttagtaaaattgatcataattaaacagacgtccttgaatttaaaaatttcaagggaataatttttaacggcctaaaaaatttaaaaaacattatttgatacatgttaaactacggggcacaaaaattataattagcataaattataacaaataacttatctgccatgaaagagaagaatcaaacaatgtgttatctgagagcaaaaatcaagtccttatggagaacttatgacctacacaagtacaatgttacacaacaagcttcactctaatgttaaattttgtttctttggtatttctggaaaaaagaaaactcatcaacaacatagcacactgtacagtaagtataaataggtagtagaaaatcatataatgatacagtaccgtagggaatataagctcgtttcaggcttcggcagaatgaagcagaggagaggtgtgtccatcgccatttcgtgtatatcgagtagacgacatagatggatctttgtatgcatctactagcttatcataaaattcgtccctagcaggattattctggtcctctttatctttcttaaccaaactctgcgtagtacacaaagtttgaagtgcaataagatatttaaataaaaaatacagtgaaattctgttactagaaaaagaaaagtgcaagtcatataatgaattctgctgctgttatattgcaatacctcaacaggataggcttggaatattggcacgaatctttttcgaatgtactcgttgaaaagaagtgttaggattggaagaggaacaatcaaactggcagccagtggaacctttttaaggccgaatagaccaattgcaatgacatgcataagtatcagagaaaaaattgttgagtagtgcatgattggccaaaacttgcccccagtttcatatttgggagagtatacattcaacagctgccaaaataagaaaaaaaaaggttgaaagttatcagaatgctaatagtcaaatctgataaaacgagggacaaattctgttttcaagttatagtctataaagataccatagaagcctcgaatcggttcaaatcaagttctctaatcaatttattattctcctgatcaaacatattagcctcgaatcggttcaaataagtgttctgttgtttttctcagtttacgtgtgataaatgaagtaagagaccatacaaatgcccttttatccttcgttgtattaaaaatcatgaagaccaatcgattataagtcaaacactttatcctcagaaaatgaccagatcaatagatacccataattcattcaatttatacagagttattataagtcaaaacacatctatcctcaaaaatgaccagaacaataaactaccaataactcattcagtttatagagtcgggcctgtccacgttatgtgtgaactaacatgggaaccatttgtgtatatctaaagatcctaacatgctttcaattttcatgaaaataccatcaccaaatggaaagcattaataaactaggaagattcatctagagacgttttgcagaaactgagccttgttttcatccaaaacaacatcaatgatcagccaaaagcaggcacattactaacctggtttcggtagatgacgtatcccatacaatagtaaaccaaaagaaatggtagaataagtggagctaggaaaaagtatgtcacacccaagagtccaaagaagaggagtctgggaatttcactgtgatatgaaattgatggaacctcaaattcatcatcagactttcctgctgcaaatactctctttatataactgcaaagcaggggcatcagccggaaaagttctgatgatacactggtccatcccgaagtaacaacatacgcaatgaaaaatgccgcctgcagtcaaaacacataaacaatggttacaatatttgaaaaaatcattttgtacacataaacgtagcgtatccattatatggttaagagtatgctaagcctaatttgcattctatttagtttaatttcctcaggaaatctaacacttaactcagtattataaagggacccagcatagaaatcataaagcaaaatactttcttgtatgtataaaaaaagggaaattacatttgagaatttggggtccaatggaagtatatcggaaaaatgttataattgcttaaaactcacctgggctggtactgcttcagcaagtactttaggaatatttttaggctcaagaaagacattgacctgatagagagctgatccagatagtacattggcaaagaaaatgttccatatagtaaaccagagtaccttcttacaagcactattttctatctgactaaatgaaatatatccttggatggaagataagattatcatggtaggtggcacaaaagataagaactgctgaagaataagactgggaaggtatcctgtaatgacttgactaacaaccgttctgcaatttgaaatatagcacagattaatatcatgctttactcaagagcaagctgcataaaatcaacaaattcaatctacactggcacagatacctacaactgcaatttaatcaatacctacagcctgcaatataatccataactacaagttacaattttgggagttcttcgtaatcgttttcagacaaggaagagtaagaagaaaactagcaacatataaatctaaataaaagagacacctccttaaacccattaaacccattctacacaaagatatcaaatttctatatatggtcatctttgccagtatcattaaaagagtctttgttgaggatctcattgcatggttttgatgaaagtatagtatagttttaattaaagtcaaaatgaattaaaatcttccacttacagtttcagtatgccttttagaaaagggaaccaggtttctaactggtcaagatgagtgagaccttggactaaaactacgggaataaggaaaagaatcgtaagtgcaacacatgcaacaatcaccacaagcttgctgatccatctttttaggaatgatgccgaaaaaaagggccagtgaacatctttgggttctggagctctctcagtgatccattcagtgggattttcactttgtggaatgtgcagagctactgcagcacccagtcgtgacttaaatgaaacaaaagcagcatgaacttcctgttggattcggaaaatatgtaaaaaatcaaaatgcccaataaataatgtctactatacaaaatcaactatttcagtaataataggtaaaataaatgcaagaatacatgtctaatttacaaacttcgaaggtcagaaagttactgagtagtgcaaaagaaaaaaataaagaagtcttaatgtgaacgtctatatatcataagtatatgtagatttgggacatttataacacaagtaattctagagaaattagattgcggagtccacatgtgcatttctctactacagcagagcagagtttttgggatgagtagtgaaaaagttcgcatatttttctgatcattacatttatattagtttctttatgtttagattgagtaccatttctagcataactttaatttgaagaaaacaaaaccactaatagcattcttatatatcacactcttagaaaaaaaaaaacaaattaattaaaaaacaaaaccactaacactatgttcggtagaagggagagatgggggaatggagaggggtggagagagagtgatggaaggagagattaaaatgtcccacctttcctgccaatgaagactgctccattcttacgttatcttccaaatcttccaacttcttttcacatttatccaactggtcaacttttcttccaaatatccccataaagccatcacgctttaacctgtgctcaggttgagtgagttttagattggcaagctttttgtacatcttctcagcgtcactctacaaaacaaaagaaaaaatgtgtcgtgacatctgacatgtgagagacagcatgaataaataaataagtgattgcaacttaattacccaggtaacaactaaacaaagaacttgcagtttgcagtacttgttactattatgagccctctacagtacatgccagagcaaaatcatgaaatgcaatataacatactaatttcgccaatatcaaggtggaattctttaagctattttctatgatgaacaagtttttagaagattcgtggaaagaaagaacatataacagaagcatctaaattttcatgtaccattgtagcaacggtatgtagtccaaagagataacttatgtgatatattgttacgcttatgttatgatagttcatatgtacacagccctgttaaggatttcctggtaatgaacttcaatattgcgaaccccaaagccctacacaatcaggctcaataaaccacactgaaaacctgatccaataaaacgaaagagggaagaagccatatataaatcaggaaaatgttatatcatactaccggacatagtgattactatgtgaaacttaaacaaccatgaaacatatattcccctatcaataaagttcccgcgaaaatgctgatgaaaatcacaaaattcccacctacatcagatctaaaacctgcacattcctcccccacctctagaaaagataaaagttcatacgaaatgcttactatgagaccttgaagtttgccagttcgacgaactactgcatgtgagagatatgtagaaggatgatactccgtaaaaatctctcaacagtttcactacagctgctctcagatgatacaggaatagctcgaactaagattgtaaattgattaggcttaggttcagatgaatagaagtaagcaatccttttcgatgaaatataacaatgctcctgcataaatatgcacattagtcaaattttatttgctaatataatataaatctacattagtgatggatacagaga

SEQ ID NO: 297639 - DNA, 2523 bp, Cannabis indica
atcatgttttacctgggactcgaacccaggacttccaacacactcacacccacctatggccacttgagctagcctcaagtggttacggggttagtgattcgaatcctatattgtaatgctattaacatctatatatctatatatttaggaaagcataaaaagtagttatgtgacattttatattcttttcattttattttataaattgtcatagttttatattatgtcttaaatagaaattaagttacattctttactaaatttacttttgtcccacattatttagatagtatattattcttttaaatatactataaatacattatttctattatcatttttattcatctcaaaattaatatttttactttttaagtaatttgatcaaatgagtcttacaaaaaattattattcatctcaaaaataataattcattgatcgatttaacgttattaattttaaccgtttataactttaacggaaataataataaaaataattagatagtcacatttaatataagaaagataataaaagtacttacgtgaaattcaacttgacgaaaatagatatcaatggccgtcatcttctcgttgttaactgcagctttatctagtactctacgatggtcataattgaagactactttattatctagtagtcttctattgtcataattgaagattactttatctagtactccacaatgtccataattgaagaatactgataccattatagaacttccagtaagagcagcaagatgaaagcaagtatttccatctttgtctttccaattgataatgtaattacattctttaaaagaaagcattctctctaccaaagatgtgtgtttactcttcacagcaacatgtagagccgttcgatttttcttgtccaataactcgaacatcttgtacctatataatcccgatccattttttaatgattgtaatgctttgatagaatcattcttggccgcaatgtgaagaggagacatgcctttgttgtcttgaatacaacaaattaaggagtgtttagacaaaaacttattcaccaaatggaactcattcaagtgtgctgcataatgaagaggagtccatccatgctcatctttcccttctaaaatattattgccatatttttctaagagcttttcaatcactccatcacctatatatgtacaatttgattattaatttagtagggaaatttttgtattttacaataataatatgtaaccattttttttataaatgaaaatatatatttctttttaaacaaatatatcctaataataaaaagaacacatactcaatttaattattagatttaatcaattaattaaatttaagtatatttgtcccacattacacttgagtactacgtaataagggtgttcatggtacgggtggtgcgagttgtaatatttttttaaaccaaatcacatatatgcagtttttataatttctcaaactgcaaccgcactgtgagatcttaaaatcgcaaaaatcacactgcgaaaatgcggtgtggtatcattattaaacaatataatgaaaatttaaaatttaatctttttaaagttttaacaaaacaaaaaaatattattaaaatttaaacaacataacatatatactaatcatcaagtcattatattaaattgtctcttaaaaaataatgtagtatatatcacatattacatatattgtaaaaattagtaattcttataatatatagtgcagtacggtttaaactgcaattattaaatttcaaactataaaccacacgaattagaaaaaatgaaaaccacaatcgtactgtaaatgatttctaaccgtattttttatgtagggtagtgcaatgcaggcagtttgtgctgtataacggtttgatgaaatcttaaaaaaaaagtaattaatgacgtacctttgatcttaggattcttgcccttgttgcgaataacagctgcatgcataacattcaaaccattccttccagaccaactacccttctcttccaataatattcctcccacattttcaattttacttaaaatgtgagaagctatttcataaagctctctatcgatagccaagaacaacggtgattctccgtcttcattattcgaattaactaaactcgaatctttttcaagtaaaaacttaacaatatccaagtttagattcttaacagcttcatgcaacaccgtatttctcgtcttatttggctttcgtaatagattaatattcatgttatctacgatgagttttacaacctcaaaattccctaacattacagcaacatgcaaaggtgtgtcaccattatctttgttgtcagtctcagttagatttagatttggtgatgaacttaagagattttgaatctggtctatgtcgtcggacttcaccgcgttaaaaaaatgcaagatcttctcatcattagaacattcaccatcttctatagaaatcgacttcatctgtgtatatatatatactaaatagatgttacgtgtcaaatcac

SEQ ID NO: 297640 - DNA, 945 bp, Cannabis indica
ttcaacacaataggaacacccgaagggtaccaagttactttattttgtacaagttagaaagtgttgcaacagattggtgtgaaaccttgcctaggacagaagaaattgatgcttggagagattttgagagggtttttagggaacaatattttattccatctcataggagacctctgattggaatatttgatggtttaagataaggggctttgaaaatgaatgaattttgtagatttttactcatttgggttttgttgacaaacctttggttatttaatagttcatgcgtcgtttaaagtttgcgatatgcgatcaaatatcacattttacctttaacaaccttacttagtatgtgacaggagctttgcgaactaaggctcatgtataacttaataagaggaagaatacaagtagaggaaaaggaaatgatcaaagatgactaagaaaaaccaagggaagtggtcctaaggacaataattcagtgggggtagcactagtagtggttcttctggaaatactcgaagtggtccatatcagtgttttagttttggtcaacaaggtcataagatgaaaaattacccacaatgataacaactgtttcaagcatctcacgactgacccatagggagttatgtatagtatactcaatcttccgcttacagtttcacaccccaatcaagccagaagtgtcagtaacaatattagttcaggccacaagctttgggattcaacatgggatactcgcaaggtttccaaactcttgcttctagttggagtcaaagagggtacaaccaaggttgagattttagtgcaagtacaagtcatcatagtcaaggaaatggagaagcaaaagcaaagtaatttagtcaagcctattgttgtgcaccgaaagtggtactttttacatttatcaactcgcaagcgcacgaatctttattgtagtat

SEQ ID NO: 297641 - DNA, 3396 bp, Cannabis indica
ttttttttttaaagaaaattaggggagaagtaagcgaggagagattctgaaatttctttattcaggattcttaagccttcgagaagtgatggattaggtccaactggggagagcttagtcaggcatttgttgctggttccatccattcagttagaccttcagaacatgcttcttgagaaacttccggagtactttcatgtgtattcggaacattctgaatcgtcatcgttgtcgcttgaaaatgacgtggccaggcttatcgttaaccacttccggtggcttgacttcattgttgatcctaacgccttcaccgagaagttaatgcaagttctttcgatttgccctctgcatttgaagaaagagattatcgggtcgttgccggagattatcggtgatcagagcaataaaactgtggttgaatcgcttgagctaatacttcaagaggactcctctatagttgtcgctgtgctcgactcattttcaaaccttaatttagatgaagagttacaggaacaggtttacttcacttactttattatgtgaataattttttagaatggttagtatattgtcgtaaagtctcagatagagatatgtactgttttggatattattgcaaagtattcaaattgtgaattatatcattgtttactcgatatgtgtccgtatgattaattgtattgtatttaatatgtctcttttaatattatttggttaaagctgcgtattttcttattatggttgtcaatgagtggaattttcttgaaattaaaggtgatcaccatagcattatcttgcatcagaactattgatgtggaacacatgccgtttctactcagatttctgttgctgtcagcaacagcagcaaatgtaggaagaataatttctcagattcgagaacagttgaagtttgttgggctgtcaaatgcttgtgcaatgcaacagaaaaagttgaaaggaaagtcacacaaggacagttcggaggctttgattcttgatgccttgagatcaagtcttcgattcaagaatgtagatattttttcttgtcttgtggttgttgtttcttttaaaagtgtttttttttaatttgctcctaccatagatgctttgccaggagattttgaaagaactgaattcccttcacaaacctcgagatcacaaagtcattgatatttggctgcttatgctcatatacatgaatggtgagttgctgcaaaagagagtagaaaagatattcaagaagaaaatcgttgaagattgcattcatcaagctatgtttgatcaatgtattggtggactcaaggatttggtaaaggtactgtagacaaaatcatgctacataagttgcatttctatcaaaagtaaataaataaataaaattgaattatgttttatattctttcttccaatttattaggagtatcttccatcatttatttctctgactgagtatctcctggcgtgtaaagagaaaaaagcaagagagtttggcatctctgtctatactagtatgttcaaagaatttgttgattcgtattcgaggcaagaagtaagtgacctcataaatttctttttcttcttatgttgatgactaaagggtgaactttaggaactcttgtttgtgactgtgtccgcgtacaggttcttggttcactagttactcttgtgggatctggtgttagctatgtagtgagttctgctttggaaaccttgggtttcctggcctccaaaaacgcacaggaattgattcctttttctcctcatattagtggtactatatttgttcgtgatccatgtgtactatattagttggaagtttttttctcctatcttcttgatgtgttttttgctctacaatcaggtatactggactacttggagggatttaatgttgaaaatctgcacaaggtatgcaatatctttgtttgtgattctaagaaggtcctcattcttccattttcattggtattactgaagtgcaggtctatgaggttttcagccaactggcactatttgcccggtctagtgcagattcatatagatcctcttttgctaatgaacttttgatgatagtcaggaaacaggtattgtggcttgtaaatttatttctaaatgtgtagttagtaatagtatcaaagtgttatgtttaatattataattgatgcagaagttcagttctcttcacaacattggtcttaaaagtagaaaagtgattctattttatggtccaatcatgcaggttggtcatacagatcttaagtataagaagatgggtctaatcggcaccctgaagatagtgtcctgtcttggggatgcaaagaatgctacctctccatccttatctcaggtgcaactcaatctattgaattaattagttcaggagcacgacttggtagttgtgatagtttcggtggtaaaaatcctaaatagccaattaattatcatatacataggtgatgatattatcaaatgattataagcttttagtttagggaccagctaaatatcaacacacaaaatggaaagtggatcttggttgattttaggttttcaatttggtgtttttattgccgacaataagttgtatgatctagaagaggatggactttttcttgggttgctccatggtgagtaaagctaatctgttaccatatattttacacaaattatttgtatctagtttcagaagaaaagcaaattctagaaataaaaataaaatttaattatctaaaagagagaattcaccattgttacaattatgtgttatgaaacaattaatagtgtaatcaacaatcttaagggtatggtttgtggctcatcatatcagtgtaaaacatcaaatttacactagctaagactttatatggtaaagaaaattatttctcttattatgttttagtggtatacacaacaattgctgattcttgatagtttatagatatagatattcattgtgaatgatgttccctactctggtaactagaagaattgattacttaatagattttatgtgaacaaacattttgtgagttctaatgaagcatcatatgcatctcttgtatagtatggaaggtgttagatatgtatgccttggtcctgtacacgtgtccctagtctttaagtcaatatgctagttagtttagttagtagccaactaactgtcagtagttagttaagtctgttatctcagcagaactatcttgatgtcgtagtccattgttaatagaggcatttactcctataaatacttctatttctattcattgttgtagaaaatagtgattcgaattgtgtatagatttcatagaataatacatatttatatacaaagctaggagactaaatatctaattcttttacaactaatatacatctaatatctaacactccccctca

SEQ ID NO: 297642 - DNA, 5519 bp, Cannabis indica
cgggttctcgtttttagggatgagcacaatgctcatagattttatactatagacctttaacaaaaaaaaatttagaaaactgcatcacaaaaatcgtcaccaacagactcccaataatgcttaaagtaaagcactgacattccattcggcccaggagcgttgtggttgctcatggcaaaaagagtacgtccaatttcataaggggaagggcatagaatgattccctccctgtcatcctgggtgatcctctctaagaacaactgactacaatcaatagcccggccaacatcggacccgaaaaatatacttttgaagaagtcaatgaagtcaatgattccctccacaaggttagatatttcaaataactttttcgtataattttagaaaagttaaaaaaaaaatgaaatactctgcagccctcctagttttgtcactctatctatttcaagtagaatttagtctatagttataagtaaatattaatctaacatcccgccggaggaaagacttactactacaaaggctggtgccaaccaataaaaaggggacgaaacaaagacatctcatggcctagacattgcccttaacccatgccacctaggagactgggactcgagatgtttggcacacagaacacaattgaggaaatattcttgtgagactaagtataaaatatttctgagattatattgggcgtttaccaaaaatcataattaaaatggaaaatataaattaaatgatgtaaatatatattatgtatctatacatatataacatcagccatataattaccttttttttttgtttttttgaaacagattcttatattgaccttaataatcttattaatttatattcccaaatgttcacctattttttttttttttttgttggctacactttcatccgcttaataagtacatgacaatgtggcttgtgttgctttttggagcaacaaccgttgattttctttgacaagctacaaataaattcactttacgtgttgactagctaaagagccaaacatactatttctatttttatataataatgtatacattattccttctctacacatgtttttatttagatctcaatgtggatatacatataacttttacttttccctaaagaaaatatacatgatctagcttttaatttgtccaatttcatccgtaaattcctactgtaacaatattcttatgtctaatgccaaaatatattccgaagaccgacctttatcgatcttattttcccaccattcttctttttgagagacactcttctttcatcttttaacgtacattgtttagaatatatatatataaaaaattataactaatgctaaaacgtagaagaatattctggtataaattctttttcacttcatttcccttagtttcttttctccctttatgtgattcagtggactgctgtatgtattttcaattaagtaacaagaaattgagctatgttctagcatgccctcttttattataccaagttatatattaatactttttgcaaatcatctttgtaatattgagatcgatttagaaaactaaaaataatgtataagagttttctatcaaattgtcctctatttattatggcaattcttatcttaaatgctgagccaatcaccggagtacatgacagaatatatcaaaccgtggaggataaattctatatatttatatataatatgggatttgatttggatagctgtggactttatagttgagatatttcagtgacgtatccgtcggtgggtcggttcttactccattaattttaatggtattataaagataaaaattaatgacaaaaaattatgtaaaaattgtattataaggatgaaaatttttatgcagatttgcaatgaattacagtcacgcgatctctgtgagaattgattctaattgcattgtgtaattacaactctgttatatagtgtgaatttttttagaaactcgagatcaagctcctgtaaagatgacaagtagactcactgtcctcgaggattgttgagctgtcaaaaggagaccactcggggataaatctcacctgaaccaaactcagcgagatgatgtgaccttgacagagccaaggcgcattattatgcatcgcatgatgcaggaccaagaaggtcgtgttcaagactcgcatagaccaagatatatgtggtgtccataaaaatttctcctgcaaattagtaaagatcgattcattacttagcaagctggtccgaatgacctaacgtgctcgatgacccaataaggaatcacatgtcctaagttatcaacgctaacaaggtatccgtacacgcaactcgaataggacgcagatatcttaacacaaattaagactcattagtcctacacgcaccctaggctcacgagcttgtgcgagaatattaacagaaaactcgcactatagaggtcgtgtacgttgctgtatttagtaaatcggatcgaaactattcgtcatttattccattaacgttttttcttaatttaatgttgatattcaatgtaaaactgttcaataattaagttttgtgtaatataagggacacttgctttgtatataaagaagtgatccaatatgaaaacgacaagatagaaatccttgcaatagttgtctatgtagattgtgatctgactgaaccactatacttctcttatgttaattgtgtgtatcagtgtttctagtttgtctgtgtaacccctttaaatactcgtcgttctaggttgagtactcgtgccttttattaaataattatattttcatctttatttgatgttgtcaaaattcctccaacaacatttgacgccgtctgtgggaaagattattactgttgatttcggaggaaaattgaaatgactagaaataagacgaatgaaaaacaacaatacaagctctttcaatgttggaacaatgaatgttccactccaaagcaatggagcgaatctagttgacataattaattggggtgtgggacggactatggtcactcccctcaatttgtttcttgaaagtgctggtcatgccggagaaactttaacactagcagccaccgtgggacatttccaacctattacaccgatcgtggtatcagaaggaatcatctagttaagtacaacccagtatacgaccttgcaagagcaaatgtgggctttacagacctatgtttatagaaatgtcaggacccaacgtccacctcaagttcctaacacgcgttcagaaaacccctaggtaacagctactaggcgacaaactgaacgtattagtaacaatcgtgttagcaggcaacaggaaaatgaacacgaggattctgacttaaagcagcctatgcataattctatgaacaatagagaaccagttgctcgtaccaccagtcgtgctagagagtaagtaccacaggaggaagataacgtaacccgtgaagtcgggctcaaccacgagttgaggtaaacaatgttgagtcgcactcctcttccactaacagtcattctccaagtgcttataccaagtcaggatcagtcgagatgcgacgaggcggaagatattatgttcataggggtgatctatgcaatcacctcaatggcacaatcctaaatggcaaggaataacaataacaacgaggcatgtgatccccaggtaggcgatcaaggcacacaaaatataaacaacctgaccaatatagtttgcacaaaccaatcctgttctaccagtaggcgtagacaaagaaagcctcctgcgagcgttgagggtgatcaaccaacagagaaagccaatttacaaactccatgggaccttgcctttcaccggtgaagtgtgacaagctcgactcctgaaaggcttcaggctatccgagtcacttaaatacaaaggtactactaatcccattgattatttagataaatttaacacaattatggaagtagaccaggtactgcaaccagcaaagtgtcgaatactcgtagtaaccctagagcaaaacgctcacgattggttcaaccaactacgcgaagcttccatatcaacttgggaaaccttcgtggatctgttcttaattcactttcaggccacaatgacgtacaagtcgtcgtacacaacattagcaaacattaagcaagaagttggtgagtctttacaagattattttaaatgttttgacacagaaataaccaaagtggagaaggcccccgagtctcgttagtttgcatgttaataataggagtttttccaaggactgacttctggaaggagttgcaagcttgaagactagagtcatttgtagaattcgttgcaatggatgagctgcataagagaattgagaactcttttgctgaattagaaagagggaaggaaagcgcgagtcacctatgccacgatcacactctcgaagccctaaaggaaagaattacaaaggacgaagacctacaagaggcaatccacaaaggcaaaaaagtacaaaacatgctaaatccccttcacaaaaggagatatctccggaaagaaaaggaggtccactttttatcaactatacaaagtggcagttcctcgagatcacatctacctgattaaagagcaagactgggtatttagaaagcctccaccaatcaacaagagggatccaaagaagttctgcaaatatcataaggatttcggccatacaactctggagtgttggttctttcatgatgaaatcgaggaattgatcaaatgacgaaagcttagcaaatataaaaagaatggagaaaatcatccgcaagcagatgagaatgacactatgaataatgttagtggccctcgagctcctcataatattctaaccattatcttaggcccacatgttggtggagatttccaaaagtcataagagcgctatgccaaggaggcaaaagaaaaaccattcacaatgttaaaaatctgagtgagcatccagaaaagttgttcaagaaggaatatgatgatctaactttcacggaaagtgatgcaaggtgggtacatcatccccacaccgatgaacttgtgatagtggcaaacattggaggggataatattcatcgagccttggtaggcaatcgatgttctgtgaatcgtctctactttcaggcctttaagcaaatgcgatcgcatgagaaagaattgcgaccagtgactttaagtgtctatggttttactggagatacaatcgcattaaaggaaagatcaagttacctattgttgggttttatgccctaaataaaactctttttcaatggaataaattttgttccttatcaataaagaaacagaagtatttttcattcatttgcatgttttggttcacattatcaattatttgtctatttgatttataaattcatccaaacccttttcacatgcttgatcctccttattgtgttgtcaacacagtggaaagtaaacaagactatgtgattaaagattcctaaatttatcagaacactggggtttattgatatgacaatctacaactgagtttactt

SEQ ID NO: 297643 - DNA, 3635 bp, Cannabis indica
ctctctctctctctctgtgtgtgtgtgtgtgtgtgtgtgtgtggattgtgtcccatagatatgacttctgagatatgttgttgagctcactgtttgtctgaaagagactttctcaaatatatggaacttaaagttatggtccttcttttagtcctaatactcagttggcttgttcaattcctcttgggtaactacgtagaagtacttcttttcctttttacttttttaaaaatgtctgatcttacaatttgactttgcagtgtacggaggaagctcaccggccagttgattgtggcactgttgccaaatggattttgaagaatagtgctgaatctgaaaatatgaattggtacaagcctacatgacatgattattagttattatgtctggccatactttaacttttgttacattgtaattttactttttgtctgaagatggtggaccacattattgatgttgtttagcaatatgatgtctatgaaatgaatagcctagtatcaaatatcaaagcatccttctgctaattgtttgttgttattcctttccatatgcattaaaacctggggctaccagtaacttggggaccctgtcattaagatgcaattgttttgaaggcagcaaatctttggtgctgtgctggttggttaattgagtgtgaaatcaggtgtcataaaaaatgcatttattctctgtagctattattttcaacgtagctttgaatcttatgccatgcaacattgatccccccctccaactcaaatagttttaacttataagcatgtcaagtaagtgcttaatgatagtatagctgggatattagtaaaagagaaatgacagcataagtttggaggttaattctagaaaagatgaggtgatcttatatccccaccttggttttctaaatcatggctactctaagttttttttcttttttattttctccgattgtgattttcttagacatgtcatggctcacatgaagtgagtttctcatctttccccctacttggatttcctgtgttatgactatgggagtgaatcacttatttctgaaatcagggctaccttcagggagaaagtaattttaactgcaggttcacatcatgacatgagtacatgtacaagtagtcttaggtttagttgggatttataaacggctcggttcactgcctttacaagatgctctattaagacttcttttggtacaaatgccgtgttctaatttatacatctttggtgattttcaggatattggctaattctaaaccctgtccaaagtgcaaacggccgattgagaaaaaccaagggtgtatgcatattacgtgcactccaccttgtaaatttgagttttgttggtaagtttctttgcaactgaagatagtagtcagtttagttggaattacgggttttctaattaactttttgttttgtaattctatgaaggggtgttttgttgcaatacttttctgttcttgttcttagttaatatcacttgtatatgtttagccttttgtctgttgttcagaacattgtttatcatagatttctgaagcccattatttttactatttgtattatcttttttttttgttggtattttgggccatttcttttctctgactaatttctttcgagatgaaatttgcctgtggttgctttatcctaatgcaattcaatttatgcatctaggctctgccttggtgcttggtcggaccatggtgagaggactggtggtttctatgcatgcaaccgttacgagacagcaaagcaagagggagtggtatttatcgatgcagcttaaatgtttatttgttacttgagatatgtttctttagactttttgtgctgtgtgtaagtgagtgaattttacagtatgatgaggctgagaaaagaagagagatggccaagaattctctagagaggtatactcattattacgaaagatgggcaactaaccaatcggtatgtaccagtttacaaaatatgctaatattcttttggttattgatgtttcagttttttagatgattctctggtaatgaattgcagcagaaattgagcactcaatttgtgaagcaatcctctttttctcttttctgttattctttctgcatgttttatttcaattaaaggaaaaagcatgaaataacttatcttgaaatataaccctttggatacgtttggaaagtggactggtgtggattgaaaaattgataaaacatagtattgagagaaaataagttgggtgatagttattttgttttgtctttacaatataaatacataaagatgagagattagataggataaatcatgccaagtttttcaatgagatttgagttatcccatattcagggatgatttagcttggattagtttgtcaatagtctctctaacttcacaacaaaaccactttctaattccactacaaaatcacttggtaaatattatttaatcctatcccactacccgtcaaaatatccaaacccattttccaaaggtgatcttattgtctctttagatgttctttattcctagttcatttaatagatatttcccttccatctttgtagtgagattttaacaaatagtatgctttattattcacttaatggagtctgattttttatttttcatcttaattgcagtctaggcaaaaagcacttgcagacttacagcaaatgcagagcgtgcatgtaagcattattacgagtttatttttttctgaaccaatattattagtttagtgatgatctagtgtatgtgctatgaacctgtacatttcttgatgtgataattatctatttatgatgcaaatgatatgttaatagcttcatgatcaaattctagagcacttaaagtaataggtggatgttattataattagtttgttcttccaattctctctttcattatggtaatttttgagaggttgatacttttgaccatgcatgactttcttttaggattcttataaatgtattaaaatgtgggactcatatgctcctcaaatggttgttcttttgcaccaatcttgagtttcatctttagttcctcttttttcaaagagaaaatgaaacaccactgtgtctgtggaagtatgtcttattatttgaattaatgaaatacagagagagctgcgatttaaatggaaacctcaagctgaataacaaatcagaaaatagctgaataacctctagctgcaaataataagagcattaaattaggtaatagatcaaaatagggtcagatattgtctgttaaaaataggatcgctaaggatgttaagctagttactttttttttttgaaaataagctagttacttagtcttgggattttttacatcccaatagaagattctaaacctataaaaaagacattcctagttccaacactagcctaggagcggcctcgattttgacgttagtaaaggagatagtgcatgaaggagatgattgggagtggctgccgtgagtctgtcgcaattttgtgatttagaggctgaagggatgtcatatgcctcaatggtttaaggtttttaggtggtgtttggaggtaatgaaaaggaaactatatttattccattcttttgtttggttgcattttaaagtattggaatgtcactccaat

SEQ ID NO: 297644 - DNA, 1275 bp, Cannabis indica
aaaatttaaaaaaaaaaatcactttcaaaattttttaaacagttttttttatatcaatattttaaactctcaagaagaataattaagcacacacaatttttctctcgagctatctctctctctctctcttgcagctcccttcaagttggtgctatggcgaaaacaagagctaaggttcagggaaagattcaactgtctgctaaaaagaagaaaaaatgacctaattcaacagttgatgttaagaaaactaagttgatggaagaagtcttgggggtgaaaccacttgaattcactgatgaagaggatgatggagcagctactgttgctgcagtagaatcagatccattgcgagacatactaccagctcctatgtctccaaagtcttcgttgaattcgataactcagcaagatattcgatttgattttgctcacatcatggaggccaataagaattgctctgtttcaattgcaaaaggtaactcgataacactcccaatgctcagatctgggaatatggctaggaatctagagtctacctttgataagtctgagaaagagaaggcagttaagatcactatggaagacattgaagaagagatagcttactggaaatcatctatagtctactatgtgctaggagccaatccaccattatcagtattggatggattcgttcgacgcatctggattagaaaaattgacaaggcaggcctgctctcgtatggtgtattcttaatcagatttgatacaatggagcatcgtgatgaagttattaatggtggttttatattcttcaacaagaggcctgtcatcatgaaggcttgggatccaaacaccaacttcaaaaaagaggatatccgtactgttccaatctgggtacatcttactgatttggagtaaaaatattagggccaaagagctttgttcaaaatcataggccaagttggaaaacctatcatggttgatgatgctaccaaagagagagacaaactgagctatccaagagtccttatccaagtctcaattcatcaagatttcccaggtactatctattttgaagatgagcatggtaataacatacttgtggaaatctattatgaatggaaacctataagttgtgggaattgtaaaagaatagggcatgccactgctgattgccgcaaagaagaaagtatgaaataggaattggttgtcaagaatgataagagggaaatagaagaaaagccacagccagtaccaggggagttcctattggaatttattttaccaggatct

SEQ ID NO: 297645 - DNA, 11200 bp, Cannabis indica
tatatttttcgggatattacaaacacattatagcgattcctcgtgctccgctgatcacctttaatggcatcgatgcacccgttgtcacatgggaacttcatgcacaaatgtcgaatggaagtcacggcaccaaagtccactaaagtcgaccgacctagtatggcattataggctgtgggacagtcaactaccatgaaggtcaaatgtttagacgcacttgctttgttatctcccttgagggtgattggcaattggattttacccatgggcattagatcatcaccatttaaaccttgcaattggataggacatgaagttaaatctgcttcagtaagtttgatcgcttggaatacgaacttgaacaaaatgttaatagaactttcgttgtcaaccaagactctggaaactcgcttgttggcgatctatgcatcaattactaaagggtcattatgaggggaacgcacattcttagcatcttcctctgtgaaagtgatcaagagattcatcatccttggacgttgtgcgagagattgtactagtgcacacacttctccctcctccacctctagatatctcttttgtgcgttacaggtacttccaaataggtggggtccacctaaaattgttgctacatgcccgtctacaggtggcagagcaattctaggaggatatggagtttctggtcctggagcaagaatagccaccccagccggggctggcggagcagggagagcaagtaacgatgttctaggagcttgagggcgcccaagtccctgctggggatttatggcaccctactgtctgggaagcatcatgtgcccttggactaccccctgttcaggataaataattagaatgcggacccactgccctagatgccccactcagaccaacatttcaatctcatctttcaaatattcacattcatttgcggtgtggcccttttctccatgatactcgcattgtttgttctgatctcgcttgttcctgccgccatttgacatgctcaggggcttccaataataaattatgttacatgtcgccttataaacattctaccgagtatctatcagacttgtgtactcagtgtactttggatcatactcctttcttggtttctttattgaattattatgattgtgattcttacctcccctcttaacccgcactgccccgcactagaatccaagacctcaactttagattgtccaggagccacgttgcacctaatctttgtcgcccatacctagagaaattagtctgcgtagggacgacaccggacacagtaggttcatagacaataaaagagaactgcagtcctagaaaggacaaagatggggcacgagtttgggatgcaaaacttggtgcagctgtagttagagtttgtgcaggagggactccgaagtcttgaatgtaggcatcctaaaggttaattatgccatgtgccttagccatgaatttacttagcatcttggctctctttctctgcatctgcccccataacaaggaacctacaactagtcccgattggagggccattagcttaagatcatcactggccttgattttggtggctgcctccatcattctttgaatgaaagccttcagactttcgttaggttgttgcttgacattggttacggaaccgacttccatgtccttctcatgcacagcgataaaatactcgtagaatgtcgactgtaaatccttccagctatcaatcgatcttggagccaaccatttccaccagtctttcgtggacttggttagagtcaaggaaaatcataaacacttagcatcatcgctaaggcgagtgacttccatcatcttgttgtatttggctagatgtgctcatggatcgattctcccctcatataattcgatgtggggcatcttaatgttttttgggagtggagtctccgtgattctcctgacacagggctccgggtcctcatcctcaaaatctgacaatgctccactttgcttttttaccaacttagtcagggctacaatttcttcttccaacctcttggtatcactttccgagagatcacttcccctcatcttgtcacttagattattccttaggtcacccccacgtggcctagccttctcgctcttgtacctctcgtatttagcgtccaaccgttgcggcagatcagttgtggaccaactgtctccaaaatgactggcatggatcctcccatcttggttgacagaatcgttgggaggatctactcatcttctaggcctagggactttcgcagttggtcctttcggtgcaaccctgttttaagggtcagaagggcgtccaggctcgaaagcgtcggtggccttctacatcctcgagggttgtccgaccggaggcgcatctttttgatgaggtttaggagaagctttttgtggaggttcacccacttttcccttacccttgtccatgcgagggttggaagtcccagcttcaattttcttacgggctcgccgctcagtcactgcttccacagatggttctccatccgtccctaccaagccatcaaacttgctctgaagttgctccatcgtttctttcatctaggcaataagcctttgttgctcttctagggttgcctatgtggcttccaactctgcggttacacgcactagactagggtcatgctcataataacaaccatctttataatagaaatcatcattgtcctcttcataatcatctgtattttggccatcaccgtgaccctctgcaacattctcggtgttccttccttgattctcaatagcagttgtgccttctctatcgttttccacccgcgcgttagctgcatgaaaggtgacttcctcctcgatcgtttctaatggagttcctttaccagtagtctttcatgtttttaccatgattgaaggacgacgaacgctactagacttcctttagctctcaatgaaagcaccaaaatgtttaccgaggttcttagaaaccaaatatatttagagcttaaagaaataagaaataatgaacaataaacaaacagatttttacgtggtttaggcgttaattatccttagtccacgagtccattgtattggcctctttgggagaatgttttttgagattacaaggggataacaataaagactacttcggttcgctcgagagagctttcttgggatttttgcagagtgtctgtaagtaaaattgttctctcatttcttgaaaaaaaataggactatttataggcacgcatggggtaaagggcataccctttacccacctagggttttgtaccccacacgctattaaggtcagtactactaaagggcgatatgaccattggctagtaagaaccttcttcatcatgtggtatacagctgcttgtgaggacttttgtacaatccaggacacgcgtcgcgcaaaggtctctcctttgcaaaatactctctaaccgggtcgttaggcaaaaagcatatttgagggtgcgtatgcacactaccatgatctggcacggggtacaaaatctgatcatgtgtcagaaaaaggtgtaactgtctatggagtgatttttgcaagacgctgacgtggccaccgtctccaagacctttatcgcgctccaggtcctttataaagggaagttactcctagaggtcatcgtctctcattgcctcccaagtccgggagatgttccttttcttggttatcttgaataactcttgtcgaggttacattctcccctccgatcgtgccacatgtctacttaatgaaaatttggataatatatatttaatacattataaatttgaaataattcaaaaactttaacaaataatatttatattggacagaaactcatacgaataaaatattataaaattatcatgaataataaaaagaataataattttttcagtatggaataaactcttatttttacaaatatgtaaatgatgaaactaagaaaagaaattgtaattacaacaattaatagaaaatctagacatccacatatatttatttataacaaaatcaagcacttttataattttttgaatacaaataaaaactgcccgtgcatgatacaacaattattagcttagctcacgatccagttaaaatatcattatatatcaggcaaaatcaaggaataattactggtttcaagctggaaaacggtagagggttattaggcaaattactagactatttaagaggaaataaagattgagtaaatcttgtgaaggtttaaaattattaggcattaaaaggcaaattgatttgatatacacgtacagcaaaatcgaattgagataatcatactacaagataattagaatcttacaaaatttcccctaaagatcctttttaacttaactactacgatttccttgctccctaaatttacctaagtgtccgttttttctatcactacttcttcagagtgtacattccatctcttagttctaacttttcttcagaaactagtccagataagaaaccttgcaattgttggagagtcttgtcataagaaggatcagctacacagaacatctgcagcattttttccagtaaaccgtttagatatagttatttcatgcacaaccattttgtagccatataaattttccaaacccaagtaaaaaattgattggacacgttcttcctcacctttagagtattatgaattcgatctaatgccatgctcccaaaatttgtgagcatacccatgataaatttctgcaataaaggcattgttacatggtattttgataatacactaaaagcagggtaatttaatactcagatcaatattgccaaagacatataatgtagatacatacctcgtacacagtcatttcttttcgtagttgatcttcaacggaagccacagatctgtccccttcctcatcccctgcgagatcttcacaatttccactagtaccaggagtcttacccgtgtcacttacaccttccataagggtaaatttatggtcatttatgtctgccccaagtgtttctgcaataactccctataaaggatatcaatgcgttagtttgtcactaaattaacaacgtttattggaggtaatgaaatgaaatgaaaacaatttttattcaattcctttgttggtttcatttgaaagtattggaatagcattcctattctagctgtgttttaattctttctaaccaaacaccacctaatggagtgtttgttatgtgagttttagttggagggagtagagttgaaggaaatataaaacccaactgttggaggagattaattattaccaccattttaatttaaaaagtggaacctatttggaaacacaaacctgctaagagttccatgaagtatccaatttgaacctaactaaacatttctaactggtgcttgaacaggaaagcttgagttacaagagacgggaaactatagagcttaaaaagtcaaatcgtaatgccacaaccgaaaaaaaaaaaggtcaaatcataatcaaggataagagaaagagtatgcatgagaaaataaagctacgagaataagtagtcctgtaaaattttatgttcctcataaattgataatcagtacatcactatacacctcaagatcagggatagccaagttaaattcaatgtctaatcacatacacgtgcacaagccaggaaagttatgaaacctgatgagggatgtgtttaacaaagataccttgcttatccaaaaatttatcctgcggttaagtacatctatgggaaccccaattgcagctgcaagacttttagatgtccaactgaaagtagaacatacaactatgagtacatttagatgtatgtaaggcattacaaaatcaatcccccgattttacttaccaagcttgatcttgaaacttcataattattgctgcgtggacaggagtcactgtaaactgcatctgcctatcttcaaattgcaattccaactgaaacatcatcacaagataaatttttcagtatatgaaagatcactaccattcaaagtacattctaaacatagtaaagcacctaaccttgactgcaccaaggttcttcttccacattagctttcgaggggtcttgatttcattgaatctctttgcataatctgagagcagccgatcaacagactgaggtataataagggattcttcctgaaaataatctaaggttaatcatttacagctgtaactgagaaagaaggcagtgtaaaaggtgatagaggagttaactgagacgtctagagataaagtcaaaatattaattatattgaatcatactttctatgttaatgcattccatcttaattgactcaaacctttgtaacctagatactttgtgcagaaatgcagaatgactagaactactcagcaagcagccattactttttcccgaaaaagataccactttgtattctctctttgtacttatataataaataatacaacgaaggacgataaaaaataacctcaaggaactcaacaaacagcatatgcataatttgtgatcaaacaaaaaaaaattaaaaagctctaggaagttatatcccagctgtcaaataaatacatgcctaagaaatcatataacaaagtgactttacatagtgatactgtaaatcccaaagtagatttgcacgtaaaggagaaagtttagatgcttcataactgtgggctaggtctagtatcagttcctgtgcatattaaaattggttattaagatttgtgatgtgacatgtggcgaaattttttttacctggatctgaggccagaaattagaagataagattgtagcatcaagaatatccatggctaaaccattatcctctggctcaggctctacaaatacatccagcagaaaataatggtgaaagaattgtctcaaatcgtcctcagggatttcgcttttcataaaaaataataaaatatctacctgttcgagacaacttgtttatagttgctttaatattggaatttgttctcttggaatcaatcagatcatttagcataatttcacatttctgcatgctgctttctccaaaatgtatctggaaaaaactacaagtgagaatgatcttttttttccatattgatagagtcatcccacagaacttacaatctttgggagaaacaaaatttattattaaaggggaaaatatacagcaatggtcctaacaaagcacaagctaaaccaacacacacatatataatataacttaaacattaaaagccttgaaattatacaacagaacacttgccttgagcagctcaagagtacgtaactccgtgtctatgtcataaccagatttgtttagaagcttttcagcgagcataacacgatattcatttactagttgatctttcgaaccaactataccaacaatcatcccaagtatgtcaaccttccttctattcctgctacccttcaaagggtcagcttctacggggtcaggctcccagctgtaatgacagaaattaaagacacataagaaatgtagaagaaaaaacagaaaatggaacattttcaccattacataggcaccactactttagtttggccattataactggcatataacattattaaattttattctattctgatgtgttcttgtccagaccgtgtggcattaatccatgcttgtttgtcatcagtgtgaaaatcgtcatcatgaccagtgttctcctggctttcttcatctctatttaattcttcaagaaggctatcaccggtatttccagaaatgtttgaattgccgccagtgccatcagtaagcattgtcacaatgcattttatggtgtctttccttcctcttaaatagtccctgattggttcaccaactgcttcaaggaaaacacctgctggatctattgttcggagtgccttaatagttgaaacatattgatgtaatatgtcatttgttgaggcccctgctgtaagcaagcgatatcgtagtgcagagatgaatgactccaccagcttagaatgctgtccagtgtactcgagacactgttttaaatcttcaatggcaggtaaactgcataaaaacacaaaaacaaagtaaataaatacccaaaattatatgatctgattacccacatgttctaatcatacaataaagtagcataacgtttatcagggaataatattgtatttcattttataatatactatcctggactgctgaaagatgtactttaacagattttttaacaattaagatttttatatatgtcagaaagatgacaatgaaatccttatcaccttgcacagtaagcaagaaagtaaaacatccccgtcatccatttgataattaaagaattaaaaaagctgtaaaatttacctatccgggtagtcaacaataatttcaaataatttggctattcttagattttgaagtgtttcataagcaaaatattctagtcgcaattgccatcttacaagcccttcagaaggtgtatcaattccaggatagaatgacgaagggtgtgaagccaaaggcgatttaagtccagaagaaacactgtcataactaatggagtcaccaagataagcaagaagggcatgcaaaaactgaagaggcacagcctgcacaatgcatattcaatgcatgaataaagacatcaggggagaacaaaaaaggaaatagaaaaaggatgttgcaaatatcttagcgtatgctcatacatagatcctagcatgaaggagaagttacaagatcaaggtcatagcagacgataagaaataatatcaccatgaagtgtaatttcatggtttgcagaaaagataacagcattttggtcactatctcaaattaatttggtctaaaataggaagaatatgatatatactaacgtatccaataatattccaaggaaagaacacataactactaatgatgaaagagccttcatgattggtcaaaaaataaataaagagccttcataattggtcaatggtatttcaaacaaaatgcccacgaacttaccttagtgcactagacatttcattcattttaaattatatttgttttctttgtcaaattaaatgctttctgcgttaagaaaaactattgaaaagtaaacctccagtattacacactacatagataaatagaaacagtttaattaacaataacttcagcattgccaattgttcttaatctgtaaactggaaaagtggagagagctcaagaaagcaacctgtatccaccctttaatggattccaaaacagaactcctgtaatcatcaccagcaagatcatgtactttggcctgcatgtggacagcatattagaaatgacccagactcccagagattagtttatttataatgaaaacatggaataggtcgaatttagcacacttgtacagaagaagatgctggatatatcaaagggagtgggaaagtaaaataagataagaaagatgcttagtgcaatagaggtccaaattttaaccttgagaagaaaaaatatagcagaagcataggcatcttccgtcatagatgtaaacccaagatttcttagatcgcaaacaaccttcccaatgtttttcaccaacttattattttctgagaacctgccatggccagaggaatcatcaatttccatttgaccagccccacaggatactttgctcctttcatgtgaaccaattccatccccatcttgaaattcactatcatctccagccatgatagtacttagctcctccaatcgttccttaaaataccagtcaagcatatctaagaagattggcatgagaagaaaaagaaaagatgggtgtaatcaaaaggacagaaattgaaaggtggaaacaataaacgttcacataaacaccaaattaaagtacacgtctcatctgatggaaaaccttcgtcatccaaattcaaaatgcgaacttaaatgatcaaatcagcaccaaatgtgtcattgagtacatatattcatattttatatacctggaaaatgacgaggaagggtagccatcagaaccgaagatacaagcatttgatacttagaaaggaggtaaactctctctgcatctgaattgtggcttcctccagaaacatgatcctcgaaagactgtaaagcatgaaccagcattaacaaacacttctcttgatattgcttctccgttgttatctcttctagagctttgcaaagtacttcttgaatttcatcctccccattctggctttaaaatattgcacgaaacacctattagtaaatggataaataaacccatgagagatttttgaaactcattactgatatattctaacgtacatgagagtttttcatttccagttcagaagcattggcgcaagaatcgaaatgcccccaaaatttgaagacaccatttttctgaaaggtttcctgttaaacaagactaaatcgaattaaccctagttttcaaacaggtagaaaccaaacaagagtaaaaaaaaatcatcgctttcccggaaaacataaaggaactttgatggtccaagagtgaaattggtcacctcaagaactcggagaaagtggtcccgaaccaaagagtcgaggccgtgcttgcagaggccgtggacgtgaacgatgaactcggaaccgatagaaagatccccggcgccgtggagaagcacgttggtggcagagcagaagccgttgtagctatcgatgatctcttgaatctggtggtgagagagagtacccaaaatccccaaattgaaaggtggggaggtggagtcctccattgttacagtgaaaaggtctttctctgtgtgtctctaatttttggaattgcatttgccgccactcctctcacgtcgaaggggttgggttagtgtgtgacaactctactcaacattacaatagtacgcttgaaagcaagaatgacttacgacatttcaattgtcgtcgttaatggactttcttaattaagtataggcctcagcgacttgggtccttcacccctagtttacgagtttggataattcaaggcaaaatacaaattacactcattatgggtattctttagagaaatttacgctcacagaagtaattttaaaagggaaatttgacattttatgcttaaaaatgtgtaatggtgttaaattataccatcatcctaagaatttggtaactatgccaatcttttaatggtaaccccaaaatgccctctcctcaacccaaaaaaatcagcccctcctttctctctc

SEQ ID NO: 297646 - DNA, 1746 bp, Cannabis indica
atagtatatatatgtatttttatattttattgaatatgtgtgtatatattgtatgtatattttttatgtaaatacaatttgtaattgtattgtatatattctaagtaatatatatttattgtgaatgagaataacattagagggatttaattagtttagaaataaaatttttaaaattaaattagtgtgggatataattgattatatatatatgtatgtatgtataatctagtaactaagtaacttgttactattttttataactagtaagtaatgaaataattaattttacaatttcgttgtacaactacaaaagagacttttagtgtcagttcaaatttcatttaatataaaaaactaacactaaaaagtatccttaattttaagtctcagtttaaaactgacatttaaaaaactcaatggtgtcggtcagtagacggacaccaaaacctaaactgagatttaaaggtattacaaaaaataacaaataactttatggtctcagtttatatataaccgagacgtaaggttgacttttaaccttaagtctcagttataaaacgacaccaaagagaataacaacctaaaagccaataataaagagaatcaaacccaacgccccgtgtcttcttcttccccaaatcaactcaaactctcttatcttcttccccaaatcaacctctctatcagctctctcccaactcgctagctctccctatcctctacacccaaaaccctagaactacaaaatgcacctccttcttcttcttcttcttctttttcttccggcagttggaattggagaaggattaggttttcatccaaactctcctcgcatgtctcttctcttttccttttaatattaatgaaattttttggaagagtacaattatttgtaaattgttacaataatatttatgatgatgatatgggggtgcaagtgttgttggaggtggagttggtattactgcaaatatttaaagtattcatctttctccttcaaaatttggaattcagaaccctaactgcttgttgagccttattaatcccgtatctcatggtgggtttcttcaatgtttgctttttcttcttctttaccgcaatttagatttaattttctttttatttggaagattactctgtcttttaaattttttatattctctatctgactagcttgtgttttggtcgaagagcaggtaatatactctgtcagttttcaatctaagatcgaaattgatcaacaaggtacagtttgcttgcttttcttggctagcttgatctttttctgagtttgaactttaatttttcgtcatctgctttctccctttcttgtatttttttaatcctttttgaagttttgttttgattgcaagtattttcaatagttcgtggtgtgaatttaagcttttcaaaaactctattttgcacaatatgtatgaaattatgaatgggataattgaagagagcatggtgcttattagcatatcacattattttcttttgaaattctaaattaatttggcagtgttttattgtacaattgttattggtctgccttaggtgaccgatgatgcaacatttcatataatttgaagagcttattggaaaaccaataggctgtttggctttacagtttaaaaactgttttctgttttttaaaactgaaaacagtttttaaaaactattaggagtcgtttggcaaaaagttttaaaaactgttttctaaaaattgagttttaaaaa

SEQ ID NO: 297647 - DNA, 5802 bp, Cannabis indica
aaactaagcggtctttacatttagtttattcgagttattgtactagttttgtgcttattaagagaacaatttttgattaatttttttaatatattttattgacaagaatttttttatacaaaatataagcttaaagcaatttttaaaaaaatctctcttaatattttcttaaattttctttttcacactatttttttttataatttcaataattattttaattttattttcgtattttattttgacatcatgtataattttttttctaataaaatttcatataactctttattttttaatcttaatatttaaaatatatatattttttattttatatgtatgtttttggagagtataaaaaagaagaaatgaattaaaaaatcagtataaataaataatatatattttaaacaaaataaaaattattaaaataatatatctttataaatgtatagtgtaaataaaactttactatttcattattattatggaatctattattattatttttgtaaagagaaaaatttgcgaaaaggaaaaagagtgattacacttttttttttttttattacacttttttttttttttgaaaataaaaaagagtgattacaaaggctaagaagaggggccattccactaaaatagaaagcaatgaagaaatgggctagctagtatagtaatagtagtagattttccaacgacaccaaggtgagtgcttgtgctcctacaaaaatcactctatcttttataaagtagacccagattgtggtggaacccactttccttattattcatataatgtttttttgtgtattgtattgttatttatttaataattgtattgtagaaacatttttcctttttctattaaggatggacgaccttgtttggagtcttttgattccctctctctctgtctctttcaacctgtttttatttctttcatttaattttatatataaatataaagtttttatttacatagatatgtatatgtgtatgtgtatggttttagttacaggacaaggcaattttgatcattgtcaagcataacaaacatatatgttatgacaaaaaactttatttattcatctacacttttctctctttctcccaacttgagccccttatgatcaatatgtacaatggctataaaagggatgaatctagtacgagatgaatgattttgacttgtttacaaaaaatacatctttttccaattttatttccctctcaatagcgatttgttgatgtttttgttcctctctcatctcatctgatgatgaagaaatctctacatggcaccaaaattccttccatactctttttggtttttttttataccttatttgataaattttatttgggatacatgatcagatattacatgttgatataggagctgagtatttcttgttttagtgaaagcatggttagtagtagaaagaagtgatggagtttctgtttatagatttgttaataataaaattggcaggcttatcattatttgataattgaaaatgaatgcaatatgatttataaaaaagttgaagataatgagaagataatattgatgggatggagagagaatgagagagaaaatttcacttctagaaaggcaattcttttttagcaaggttgcaattgggatgaagaaaataatggagtaccacatgagagagaggttcctaaagtttcactattgagataaatgccacttaataaagaaagaagtaataattatattggaagtttatgagaaattgtctccaattccactcttgatgtcccacaacacatataattaatttgaacaataattgacaattttcaatcaaccattaaaattaaagaaagaccctataaaaataatcaagtaatctaatttaaattatttaaattatatcatagtatgaaaacgaataaaatttaacattgcaccactccttatatatatatattttgaaggggatacatatttataaattatattataaatttcttgcaatcatatatttactgagctaaaatgtgaattggctcaccatcttatattcttagagctaagatgagaattgaattattaggatgaagagtgcgttgcttttggggagcaaatatggatgggcccttttctcttccaccaaacaaatatcaaagggatccaagaaaataaattttaatcaaaagaaaaatgaaaaaaaaaaaattatacaatcttattaatttcttcttgaccacaaattaatatcaatataagctaaaagaaaagtaaaaaaataaataaataactattaaatacaccgaacaaaagggaagaatatgaaaaaggaaaaagaaagtgataatattttagaattaattattataataaaataaaaataattattataataaataatgataataagaatttatattttggttaattgtagtattgtataactcttcagttcagatactacatatatatataatgtttggtttctcaccaaatacaaggcctttctttctctctttctatccttctctctacagaagctataaggtagcttctctcttactaaatatagttactctctctctctctggagtggagacttgagtagattactcattgctgccctctaagcaatggtggaaattgggtcttttaaaaggtgtgatttttagctgaaaatctgatcgtattcaatgatgggtgtgggaaatctggactagggcatgagtatattaaagggattttgtttggacacctctatcacagctccgccattgtcgatcggttagttctttatttgaatgcactgtcaagctttcttatctcattttcttcttcttcttctttcatctattattattattattattattattattattattattattattattattattattattttttaaatctatatttttgtgctattgattttataaagacttctttttgggtcgagcctctcttcttactagtaatggcgttttgctcgtttttccgctacccattttgtgaattgactttgtgttattattgttatttttattttcaattgcttagttttagtataacctctcccctgttttcttaccaacttcatttgctcttgcttttgcttctagatttgtgtattattgattggaatgttcagttttcctgtggatatgcatgtacacatatattcatctgaagtttttgtagaatagtatccttttgcggttttggagcttaaagaaagtgtgattgttcctaaagaaatgttagttcttctaaaattgcattcgattttataataatttcaatttgcatttacttcatttgaaaaagttattgatttaaagagcatggtttgctatatatggaagataaagaccttgttttgagctgagaggtacactatgagcatgatgccatgagtgttgtaagttctttggggagtgtgaattatatctttttggaaacaatctcaaatacaaatgaaccagaaggaatgctgaaagaaaaacactaagagattttgttagaagctatttttgcttggacagtctatgtggattttatatcttatatatatatatatatgcatacatattgttgtgtttgaaattttggatcttcccccttttggtttgtgaagcaaggcccatatactaagcaaaaagtaaatcacaaggctgcatcctatcccagacatgctctctgaagtggtcgtctgaaggttgtgctagttctttatgagaagaggtagcgtaaagtttgttgtagaagcatctttatcacaattttaattgtagtgttcagtatggattaatgattttatcagtcattgtgagaataaatttgatatggtgttggaatagatgtcaacttagcatatcatttgttagtgaatttatgatattctatgttcttcagtttaaagtttaaacaccattttgaaatatttaataatataaagatagatgtgatttatataatatgtacatttataaatatatacttttggtagctgggacttatgatatatgtatatgcagattcattttttgataaatgttgaatctaaatcacacaggagagctgaatgatggacaggatcagattagatttaagatttcatccctctggatcaactcaatcagaggaatctgctcttgatttggatcgcaattactgcggtcatcctaatttgccctcatccagtcctcctctacagccttttgcttcagctggtcagcattctgagagtaatgccgcctacttctcatggccaacttcaagtcgattaattgatgcagcagaagatagggccaattattttggaaacttgcagaaaggtgttctgcctgagacttttggtttgccaaaagggcagcaagctaccaccttgctagagttgatgactattagagcatttcatagcaagattttgcgtcggtttagtcttggcacagcaattgggtttcgaattcgaaggggtgttctaacagatattcctgccattcttgtctttgttgctcgtaaagttcacaggcaatggctcaaccatttacactgcctgcctgctgcccttgaggtattcttattgttattatgtacctgccttaacaaattcactcagtttcctttaatgtgtcaactattacttctaattttgttattcactttaaacataattgtacatgccccaatcatcaccaactacaactaaatctagacggacaactagtttatgctgacagcttaaatgtcataaataaatagcccttttttcttttcaaatggtttttaacatgtatacttatttcagtcctttgtaatgttgcaagtttctctttcgtttctgaaatgaaatgcaatttctataattgggccaggggccaggaggtgtatggtgtgatgttgatgttgtagagttttcctattatggtgcacctgctgcaacacctaaggaacaactatatacagagcttgtagatggattgaggggaagtgatccttgcattggttctggttcccaggtattccttctcttcttctccttgacaaaaattccggtttacatcttatgtatttaggttagtattgttggtggaacagtcttagtattttgatgggaattgtgtttcattttaaatcataatgtatgggctttcaatctgtacccaaccttatatttttttgtctacacataatactattatggtttaatgaaaatgcttaatgatgagagttatgcaagatatatgaacgttttgaaaagtgcttaatgaaacttgcctgtaaagagtttccattgcctttgccttggcagttggcagtaaagaattgtattataattgaaagaaatttttgtttgatcaataaaacagagtgtttttgcttagagttcagctttttgagtcccctctcttttgtatacaactatgcaccaaattgtgaactctttgctgacataactaggactgctgtggtaacctgtaaaattataatttctgtttttctattgaattttgtgaggggatgtagtcaaagaaagagtacatttgggaataatgtttatttttgatcttgtttgtccatggatagaaagaatgaagacctattttattttatggagattgtttgagaaaagaagagttctttgaggcaacatcaaactttgaggatgttgtgggtttatgccttgctgctctctattactttcaaggctgatttgttttaattatgtgctaaattaaaagaattgggtgttgtttttatttttggctaattaggatttttgccccctcgaa

SEQ ID NO: 297648 - DNA, 3268 bp, Cannabis indica
catgttgtactaatattttttaagagatttagcgcaatattttcatatcatggttagattcgtgttgtagtttatttcagactggttcatttttcttaaactaagctaacttatttttatatacagactcgaattcaagcttcacttttccaaatttttctcacaattaatgagctatgatcatctctattagagtactataaatatagtgtatatatatatatatttttagcccatgtttataaaatttaactctcatagtggtgtattatgtggtttaaatttagtacatactaaaagttatactaaataatttcgcttaaaatatagcatgggctaaattttacattacaataaatatcacttttttatttactcttttatcactcattaatataattaatagcttaattattacgttttatttatttatttcataaaaatgcttaaaagtattactggtgcctagcactctcctcggtgtcataccgctattggagcaattaattaagtatcgagtccatatataacttaagaaaatatcatttacagaatattgctaacaaatcttagggcgctgcctataaataatgatgggcatgcaccactagtggacaataacaatattctttatttaaatatgatttgtacacactttcaatcaaattcaatactttttctaattattttttacacatttctactaaaaataaagtcaaatattttatccctaatgtaattagtacatttataaaatttgagtcaaatataatagcgcacccaaaaaaaaaagaatggatccaaaccctaacaagaatgaacccaaaaccctaactatataacctgcacctaatccctaacaacacgatcttaagaaaatcataccccaagagaacaaacgtaacccaaagaagaaagaacataaacccatagagagaaaaattaacacgtatcaattgatacaatgactaaaacatacggctaaaatatatactcgccagtttgtttgtttaattcgtctgtttgtttgcttataaattctatatatttggagtagtattactcaatcgatcccataattacgtgataattattcaatagatagttaaattaaaatacaattaattacacaaactattagagaatttcaaaccattttaatctcgatatttatattataacaaaattacaaattaagaaaacatataacaattacgagatataaagatacaaaagcatcatgcaagagggagcttaatttttatcaccaaaaaaaagacaatatctatattctcttttctaattagtgctggatttgaaatcaaaggtggagcaagaaagctttctagacaaaagggaagaggtgaaaccaagtcttgaagaagccaaatcaaactgtagaagaatatcctcaatttgacgccctccaataacaatggcagttggggtaaacttaataccccagtcaacgaaatgaagtggaccaccatcaacgaatccaaggcacaacacatcattactaaccctaaccatagaattggcaccactaactctccacaccactttctcactctgcaacacaaaatcaatcggaggaacaatgggcccaccttggcttaacccaatatccttggtgttaaagcaagcactaaagggcgccactgccgcaaccttacggatgttacgttgagcaagcgcattaacaaacgcattcactactgaattgtatatggaagtttccaaacttgtgtacggaacaacgctgctgatcttagttccgccatcgccatttgcatcaatgatagcaaagaagtattaaccggcactggctttccgtcaaccttaattgacttcactccgatgaagtactctgatgatgactcgccttggaaacctcctatcagatttacagggttgaggattagcggagtgtatgttaaagacttggaaacgtcaattccaggagacaactcgtatggtccatttccgaagaaaacgacgccgtttgtgggtgacaagcaaaccgccatcttctttggaaagctgaaagcagcggagaacaaagaaggaagagcgattgtgttccttccgaggccggcaacaccgacggtgccattagagaggccttctaagatgaaagtaggagcacaagtgaagagaaacttgggtaccgaaaccactttcccagggcttgagccgttggttgattggatatagatgatgtcttgggaaagatcaccacttgtacttgtgctagtaaaagggttgtgaggaaactcaccgcatacatcttctgatgggttaccgtttgttgagcaagacttggacttggcaaggttgcattgagctgatctgcatggtacgggctttttggttgaggagttaaaacccttttcgcaatccacccaaaggaattcgccgccgagatcaatggctactttgatctgaactggtggggttctttgcgtgatgtgggcaatgtattggtgtgtggcggtgtctttggtgactgggagaacaagtgctttgggtcggaatgatattttttgggatatggtgggagagataattagtagaaggagagaggtaaagagaaggaggtggacagagttggaagacatgtttgattgtgtgagttaattattgagtggtggagtatgtggaagactctttggtatttatagaaattaatattggcatgtgcaaatagaagagaggtgtacttgggtttcgctaatagtccaaggaggtggcggctcgatctagcatcaaataattaaaatggccaacagttctctgtatatagataattgatcttgactatatatgaattatgattcgagagatttatatagagaaaagaaatgtgtatgaaattatatatatccatgaagaagatttatgtatgaaaagttataacaaatataaaaacaaaaatatatttaagataaactcaaatatttatgatttgatgtgtaatattatcattaatttaatattaagttttcctttatttactttaataaatattatatatggctaactaattataaaataatattttatctgctaagcaacataattaaataattctatgtgctgtggccagttgtaaaaagttaatcattctgatgaaattaatgtgtattaaccaataataaattacactaagagttcgtttggaacgccgtattagatcgtacagtattgtattgtattatattaaattgtattttatgcaatatttttatgtaaaactatatgtggt

SEQ ID NO: 297649 - DNA, 6856 bp, Cannabis indica
taataaaggaaatgaattaagaaaaaaaagtgtaagaaaaacaaacaaataaaccttaatttttaagtttgatagtaggtaaaagtttggttgaatcgtagttattttttatacttaattttttttttaagataattacataaaacacttttctttttgtaattttttaactatttttaagtttaaatattttttatatatatttttaagatgttttataaaaacaacacaaaacaaaatcaaatcaaataaaaaaaggtaatacacaatcaaaagaaattaacaacaaaataataaaagtacaacataaaaataaaaaataaaaaaaactatattttcaaataagtaaaacataaaaatatcaaaaatcatattttctgtaaataaaatcacaaaaattataaaaattatttaaaaattccataaaactgtatttttataatattttattatttgtgtgtatttgtgaaaataatttttttataccaaatataagagtttattattcattattttctattttttttttcttatattttctctttctttttctttctttactaaaatccaacttccaacgtagccttaaaagtttattagatgatttcatctccttgttttgttgtggtggcataagaaacagagaatttggttgggtgaagatgtcaatgatgaaggaagcataatacattttatgttggtttgtgttcatagaaaacccaactactacattgaatagctaagctataataattgaagactagattagatgtgttttatttattagctgcattgtaacatataagatgcccatcacttgtttttgttttccaaatcagagatgataagtttggttacttagttagttaattagttgttatcctgagttgttcattggtgtcataattcttgttcctttgtttattggacagctagctatattagtgttagacagacagtcacaccatatgtcagggaacaattatagcggtctaactagattagaaagactaatgagggaaagagaattaaggaaatctatcaattcgaatgaagaagcaaaggacggtagcagacagcgattgttggttgtagcaaataggctgcctttttctgcaattcgaaagggtgaggaacaatggcagcttaagatggatgctgagagttttgtcactgcacttcaaggtaatctgatcatttgaactgattttttttttgtttcatattgtttgtggagtttgattgactgattgattgataaaaatttcatacacagaatttgatgttagatggattggttgggctgatgtaaatgtgcctgatgagactggaaaaattgcactaaccaaagctttagctgaaaaggttcaaatatctactacttatataatcttgtacttattgctctttacatatggtatacctacttaaaagagattgttctttgactgcagaggtgcattccggtatttcttgatgaggctattgttcatcagtacaacaatggttactgtgagaacatattgtggcctctttttcattatcttgaggatccacaagaaggccttgcaaccaaccataattaccaggcacaattcgatgcatacaagaaggtgaacaaaatgtttgctgatgtagttaatgagcactatgaggagggagatgttgtgtggtgccatgactatcaactaatgcttcttccagaatatctaaaaagacacaactataacatgaaagtaggttggtttctccacacaccctttccttcattagaaatttatagaacactcgcatctcgatccgagctcttaagatctgttcttgctgctgatttggttgggtaagtcaagttgctcactttttgttagatgtatcttatttatgggtggcaaaaccatcttagtgttataatcttgagatcacaaggattttaattggtggattcttgaacttccagtttttatacatatgattattcaacgaattttacgagtacttgtgctcatatacttgggctagaggttacaccaaaaggattagaggaccgaggaaagcttacccgagttgcagtggtataaatttgaaaacctttccttcattctattatagttattttgcaaacctgtaaagttggcattttatatagtacatacatattcatttgcacatggatgtggcttacattgttatgttcatccattattacatgtacttgtttcaattacttcaagctgagtttcttcacttgtgatgcctgcattcttttatttcccatttggatgtggaactacaggttccgactggcatagaccctgaccagtttgttcgagttttggaaattcctcaagtccaggaagacatgaaaaaactgaaagagagtcttgctggccggaaggtagactaactgtaacttttggtttctctgataaacaatatattaagtgttcagctggaataataaagtgttgaaaatacatttctttactcatttaaaggaaagaagagatccttctattctaggctaaagatatctacttataacaattgtttgtctgctaatagttggatatggtatcttttttctttaaaccaattgcatttggcatagaagaaaggttgaaccaactcacaggaatccttagactctatgctatacaaacaatgagttttcacttctaatattgctttactagtttgaatttttatgttgtattatatgagactgagtaatttttatgtttcgccaatgtatttacttgaattttcttttcagaattctggttctctagttacctatcattgttgttaaactttggacagatgatattgggttttgataagcttgacatgatgaaaggaattccacaacagttttcggcttttaaaaaattcctagaggaaaatccaagctggcgcggtaaagtagttctacttcaaatttctgtgccaaccagaactgatgttccggaatgtatattcatgatcaaactatgttcctactccaaatttggctttgcagtgatcataataatacagtcatttttattaatctctttattattgtttaatacagatcaaaagcttccaagccaagttcatgagattgtgggacacattaataggagtattggaactcctgttcctataatccatctggtttgtgtttttttctctgttttgatagctttttaaactttgtaaaggcatcttagttgaaagaaaaatttagtaaaactaagaatcaaaggcctgagttcaggcctttttaagagcaactgaattgattaatatatgtttttgagactacaatttactcaaatgttttctcatattatgtcaagactgccagaaccattttctcttctttttacaggagcaaatgcttgactatcacacaatgtgcactctgaatgctgttgctggtactcgtttttgttctgtaacaaaacagttaatcaatttcgtcttagataaagcaaattgttccaaccctggaaaatttatgatgtttatatgtatgtaaatcgttttgttgtttttcctgtttagatgttgcacttgttattccttgtagagagggaacgaatttggagtgctacaagtttgttgctctccaagaatccaataaaggtgttctcattctgagtaaggtaattcaactttatatttctctttgagtttgccttgtatgttatttttccaatgttaaattcatcattaaagcttttatattataaattttgctatggttggtttctactcaatgcattttcctcatagttcttgttcaggcttgtttattccatttaaatttagtgtgcaggtgcagtaaattcactcggtgctggcgctattttagtaaacccactggatatcacagaagttgctgcttccattggtgatgctttgactatgatagctaaggaaagagaaataagacatcaacataacttcaagcatgtaacatctcattcatctcaacaatgggctgcaacttttgttaggtatgctcatatataatttatctagcatagaatgtattataggattgcaagttttacttttattctaataagaaaaatatttatctgttcataccaactagtttttcttgctgtaatcttgtgtaatttcttctttttcttccaggaaactcaacgaaactattgtggaagctcaacggaggactaggcaatttccacttctacttcctatgaaagaagtggttgatcgctattcggaatccagtaatagattgcttatactggtatgcaactttctcttgctagacaataaataggctggaattttatgatgatccatgaaatggacaaagtgggtaggtgaagtaaaacttataagttgacacagtgtgaatttgtataattttaccttctttctttttttagatggaataacaaatatgctggcttcactaagttatgtattcaacaaagacatttctccttatagttttttcagcatcagattagttttttgaaattcaaataaaattattcattcatctatagaagtattgaaatccctatcttatgtgtaacaacctgttatcattgtatgcacaaagctcataaaactaactactatctatggtcatataaatatcactaaacattctttttacaggggtttcatgccactttaacagaaccaatcggcgcccttgggagaagaggtggtcaaattaaagaaatggagcgtaaactgcatccagacctcaaagaactactgaagaaactatctgaggaccccaaaacaactgtggttgttcttagtggaagtgacagaaatatcctagatcatgtagctctcttctctacttttcttcgttctgcattacttgtcttgcaagttatgctcttcactaactttttcttatacagaattttagtgactacaacatgtggctagcagcagaatatgggatgttcttgcgtcatacaggaggggaatggatgactacaatgcctgagaaattaaatacgaaatggaatgagagtgtgaaggtttgtttgtttgtttctacaccaattgatgataaaaactatgttatcctccaatgaattcccaccttttcaccacaaattcttgtttctcattccattatttcagcatgttttcgagtactttactgaaagaacacctcgatcacatttcgagattcgtgagacatcacttgtctggaactacaagtatgcaggtaaccaaccacatattcagtatccttctcttccctcactgttaaaaaaatagtaaaatggtgttggactattagttagtatcatttgaaaagggactatttgaattactagatatccagtttggaaatcttcaagctagggacctgcttcaatatctctgtacgggtccaatctcaaatgcatctgttaatgttgtccgaggtagcagaacagtagaggttcgagctgttggtgttaccaaggtactttgcattttctttagttacaatgtttgtatgtgttgtgattcaatcacacctcaaatcaagtagaaaagcacaatgatcaaacataaacaaaacagtaaaagaaagatcacaccagaaaattacatgatctaatcaatgaatcaatgtgatccatgatctaatccagaagttgatatgctttattgatggacttttaacaccagtagcgagattacaaagatgatacactcactagacgagtcttgctctattactgatgcaactcacatgagataagtcacttctagtgtgatcaatccctttaacaaccctccaagaattacaacagattttgatagttagttggttggttagcttaggtgtcaaggttcataatgtctaaattacaacagtatgaagtagtaaaccgcatgtatgatcatttatgctacccttctcgtgtctcctttatttgttttatatgaaatcacatgtatgtatgttatatgctgcagggtgcgacaattggacgaatattacacgaaatagttcacaacaaatgcatacggtttgattatgtcctatgcattggacattttctctctaaggtaaaaacttgatttcttgtactcatttaactgcttctcttattgtaacattggtgtgttttaggacgaagatttgtatggatattttgagagacagcttcagtccgaaatgccaaccaagacgtctctacacaaggactcctcagttcttgatctcaaggatgacaattacttctcttgttctgttggattaaagtgttctagtgctcggtatcaactcgtgtcatcagatgatgttgtcactctcctaaagaagctgccttagaccattgatgcatcatggattcgtcgttgactgaccatgttggttttactttaatgacactattatgagttaagttacttctatgcaacaaataacccaaatggaaatggaaactgcagactaagcccacatggcaaaagcattttctgcatagaaaataagaaagatgaatcagtaagattttcattagaatctgtaactagagaagactaaatcactatgcaccagaaccagaaggaagtgtgttggtaatatctttaaggagttcagttaaataatgtttaagcatatacaagctgatgttatcacttgactaattttaaatccagtagtagatatattaaatatgtcatgactcaaaaacacacacacagcaataatccccactaatgagttagccaaattggtttcttgtatgtaatttaacaagagaaagagaaagggaagaataaaatgagaaagaagaagaagtatctggaaaatttgagaaaaaaaatttggaccatttctcgatttgtgcgtgtcatccttgcg

SEQ ID NO: 297650 - DNA, 4783 bp, Cannabis indica
cattcactttctctttctctcttcatcttttctttcttctcatctattttatattattttataataaattattctatttttaactactttaatctcatccaaaattcctattgtttgtgaaagttttcataataggcaaattaacaaaatttattacatgaaaatataggtcataaagcataagcaacaatatttttatttttgttttacattttaatttaatgctaataataatcttttcaaataattaaagttttcatgtaattcatagatcagaatcaacattatatttatttttgttttaaattctaatttaatgctaattttcaagtaatcttttcaaatgattaaagtccattccataaaaatataattcatagaacagaatttacaatacaattatttttgttttaaagtctaatttaatgctaatattaggtcatattttcaaatgatttcttaaatattttatttattttgagaattttttcaaacattaatgttattttagtatgtttttcaatcctaacttaatgcttatttcggttaatttattccaattatttttcgagtttttgtaaaatcaattttgtagttaattaatttaaatgctctttaattttatatgtattagtgtcaaaaagtttttaaagtatttttctcgaatcaatttgtattcaattaatttaaaatcaatcccccaaaacgattctatcacctaattacattaatttcgtactaaaataaaattggcctaattttaaggatggttttattactatatttattgtttggtaattttctagttcctattgttagtaattttaatgctcttcaaacttttattgggtttctctcacggaatcatgactcttatacacacacgtatgccactgtgaatgctttctcacttgtacgcattttaaaaaaatttaccaagaaatcacccattcccaaattattcaaagtcaagtacgctttaacttttaagttctcaattaatgggccactaaaaaaaagatgcaccttgttaatatagataatagtcattaatccatttaattcattttcaactgtgtagtctcatacctacacaatttcagaatcatcacacttgacattttcaaggcgatgtgaaaacgcacaacttactcagtatttttccttacggatcacgagaatactgactgtaacaataattgtaacgcctaattgaagaaacgccacatatcgtgattacactatactaatcacgtcaatcgaagtttattaagccaagtgaatttaaataaaataattgataaattaaaccaacttgtaataacttatactttaaactaacattatattacatatatgagatctcgtaaattcttttcaaaatattacaaattatttatacaaaagtcaatttaagcgacaaaataagatttctaaggtaatcttctggtaggacctaacccttgtggtctaacgtggcgaaaacaagtataatccatcgtcacaactctagaactcatggttgttttgacactgtcttactcttgcctgcattagagcacatgtgagccaaggcccaacaaaaagtataatcaaacccaaatataaacacataacataattatcacatttaatatgccattgtgccactggactaatataacacgctacaacgtttatgatgatgtcacaacatcttaagtctattttgtataaacaccacgtgttacgcccacacttctatttacattataagacctcatttgggtgtatatcaatcttgattgtcgagtttcacctaattattctttgaatgcataatccttatcatttatccacacatctcatttaatatattcgcataactctaatacatgtttctaattaactaactacacatcatataaaggtgccacatcactaaactctaagtgcagggtttgctttcttacatggatcccaaagtaagtggagaatccaaactgaaaggcgatctcaatcaaatggcggtaattctagtcacaaactcgagtacgagtataataagattaatctccaatcacataacacatttataaataattagattcatagactgagccaaatgatagagctcttcacaatctttataacgctataaaatatgtttaaaatggagttcataaacaaaaattataacctaaacaagttttataaaaattcagattagagtcatcaaagagtttagtaccccaaatcaccaaaacacaaacaccattcaagaaatcctttcaaaattcaaacccaaaccccaacaaaatctaaattcaaaaaataaagaaagggataaaaaattcttacctaaatgttctccaacaaactctattccttgattccaacatgaacacacattaccacaccaaagttttgataaaaaagatgaagaatttagtaaaaaatttcaaagaggtcgagagagaataaaagggtggttggaatatgattttggtttggtgttgtaaggctaatatggttgatcattgttttgtataaccactatgatcaattttgttttgataggatgaatatgatttttgtatgaccaatatgttcaatttgatttttgtttgtaaaacaaagaagtccaacactttatttgaaacaacaaatttggttaaagatgtcaacacttccaaatactcagttctttccattgtgcccttcaccagtttcatactaatctttttcttttgttatttgtatgaaatgaaatgagtttccttttttaatattaatattttattgtctagctttttgggagtaattctttctcatgtcaatcgcaattttaatattgcgactcatgtatttattaaacatgtttttaggatagaggataattttttttttgaatagataaaattcctcaaccaatcacatttatctattaacatccctaaaaataaaataaaataaatatatgaaatgagggtagaatcaataaagttctatgggagcaaataatattgtactatttcttgaattttgtttcaaaaggcaaaaacacataacaaaaaattataaaatataaccaataattaacattttaccaaaaagaatctctatcattcaacattccctaccatatttagaattcgaagtagtcccaaataaacctataataataataataataataataataataataataaggtttataacttaaaataataggattctttaaaagaagaaaaccactaaaaatgatttaccataaagtttcaatatatgtatgactttagtaaaatctttgtgactaaggttataattagtgaattacaaatgtcaagtatttatatgtgcatttattagtgcatggtccaaatctaaatactttgatctagctaggcatccattgtattggtccatgtgcataaataaaaataataattattattattattataataacaaacacattttatttaacctaaaagaccaagcttggtctacaaacacccccttggaaaatattaatattaataataataataaaaaaaaaagtttggtccacaacttcattaattaaaaagttgagatccacaatttttaatgactcattaatagtcatgttaatgctagtattagtgcattgcaactacccaataataataatggggtgtttttggggattcaactattttttttctaaaaaaatacaaagaagaactaatgtacatattattcacccctatagatgtggtgtttttttttttcataagttatagtatcatgtcattttaaaaatagtaatagaagaaaataaacaagtgaagtaataattaagtagtaattttgtgtaaattaatgaagaaatggagttggggctggtccataatagaggcaggtagtagctgtgttgttatcaaacacttgccattaaaacgacatggtttaatgagctttgcttgcatttaattaaccaaaatgcatactttctttctttctttattattctacatttaatacattttaacacacttaaacatttcttaatttcctatttccaatatatatgaacataactatattagtacctagcaccactataacaggttgtgccgagaaatatttaaaaatatttatggtgcttaacactcttatacagtagaatatcgttattggtgtaatttaatatcgggttctacttattttaatttaataaacattataactaacatataaccaattataaaatgtcatattatagaggtattatattaggtatcttcgtaccttataacaatgccttaagaataattatcgatattctataaaaattattatattaaagtatgtatgatttgatacttgattgtatcaataccaatatgatattttaagtgactcatattttttggcattttttttataaatatatatttttaggtattaattgttacgactataaattttaatacaacgtgtattgtattattttatacataacaaatgatatgtattttattcatatgtcttataatatttataaggggtttggggttggagacctaaaccgtggcccctgtgacagtcagtagtcccgtgatccgtaaggggaaacaccgggtaagctgtacaatcccacaccgcctggggaaagtcaagtgggatgattctgagactgtgtaggtatgggactacacagttgaagagggcttaaatggattgattggtactacctatatcaacaaggtgcatcttgtttttcggtagctcatctcgaaagaactccacagtt

SEQ ID NO: 297651 - DNA, 4163 bp, Cannabis indica
gatcaagaaacagtgaccaccttaatacacaaagttatgtcttttaattaattagggtgaagtcaaactaaagaaaagtagtgtatgtatatctcttcgaagaaaacactcgacactattatctaaaacatttattataactactacgtacgttgaattttatggctctatatatatagtagttttatttagacaacgtgggattattagtgtcaatttatatgtatacatgtttttatatactttttgacacataatataatctcaagttgacaaaaattagcttacttgaattatatattcatttgttattgtttctatgctattaacttattatatattatgaatttctcaaaatttagtttaagaaaattgaaaatataattaagccatatttttatgtattaattaactattaaaagctcatatttttatagaacaatataaaaaattatgtggttgcctatttgtgttttagttaaatatgctctttggccttctaccagtactgtttggtatcttttgtatatcagaaacattattatggctaatactatttgattaatgtaggtggtattttgcagaggctatttccttttttttttttaaaaaaaaacagaagttcatattgttaaaaatgatatatataaccgtcttattctgattagcaaaaatatttaaaactagaattgaactaaaagtatgtgaaaatgaaaaatgtaaaaacatacttaaaagaaatgtcattgtcaattatttcggacagtattatacaagcaaaacaagtaactactaatctaaggtggtaaaaggaaaaacacatttttaatttaattttctttttttaatcaagttgaatctgcctttgtgtccccaccaaaaataaactgtgagctaccttgaatatccacaagaaattgattttaaggtattatgaagcctaggaataggacattaatggaccccacatatgtatattatcatcttcattaattatgatgtccttggttttggtttatttttttttagatctataaatatataaattgatacaaatgtgaaatcatataaaataaatcaattattgtatgcttgagaaaaaaccaaaaaacaaaaaataaaaaatcttaccccacctcaaaacaaaaaaggaaaatgaaaaggaaaataggaagtaaaaagaagcatctaggctctaaatataactgaaaatgccaatagggcattacatctacatcttagctccacaagtgtgtttgccttttcctccacaaaaaagcatttgaataaagattatttagagatgccaaccttttccatataaataactttatttattttttttaaaaaaaatttatatataaataagatgccaagtattttgtatgtatacatggtccccccacattcacttttctaagttgacaaaacaagaatataattttgcaaggaaatacacaacaaaacaagacctatggcttttatctctggccttttcctaattgggacattgggatgttgctcttctatgatttgtgtttattaagtaatttttccctgcaaaaatcttagccctatgatttagtgtgttttaagatacaaaaatatacataaatgagtaatggtatgtgcatgtactataattatactcaaatatattacatgtttattagaaaaagtaagtaacaattaaagaaaaattatgattgaaacagaaaatttatcacataagtaacattactctaatttaatacactcgagaattaattagtaaaaatagtattttttttaaaaacgtaatttcctcgataaagtatggagtatgtaagaaagactgtataaaaataatacatatatatttcttttaaaaaaaaaaaattaatacatacatataagattattattattataatttttaaaatatctattttactaaaccctcaaacaccgacgcatattataagggaagaaaaaattgtcacagtcagagataaagttttccttagccaaatttaaatgaatggaaaatccaaaagaggtgggttgttgctttcaaggtttttgggaccatatgttactttgatgaatttagggggttgtgtgtgggggaccatatatacatgtataaatatgtgtatataatatatatatatatatatatatgatatagggtgttgtacttttaaaatggatctaccatttgttttggcatctgagattattttttaatttatttttttttatagttgtctaagttattttattttttattttatatttttttttgataaagtgattaaaatcactcataaatttacgacgctcatgtccgccatcggcgctggaacctcctcgaactaggatagctcatcgtctaaccgcagagcatgctttgccaaccatgaaccgctaaaaacttagagcgaaccccatgggacaaaactgcctccgaaaatttaaacaataaagctataacattttcaagcaacgctcctaaatcaataaaatactgaacgtaactcttttatttaatatagtgtgtgaaataaattgtttgaatcttatttttcagtgtgatattttttaaaatttcttaaaattttaaatatcttaaataactataatatatatagacaatcataaaaaaaaagtttaaatctaaaaaaatttattccaaataacaaagtagataaaaatacattagtatactataaaataattttcttatcatgtacatatatatatacatacaaatcaattatcaatacaataccaaatctgaaaagagtcaataataatgtaaattaaaaacagtattgaaatatccttacaaaaaaatatattgaaatgcctggttagtggtgatatttggagtctctctatatatatatattctagctagctctttccaacaaatgtaattagatttttatttaagtttacattaatttttattagttttaacaaaatatgagttgattgaatagttatttactgtattagtccatattgttagtaattaataattaatgaacttagcatttgtgtgtgtaaagtttagttgaagctgaagtgtgagcttttttaattaactgaagcctttgatgatagacctagtccaactagggttatgtatcattttctaactctataaatacatattgtcctatcacaattatataattttgataattagataaaataaaactgcttttgatttagacatctaggaaggaacagttagttgatagtattgtactatcaaattacaataattgctatagatcaatcaagtatgtatatctaactattatatcatagtattctatattgtatacaattttgcatcttgagattatttgatttttaaacatgtggtatcaaagattgtcaattgtatatgatctaagacctataatttgtgtaacaattaatatgtatatgttacttttcatcaattacatgttaatttcgttattattttatgctgtattttttcgtttttcaatcttaaatgtttagggattatattcatcatgaaattttctttttattgatatctcatatgactaaaattgttgagtaaattgagaggattttatgattaaaattttaggatttatatgttttaattatgaaatcaaattatttttttttattatatattgattattgactgaaattgattgtgcaaatctcattaccaatttatttacagtatttttacacaactaatttttcgaattgcatgagatatacacaaaaaatcataataaattttagaaaatttttccttactcttacactcgttagtattctcttaaaatctcactcttcacatctcaaaaaatcgtgaaatttcataaagaggaaactaagattgttgcccatcacttttctatttgacacatgaagaggaaatgtaattttcaaccactaataatctcttttatcaatataatgaaaatctcacttctttgatagtggtactactttgtgaaatatggttcagacccatctaaaaatatttttccccgctaagtataataaatttatactactaagatatgaatatgtaaatatgttacgcgttaaatttgtttaaaccatctcaaaatattttttcccgctaagtataataaatttgtactactaagacatga

SEQ ID NO: 297652 - DNA, 1689 bp, Cannabis indica
aaattctgggtccgccactgactactggtgtcttatagcaatgctcttgaaattaagtaactactcaaaacaagtgacaaggtgttacgcaagtatagcgtgtgtggcaagaagcggtgacatgagagagaaatggttaggtgagtcggctaagatggtaacacgtatacctaagacttttggtctattttttgggtcataaaaggtaaaattacacagttggaaaggcaaaaaaaagccaactaacaacagcacatgtaactgggctagaactataacaaatgtggatatgaaaagactttaaaatctatgcaaaaggtaggaacaaaaaaggtgtttgatttgatttacttataatttcctattacactacacaaaaaaggcaccaaactaatactatattaattcattgtccgacatttgactttttccaatctcatattaatttcaaactccatctatatatttattcaaagcgtatgaaagcaaaatcacacaccatatccataaagtcaaattaaggatatcacctatatatattacactgccccccacagcccataatataaccatatatatatatagctactgattttgagagagattttatacagagccataagccagatcataatgaagctatacactcagaattctcttattaagatcttgaatgttacattcaccatcttatttttctttcttattttctctttgtcgatgcaagtggagggttctagacttttgaaagagaatagtactaataagcagtactccttctcaagtgtttcttcttttaagaatttcattgtgagccaagcttactctggtccaagccgtagaggacgtggtcactagttactaattactaccttgtaatgtatatggcttaatttattggctcaaagtaactatttctcataattcgtaacagtacttaagagccattgtggatcgacaacgtgtacatgtcaagctgctccattcatctccattattattttcttggccaaccaatcacatctgtaatttcactttaattaagttgttctgttttgagaaatttttcttactttctaggaaaagaaatatagatttttctttagtttttttatttttgtttttttgtaacaaatagatatacacatagagaaaggatcctacatacgtagttacgtaccgattgtacttcatacatattgcaaatattttatttggatatacgtatatgtattattctaatccatatatatatatatatataaatttaaaatacaatatgttataagaatattgtgtatatgtatattaaactttagtatttgctaatttgatgttagaattattaacaatcggtcatactattaatattattgctaatacaaaaacggccggaatcacaagattttcatgatatatataaacactaatttaactagtcaatattttttatataacagcatatttgaattaattaaataggacatagacatataataagttttttttaatgaaaaattgaactttattaaccttcgaactccactatatatcaaaataaatacatgtagcatatcagttaagacatatctcaaactaaaaatacaagaggaatttgacaatttatacttaaaaattgtccatggtctttcacattaaaatacatagaaatttaatactctaaaatta

SEQ ID NO: 297653 - DNA, 3014 bp, Cannabis indica
ataaaaataattataaaaaatattctttaaacgtaaaaatataaatattttacaaaaaaaaaatgtaccttatataattatttctttttaaaatacttgcattggagttgctcttggcagccaaggtctcgatcctcataactgtgtgggttatgggcccaccacgcttccgctgcgccactccgaagtttgtgagtgtatggttaatggtaataaatacacttattttaataaactggttgttaatcaaattacctttatcacatatcaaaatgataccgtgaattgcaactactaaaaaataaataaacaaaaaatttccaatctggttcaataaaataaattcgaattttacaaaagaattttttgttcaaacacacaacacaactatcctcaaatctcaattgcctccgactttactagtgcctagtgcctatgctaaaatatggcattcaggtacggtttgttgattacatcagaaatattcttaaaattctttaaaatgagaatatttagagttggaaggtcctatgatagagttcgcctttaaccctgtcaaaaatacatcacctgagggctgagagttagacctcgactggcaatgctgccttttgaagagtacaaactaacctgtctccttaccgttcattacgatttatcctccacgtcgaaattctaattgctttgtattatccagcagtatctgtcataaaaccccatcacaaaactataccaaaagaaaagaagtgataaaaacattgtttttatgcttggattgcagtactactatactagcctggtttttatgtgttatacttactagttacttctcttagttcttttgctattgccttgcacccttcggttgctaattgcattacagtttcgaaaatatccaatggcagcttagaatccatcttcatgagcggaagtcaacagaaagttgttaacaaagaaactttggcagatgactccttcagaggaaattatgcttatctaaaaacatctcgatatatatggagttgttaaaagagtttattatgtaacacttcagatcagaacctgcgaaggatttcagcttttgatacagagaaaaactcaacattatgcagccagattcatatccaatttaacattcatggaagtattgaattacaaacataaaaatataaggtataattacacaactaatatacttaatattgcgaatagaaaaccaacaaacaaattatgtaacctgaagaagagtcactttgtccaactttggaagaatcccaactgtgacacaggtcctccagcactatcttctacataattcaaatctgttggaacagtaaataactataagctcttaaattactatgcttatttaataagtatcaagatagagcaagagagagaaaattttgtgtcaatgaaagaaaaattgcaaaaatataaaattaaaacaagaaacacatagagattaccaagcaaaggagtactattaaggtagccagcactacacgaagtaacaatttcacgcattggaattccagcatctgcaagggccagactagcagcattaacgcatgcagctctagttcctgcagaattgaaatcacattcaaatttaagagcaaaccatattcattcccggaaatgtttgccaacactaaacggcatctaagtgaaagggagacacatagagagagctcatgagtgaacagacttagaactttatgaatgacaattacctccatctgcttgcagaacttggacgaagatatctatctgcaaatagcgcaaaaacaaaaaatcttttaacaattaacaaactttgcaatcaattagattaagaaatagaaaaaaggggtcgtcaaaattattagttgggataaaacctgagaacgaggcattaaatgtgtcattatacaagcttccatggcttgacgaatcactaaagaaatctctgttgatcgcctaaattaaacaacattgaacatcaatctcccaaaccaaagagaaagatgagaaaaaagttccaaacctgtctccctttggttttctcatgcgatctccagtactaaaattggccatactatactcacatcgcacctgtaaattgaaagaaaaaaaaatcaaattacctcattaaacatatattcatcaaatgctaacagtagttcacaaaaaaatcaattaagatgagcacctttcttagcatttcactaccagcatacataaataacacaaacaaataagtgtaagaggcaaaagggtattaccagtgcttggtcatttagtagttggcttctattttggacctgttaaaaaaaaatcatactaaactcaaatacgcttcattgatttggaaaatgaagaaataaaagtggagaaaaaatcaagcattttgggggatagtgtagtacctctcgggggccataaacagcagccacgactttcgtgttccccatttcgaaaactgcagaactgatacaaaaataaacactattgtagacattgtcacgtggaataaattgtaaaaaattgagccatatataataacatgggctattccattcatagcatggaattcacaacaaacacaacatcattctttcttgttattattgttaatccagaaactgaatttgtattagagcaaaatgtttagtataaatagtacctgtttagtaaatgttatttttgagaaagagagagaggtacttcggtcggacggcgtccatctaatcggagaccttcagggctgatgaactccatcacagacaactcttataggaaactcctccttccttcctagcctattgggctgcacgaaacccttacctgcccaacaagtttatggatttggcggtctttttgggcgggttgggttgctaaaattcaacggcattttacaaaaatactagatttgaggtaatacttttcaattttactgcgacacggcagaaataatatttatactgtcctctcccattttttttcttttatactgtaaataccaaaacaaa

SEQ ID NO: 297654 - DNA, 1983 bp, Cannabis indica
gcgttccatagattagggcgttacaactttactctaacatagaccttggttatgtcgtgtttaatagcaagactccatgtgcttattctaggctgacgttcaagagcattcatacactaaaaaccaataagtgtatttcctgcaataaggcgattcgaaagaaaagtactatgttcatcaaagataacatcacctaacacttcatttcatctattagcagtgacgaagccacttggggagtacgtggggctgtagccttccctaaatgttttgtttttataaattttcatatatattaattatgaaaaaaaaaattatatacaagtttatcaatttgtccccccaaaaattaattgttctacattttgcctccccccccaatttacatattctccctccgtgagtgtctattagtcaaagcttttgtaataattttgtagaacacattacaaagactaacatgcctaaactcactagatttagaaggattatccacttttggaatcaaacaaataagcgcccatttggtatagcttttgaaatagctaaaaattgctttttgacaaaattgtgataaataagtgttttgtaaacagtcaaaaaaataacttgttgaaaaatttatgaagaagctacagtttaaagctaaagccagctcaactttttttttttaaaaaaaaagctatttttgtttaaaagctatttacttatttattatatattacaaaaaaaaatattcaaaataaataaattataataaaatcaataatatttaaatctttaatttttttaatattttatatttttattttgaatatcaacaaaccacatcaccttaattttttttttttttttaaaaaaagtaaaacgttcattgatatagaaaaactagacctcatgatcattacaaaataagtctgccggaatggaagaaacaaacaaacaaccaaactaattatgggtaaaagcccactttgccacattatgagctacaaagttacaagttctgagagtattaaaaaataaacaaccaacaaaataaaaaggtatcctttttataaaaagaggagagttcaccagttcccatctaaactccttgccattaagagtattgatcactactctagagtcgctctccacaatgataaacttgcaacattttgcctgagccatttccagagctaagcaacaagcaggtgcatctccacaaagagcatctacaaaatataatatgttggctaacccacaccagttcaccaaaatggttcctagctataaccgcactacacatgcttttcggccccaatttaacgtcagaattcagcttgagccaatcttgaggagaaggatgccattcctccaaaaatatcggagtaggagaagggatcagagaagctttataatctgcataagagtaatgaatgaaatcaatacaatgtttcacactatctagtttattgttgtgtactttatcatttcggacccgccaaatggtgtcgacaactaattgggagggcatttgacaggatgctccaccaaaggacataatgtcgctccaggactttactgttccagagcctattctagagggaggggcaatgtcacaaagaggagtcatttacaatgcttggataagataggacgatttgcaagaaaatcgcccattactttcctttgtccaaacccatttatcatttccctgtccagaaagagagcccccttttaagatagcacagataatttctttgtcaaaaatgcagttcaacttctgagtgtcccaatctccatgatctattagaagattagctactttactaaaacctcttgctggtaggccattggaatttaaaaaaaaaaaaaaactctttaccatgagagtgtgcataaatcgatccaatccaatgcgaaccgaccgatctaattacaaccgactgctaaacattgaatatccaattgtaatcggatcggattggatgttatttt

SEQ ID NO: 297655 - DNA, 2835 bp, Cannabis indica
tgtaactattgtaagtattcttcctgctattgcggacctaggtgccctggatttaggtggttgggttcatcagtttagctagaagtaaaaggcttgataagttgaccaaaatcagtactgcactcatagatatgtatgcaaaatgtggcgaaatatcaagagctaaaattgttttcgatgagatgcttgaaaaggaaacagcttcttggaatgctttgataaatggattggcagtaaatggccgtggtcatcaagcgttggagttatttttggagatgcaacatatgaaactcaagccgaatgacataactttccttggtgttttatctgcctgtaaccacagcggtctagtagatgaagggaaaaagtggtttgaagcaatggaaggctttgaacttgtcccgcggatagaacactatggttgcatgatcgatctgttaggaaaggccggatgcttggaggaagccgagaaattgattgagagaatgccatatgaagctaatgggataatcttgagctcttttctttctgcatgtgggtacttcaatgatttctcaagggctaagaaagctttggaaaatgcagtacaactggagccggggaatgatggaaattatgtaacaatgagaaatttgtatgccagtgagaggaggtggggtgatgcagatgaaactgaaagcttgatggcagagaatggagcaaacaaggaagttggtttaagtgtcattgaggttgatggtactatccaagagttcgtgtctggaaacaggttggaaccgcattgggaatgtttacatttaactttggggcagttatggaagcacatgacaagttaacttaaactaggaaaggacgggtacgggggtttgggaaaaggtcaggctaattcaactactaaaaaaactcaaggattcatctcattaccaaagctaattcagatatcagctctgaaaagactgaatgccccacaacggaatactcgtggttaccaactttttgaaaattgatattgacgacatgctgatttatccaaagagaagactaacggagaaacaaaagcatgcgaagatgttggacattgggagatatattacaaagatgagcagccaacttatggcatgtgatatgctctctctataggctcctattcaagttttaggtcagtttcaagcgaagaatcagatttcctggatagatgcccaaaaaacgatggatactttgcttaagcttatcaaacatgactgctttatatagctacacattaatgtatcatataccacggcaccccatttttctagctttctgcaaaatgggattggttatgagtttcatgggaggaggttggttcatttacttttttcattccattattttttgtatataattcgtctctttaagcatctacagtattatgcttcggagtccatgttttgaaaattaaaaataaaaatggtcattgctttttttttttttttagacatttttttgaacctcttaaatgctcatctaattttttccttgaattacacactatccaattcctatgacggaagccagtatttttgctactcgttttgtaaacatatatatgtttattttcgttgtttcattgtaatatgtttcttttatatgggaactttgaatccttgatattgtctctaataacatagttaatttgcatcatgatagggtcgttgtactcgcaaatgttggattacttatcaggaaaagtgtacaacgagttcgtagccaaaaatatcagcacccctgacgactttcaagtcgctattctcgacatcttcaagtaagggcttcagaataaattgtttgaatttaccgaaaaaaaaaatactaaaattttatttctcttaccctaatgaaacaattttactcagcactctgaacactggattgcctggtaaacactacgatgtgccaccacgcgatgaagtaaaggtaataaattaattattgtcaaccaccgtaacttatcttgaactgctttaccttcaattttttctttttctttctaattttttaaaatacaaagagtaattatttactatgactaaataattaggagttcttctacaatgtgtggaataaagctagtagtgaagataaaaggacaaagttcgtgaaatttatagcaatgcatgtgaaaccgaacaagatcgatcgcgcaacaatgatcacaggaatagtgacccctccaatagcaatggcagccaaaagaagtggagagaatgttccacagcttaaaatgataaaggccgtccctgacgccttatttgtgcccttcacaacagtagtggctctcttctccgttaagatcaccagaaggtttatcacatataaaccatcttagttatgccctttaaatgtgtgtttaataaaatcattgtcaatgtaaactatttgtattgctgattataaaacacgattggcgtttttttaaagagagaaacatgatttggatttgtaaaaacaaaaatgcatatgttttcaattttatatcattaaatactatatcttttgtaattatcataatttaccgagtagacgttgattggttgaaatatgacttgccacattcaaagcaactcctctcccatgcatccaagattccctcatcgttatcctactcacgaaagcactcatgtatgattaaccattgtaaatagaaaattttatatggtatactaatttttgctatttttttacaaaagtattattaggcagtattttttacttttctgctgtgtttttttataagtttcatactgcagtatgctgtgttaagttttcactgttgttctactggtgttttttagt

SEQ ID NO: 297656 - DNA, 3164 bp, Cannabis indica
agtttgaggggcatgatttggtagatatcaaagtctgaggagcataatttagtacataaacaatcaccgaaacagtaaaattgaatgaaattagacaaaattccttaaatctaacaatcccaatagttcaaggagaatttttaacggccaaaaaaattcagagaacatgatttggtacatgtcaaaattcggaaagaaaaaatcctaattagccaaaaatataatacctttggatgttgttggacaatataggggtagtcttgggcagtaattttctctcatgaataaattctttacaacacaaattacacattgaaggaattatttacaaaatatgattttgttttcttgcttaatttactatttctatttttgtggaagaactatagccatctttacttttttttaccaatataaaattgataaaaattaaccacaatgtatacatataagatcgttaatatatacaagcaaattaaaataatattaaacaggtgaatccataataaatatatatgtacagtaacatttattggtatacgtatttatgatatattatcttagctagtatagatctaaataattgtgtaaaatcttatcttgttttgttacgtacccattaaaaactttacttatattagctattgtaatattattataataatatatatatatatatttatatatatatatataacacatgcacctatagattgtcggtataagccaaaatctttatttattgttttggtttttttcttctcaaaaattgttaaaaagtattattggtgcttagcatttgtctcagtatcaatttgctattagtgtaattaaatattccgttctcatataatttaagaaaatatcttttaaaaaatattgcgctaaccaatcgtgagacgctacctatatattagtgcccaataatactactcttttcgctcccaaactttttagaccgttaaattttttctcgaaatactaaaattattgaatttaaagagttttatcaaattttactaatagttactttacgcgaatgaaagtttaagggggcataattataatcgatcacgtaacaatattggataaaaatttttaaatccaacaatctcaataatttcgataaatttttgacaaattgaaaagttcaagggcaaatcctagttattttattttcattttcttgacaatgtcataaaattgaacaaataattaattacattatttatataatattatttgtacaataatatatattatctcgatcgattattgcaaatatatattatatttcatgtccctatctatacatagtaatacacaacttcattttactatataaagagtagagatatcaatacaatcttcaaaccaattcatccaaaaagaataaaaccatgttgatgccccaagtgatgaacctacaaacacgacctatccaaacgacatcgttttcgaggtcgtttaacaacaatcaaaagtcattattccttcttgagaataataaaataggatcactaagtagtattagtaaccctaatccattgttactagtctcagctggtaatagagctagggttagtagtagtagtagtaatcatagcaaaagagggttatttgttgctccaataaaagctattttgattggaaatattattaacaagttaacttcaaatgttaggcttgttgtgactgttttaccaacccttggtggggttttgactaatgttggtattggaaaaggaattgatgatgcacaagacttttttggtcattcacttctcattgagctagccagtgctgaacttgatcctagtaagaataatatatctatatatatatttagtatgattctatgttatatatgtgagtatagtctcaaacatttgattttgttattatatatgtataccaagtgtgctatatgtaaatatacaggcctaacttgggtataggcgggctggatttgtgccaggcttgtgtctagggctcacttaattcagggttcaaaaatttatttttccttttaaaaatatatatttttattttgaaaaatactatttttttaataagggtctaaaaataattgttctcttatgaattactacatttcaggattgaccttgcctgtgcttagggccaacttagcacagggaaccaaagaagaaaaactttatctttttaaattatacattttgttttactaattttaaaaaatatataccatatttttttttaaacaaaaagcccaaaaatagttttttttcctatgacgagggccagtcctaggtataggcaggctaaatccgcacctaggacccactcattttgaggtccaaataaaaaaaaattagcttttaaaaaatactatatttttaaagtaagggcccaatttttttttcctatgacctatttcaacttaggaccagtcgtgcctatgacccataaatatatgttgtatacactatataaatagataaattgattcatgctatatacatatgtaaaatgtaaaaattaaagtttataattattaaatataaaatttggctataaagtctatattgaatcctctttctcaataagcactaattattattatatgtactttcccttaattacacatataattattaattggcaaatgctatgtttcacatgaagaaagtggatcggaaaggaagaggatcaaagggtatgcacacaaaaccagtctaattgatattcttggtaaggtgacatacgaagtagattttgatattccaaaggaatttggagagcttggggcaattcttgtagagaatgagcatcacaaagagatgttcctcaaggacattaagattgacggcgagggattgcttaatggccccgttaccatcaattgcgaatcttggattcattccaagagtcagaatcctcaaaaacgagtctttttcactaataaggtacgtacatgactctaaaattgttgtctcatcccttaaaacacattttgatgtatttttatgttgtactcttgttaatttgttgttaattttttattatttgtatgattttttgttgttgttttaatgttattttcttgttacttttatgtagttttcttattgtttttatagaaaaccgtaaaataatgtaaaaaaaaaaaactaacttgtaac

SEQ ID NO: 297657 - DNA, 2044 bp, Cannabis indica
ttttttttttgagggggtggaaatgtgtttaaaacttaatttatctgcataataccattttgtttcaggatgaagttatccatattcatagacattgggaaccagaaggtttagggaagatataccccctgaacctgcatatgcaattccatgggagagaaatgcactccttatgtttcatcacagaagaattgcagcctggagcaaagcacagccttttatctcgatctagttggattgctactggctgtgaagatggaactgtaaggttgactaggtatgtctataattaatttttaaaatatgacgtaaaaatgattgagaagctctgctttggtactatatgacttgagaaaaagagcagattgtgtgtattttgcagaacattctatgtaagccttatactcataatgtgtagactaccttccctctctttctgtttttttcttttcttttctttaaaacttgtcaatttctttgtcatgaaattgataaggtgttgcactgattttatgtaatcaactgattattatatgttttacttagatatactccaggtgttgaaaattggtctgaatcaaaattactgggggagcatgttggtggatcagctgtgaggtcaatatgctatacgtcaaggatacacgtgatttcatcagatctggccaaaagtactgttgccctaaacaaagatgatgtgtttgtagagaatatagaaaatccatttcttctgatttcagttggtgcaaaacgggtcctaacttcttggctgttgaggaataggaaattacacaagacagaagacagtacactggctggtgagcagcataatgctacagaaaatggcaattcatctgaagtgtcatcttctatgtcattccagtggctttcaactgatatgccacccaaatattcaagttcagataaatataccaaaagtattgggaaggaaactggtctacaagagaatgtgcctggtatgaaagctgatgaaggtacagaagatgggaaaatggagctgaaatcttgcactagagacaaatgtgaagatgattggagatacctggctgtcactgcttttcttgtgaaatatgctggttccaggtagttggagattataatatatttgtcatgcataccgaattttctccttgaatctgatgccaaaaaattatttgtttcaggttaactgtctgttttgtagttgtcgcttgttcagatgccacattgacgttacgggctctagtcttaccccatagattatggtattaataaaaaaaatctatgttttggttacttaaggattttctctagcatttctctcgctaactggcattcctttgttacattgcaggtttgatgtggcattgatggtgtccctatcatcacccgttttagcattgcagcatgttatcattccaacatgtttgccttctaaaggttagtctattcttagtttaaatcttctagttgaaacgaaacctgtatcccaatcccacagttcattacaatgctctgttactgcccactccacaggttgaacctctaaaaactctgaaccttttttttttgaacaactaaaaactctgaaccttaaattaggagaaaaaatggaaaaattccttagtgtaaattaggtggtctgcagattcttcatttctgaaccaaacacactacccaagagaaagcttgaaatgactttctttgaaagacccactaattcagctttctatctataattttttttgttttgtataataataatgataatgataataataatttgatgatgataataataataataataataataataataataatttgatgatgatgatgatgttgtttatgcatcctaaatgaagtatgtactcgagtcctgttttttcttggtatttctattcctactctcacagcctgtccatgtggaaaactatggcacacacatttcttcatagaaattcgtcaaggacataatctttcactctttaatattaaaatactgaagttatggtagtttgatagttttgacattaccttt

SEQ ID NO: 297658 - DNA, 3163 bp, Cannabis indica
taatattaattcatataatattaaaactaaataaaattaatatttaaaagatagataatctagtcgacagttaggtccaccacagtcaaatataaagtaccaagtgtgtatgatttgtaaataaagagtactaaacataaggtaccaaatatgtatttacagtttgtaaataaataaattaaaaaatattaatacaataaaaaaaaagaaatttaattaattaaaaaataaaaaatataaatattaaaacaataaaaaatctcttcatttgagaaaaattaaaaaaagaataagattaatattttttcgctcaaaacaaataacaaattcaatatttatatttatattatatgtgataaagtgaaactaataaatggatctattctttcccgatcttagtgatctagtagcgttgtgggtatggatcttggataatctttattggcggctaacaatttgaattgagagagcacttaaagaaatgaaagaaaaaaaataatagtctacatatttattttttgtattttatttactgtaaaggtagataaccattaaaaaattttatggagatgataaatgataccaatcggtgaggaaaaaacagacgaaattgacatgtgggtgtgtaaaattataaaagataaaaatgcattgactttagctaaaattaataaagttataaatgaaaaagtaaaataaaatataaatacatcagcttataaaaaataagtgtgtacagtccactggagcattctctattagtttataattatttttttaatttttccaggtgggatcccttcctactagaaagggaggactcaagtatatgccatagtcgatgttgactacttcaccaaataggtagaagcggagcccgtgaatacagtcccctccaagaaagccctagattttttcatcaaaaatatagtatgtcgcttcagacttccacacaagattgtctcagataatggaaagttatttgatagtgatcacttcacctacttctgtaaccagcacagaattgtgaaaagtttctcagccgtggctagaccacaggaaaatggacaagttgaagctgtgaacaagatcctaaagactacgttgaagaagaaactccaagcttgcaaagcctattggccgaaggagcttttgcgacttctttgggcatatagaacgaaggagagaacttcaacagggcatacaccatatttgatgacttccgagtgtgaaacggtcatctcagtagaatctgtagaccgttctcatagacgagacacttatgacccaactcgaaaccattctttactccaagaatcattggatctaattgaatagctctaagatagtcacaattctaactcaagatgtatcaggacaagattatcaagaattttaattctaaactcaaaagtcgtacatttgacgttagagatcttgtcttaagaagagtcttcttagcttcataagaacctagagtagggtcttaggatccaattgggaaagaacctatgtgatacaatacaaagtaggagaaggaacatttcaactcaagaaaattgataagtcaaaaatccctcgtgcttggaatgcatattatctacatcgctattaccaataggctagggggatctgggtctaacattcctttacagttttatgtagttctttgaaaattttctctcaatgtaaaccttcgatataatgaaatgaaaacagaagagatttgcacaataattaacatgtttgtttcccacataaactatgttttaaacatgtgatcacaaatttggagatgtcccaactttctagatcacttgggggtagcatacctagctatgtgccctcaaaaatatacaagtttcttacttattgcctttttgtttgatctttatgtttacatgtaatttgtacttgtacttgtattttactccaaaaagctgtcaaactactggtcgaaaatattggttgggcctcaatacgtcttcaacacttcttcttggaaagaggaattgcttaaagtctattgaatgcccactgtagttttcacctttagtcttgagagcgaagcaaatgcttgaatatagtacgtcttcaaccttccttcctgaaaaaggagaactacttgaagtctgttgcatgtctgacttggttctcgcaaaaggcacaaccaatgtgctttcaacgtgatccttaaaaagggaacattgtttaaatgctattacagttgtcttggtctgttgactacatcgacaagtttcctacaaagagtgagaaaaaagaagcacgcctggaaaccctccgtggtccagcagctctcttataacaaatttgggaaaagtctgtctaatgttgagctagttatgttactctagatgaaggaatgatggttctaagcattaaaacaaacccaacatcgtctccctaaaaggatcctggctaggactttgatacactcttggcctctcttccctcactaatctaaataacatggattttctacaatatctcgcccgaggcaattaacagggaaaaacgtggacagaaggtaagctctgcgacttctatagcaattagggaacaaagcttacaatttcttcgttaaagtttgattcgccaagagcttttaaatggttacgatgagaatactttgacaaaacttaacacccgaagaatgtgcggttttgcatacttcaaaaagtttgataaaataatacaaagtcagaaagaccaaaaggtatcaagtttggtcgttggagccaaaaagcttcacaaaatcctaaaagcaatctactgagtggcacaagcaatcaaacaagagcaaaaaacataagcaaataataagcaaggaaataaagtaagcatgcataagaaaaacggttgtcttaaaagatattactgacgaccctacagttagggcattgttaaaactatttttgcaaaactaaaagtaaagcaattaaaatagaaaaaaagagagttgtttgataaaagtcaatccttagttgaggttagaagacctggaggcctaccctttggaagcctttaagagtcttggatcatagccccagaggaaactgttgggttttgtgccctaaataaaattcatttcaatataatcagatttacttattaatagagatcagaaataacattttatgtt

SEQ ID NO: 297659 - DNA, 4886 bp, Cannabis indica
attaatgatcaaaaatgtctttacatgcgttttagggcataaaccctgccaattcgaactttgataactcgtttctgactcactatctttctgtattttgtaccatgaagacatggagcaaccaaattcaggaccctaaagctgaaaatacacgaatcagtacctcaaaagtcaacctgggtacctagggtttcacctagtgccgaagatgacatcctcatttagggtttcaatttttaggatcgtcttagtgaaaatgggtcaaatgcattggggacataaactataagtgtcatgaacatatttgaggcatcagaatcagatttaaagaaagttcatttttaagcacctagagcacctagtgcctaggcaccaagcgcccaagttgacaatttgtcaatctaggccacatccaagtacgagatcaaaaatttgactcgtacatcttgttcatcttcatgaaaatagtagaaacaagtaacttttggggtaaaaaacgaaacacttcctgggtgccagaatcaaggcccagcgcccaggttaacacttggggctagcccaatgctcaggttgacattttggaaacttggacattttttcgagaaatcttccaggcatattccccattttagcaaagattgagattcaactatttctgaggaccaaacaaaacttccagatggcctaaagttggacccagtgcctaggttgacatattgtcaatataggccatctttaatcagtttcttaaaaaagtgtttcaggtattttttccctcataagaaataatgataatacaagcaaactcaaagagaaaaccacaatcccgagggcctagaaactgagcccagcgcccaggttgacctggtgctaggcctagcgcccaggttgacaatcaacctggtacactagttttgatcactcaaatgcaaattctacttcgagcgttctctccaaaagggtcaaaaatgaggtaggagaccatggtaatgcgcacacccccatacacctttttgttagacaattattctaggcatttactttgcaaggtgaaatcttttggtgacacgcatcctgtacaaatcgtggttccctattgtccagctacttctacgcacgagcacaaaacattctttggggccccatagtcagatctttgcatatattttatcccattagtggacttattgcaaataccctgggcgggtcacgggcatgtccatacccgtcctttagcctataaagacccttctatttccatatgaaaagggatcaaaataaaagatagtcgaggctctgccaaaattactctaacatttcttcttcttcaagagaaaccaagaggccagagttaggctagtttcttgtaaacactattgtaaaaatattatacaagcctcttaaagccaatagactgactcgtggactaaggctcatcaatgcccgaaccacgtaaaaacctttatcttcttcattattgcattttattatttcttaagctcttattttattagtttctgaaaatctcgataaacacttataacttaagaactcggtagctcaattgaatgggttgttaatcataaatatggacatctatagcttctatgtttatctagaagtgaaatgatagtttcttttgagtgtggctaaaggcgataaatgatatagcattcattacgataattatattagtttactaaaatatcatttaaaaggagctaagtgttaaggataaaatacatttaagggtaaaggtaattttagttcctactcaatgtagaccatctataaatcatcattgatttttgtgatcgaaataataaagaatttatagcgtatctatattggaaatatagagcgttctatgtaatcaacagtgaaattttgaggttacggtagagtcacgaggaattaataagttagaaaatttacgtggtaaattttagatcaacttattgagaacttgatttcataaccacatggtcctcatagtacctagggtaatattaccttgatatctcaattatttgatttatttaatcaaataaaatttgaaaattgactttgtcatatttgagaattttttactaaattggattaaattgagaagataagagaaatatagacttatgcgttaattatgataaattagtgtcaaattaatgaatttattatatttaaagttttaatttataattattaagaattaaagaatgatttaaatataacatataatttttttttgaaattagacgaacttttctctctcttgagttttctgcagtttccgaactggtgcaatggcaaaaataagaggtcgagggagggggaaggcgaatcacaacagagcttctaagaataatggccctaatttgagctcggatgtgaggaagacgcgattcatggattccattcttggaatcgaaccgattcttttctcagatgaagatgatacagggcaagaacaacctccaggaatcagggaggattttccagagcctctctccccgaactgcttcaatgtattcaattaagcaccaggagaaaatgcgattggagtttgcacacttcatggatgcttctgcacgatgctcccagagcatttctcaaggtaaatcccctgtgcctcctgtgcttagatctggatcagtgttgagaaacctagagaaatcatattcgaatgtttctggtagtagtaaagtaaagattaccaatgaggatattaaagatgaaattgatttttggaacccctcaattgtttgctatgtgttgggagcaaatcgtccattgtcaattttggaaggttttgctaggagaatgtggaatgataaggttgaaagagcagggctattgtcttatggcatttttctgattagatttaactcgatggaagatagggaggaaattcttaggggtggatacatcttcttcaataggaggccggttgttatgaaaccttgggaccccaaagtcaatttcaagaaagatgatgttagggtggttccaatttgggtccatcttgatgaccttgatctaaaaatattgaggccaaaaatccctttcaaaataatagggcaagttggcaagcctattatggtagatgatgcaacaaaaaatagagaaaagcttagcttccctagagttttgacagaggttgagatgcagcaagtgtttctagatctcattgagtttgaagatgaaaatggtagcaatgttattgtggctcaatcctatgaatggaagccaatcttatgtggaaatttccaaggtttgggacatagtccagctaattgtaggaagaaaattaaagttaaacaagcttgggttgttaagaaaactgaaatggaaaagaagaagcagattgtgatagatgaagagggttttcagcctgtgttgaagggttggaaatctaaggaaattgggtactctgaaccagcacaaaccaataatcattttctggttttggatgatgctatagagaagttaaatggaggagaaaatatggaaaacttgagcaaggataaggagattaacacaggagaggggggagatccttctcctactaatggatagaatcatggcttggaacgtccgaggaatcaacagtcaacaaaaacaactttcagtcaagcaattgattggaaagcaacgaataagacttgttggtctccttgagacgagagttaaggatcggaatttaggaaccttgcctgtgataatgttttctggatggtgctttacctccaatattgtgtggcataattgaggaagaataattgtttgttggaacctgaatactttcaatgttaatattgtaaaatgctcaagtcaactcatccatctctttgttgaaaacatagatagaaaacaagttttttttattcttttgtctatcctttcaatgatgaaattggaaggagtttgtggagagaacttggagaattggctgggattgaaccttggattgtccttggagatttcaatgagatcctcaatcaagatgaaaggataggtagaaatgcaaagtttaataactcgaatgagttcaagagttgtgttgaaacttgccatcttgaagatgtgaagtttacggggaagttttacacatggagtaacaagcaaatgggagaagatcgcatttacttgaagatagatagagttcttccaaaccagaaatgacttgatatgcatgaagctgctgaagttaattttctcaccgagggattatttgatcattcgccaacaatcttgattgtctatgacactattccaggggaaaaaaagccatttagatacttccggatgtggtcttcgcatcccagttacccgactctagttgctgaaatctggaatcagcatgtttcttttctggtgttaaaatgtttcaaattgtgtcgaaattgaagaagctcaaactggctttttgaaatctaaaccataaagcttatgctgacttacctgctactgctgctgctaaggttgcaaaaaacttggaatttcaacaacaactacttcaccgagatccactcaatgaagggctgcagctacaagaaaaaaattaagggaggattatgctattatatagaaggattacttgtcttttcttcagcaaaaatctaatttgagctggatgaaagatggtgattcaaactcaaccttcttccacaattgtataagggcacgaagagcacaaaacagagtcttatctatcactaatgcaaccggtgtgagtgtagatgaccctcaataggtatataatgctttccttgattattatatgaccttattgggtagcaagctgcataacaagaaacagatagtgttatctgtcataaatcaaggccctataatttttggacagcatgttgttgttgggttttatg

SEQ ID NO: 297660 - DNA, 2883 bp, Cannabis indica
ccaccatctcccacataatgctttgcacaagctgcaacattttttctgtgaaacagagattagtgtgagtatttgcttaacctatcacttagtgttctgtcaccattagtgctcagtattttctcgaaaaataagtttggcactctatattttcgataatacttatctggtagcttgtattttaaaattatacatatttagtaccctaaagtcaaatttgatcaatttgactaaactagtgtcaattatatgtaattaaataattaaatttaaaatcatataattaaagatagtttgattgatcaaatctgaattcagggtactaaatatgtatgatttcaaaatacgaacttactagatgaacatttattgaaaatatagagtatcaaaattgtatttagataaaaacacaagataccaaacaagtagacacttattatttaattataaaattttaaaaatggctaaccgatctttcatcacattttctatcattattctgttttataagccttaatccatatattaatggaaatggaacaattatgtgtgttttcttgataaactaatgcctaccctattgtctcttgcaaaagcctttattgtacttttccaaaacaaataatgatataaaaagaatattaaactataaaaaggaaaaataaactacataagaacaattttaaggactagtcaaactttaaagcttgaggtatacttttcaatattctattatttttgttgggtatttgttcccttctagattaaaaggactccattttcatacattgtctctagctattttttccacaaggaccacttcaaagcaataaatgttcaaatcttataaaaaagatcttgacttgaaatgtaacaatcaaattgcagtcaaccattacagctttgcacaatcatttttctactaagtatttttaaaggtccaaaaagacactagaaaaggaagaaaaaagaaactatatactaaaatttatgacatattttagagtgtgatatgtgaacaaacttaaattacaagcaatgactatacacaaaaatttaagagaacaaagttagaatgttcttactgtccagcaacataaggaacacccttctgtgtgttaggaggtaaatcgccttgtaaacccggtataatttcggtcattgccctaacaatcttgggatcttcactgtaactttcgaaacaacgaccccatctcggatccctacaaacctgtacaaacatagtaagttagaagaagactaaaacataaaaaaagttcttacttttttgtgtgattcgggtcggttactaaccgctatgcaaggtgcaaaaacatattggatgcctgtagctctaacttcaagagctgttgctgctccaatcctcttaacaagttgaggatctctggtttatgaaagtaagtttcatgataaataacagattatgaagttttatgacttgtgagatcatcaaaatgttttgtttagaaaagggtaaatactatttgaatcctgtattatataaaagttatcgattgtactctttattttgttaaacgacaattcagattctaaattcttcaaaatagtataaaatagtatcctaaaatcaataacttttgtaaaatacaggatccaaaatttgtaaaacacaggatccaaaatagtattagtatttacgcgaaaatgtatatgcttttaccttgtagcacctaaaccaacattgtgggggaaaattgtggctttgtagacattgttatggccatgaacagcatcaattccataaatcattggaatcccaagacgtgtagataaagatcccttttgaaaatcattaaccatgtcaatccaagtttctggtgaagctttcttagaaggaacacttcctcctccactcaaaacactacctgcaatcaattcacttagttatgtgtgttttcaatggaaaaaaaaacagaacaaagatagtgttgttgtttttgtgttttattaccaataaagtacttcttcatgacctcattggaagcaacagttctgtcaatttgtgtcatttgcccaatcttttcctccacagtcatacgcttcactaagtcatttattcgaacatttatgggttgttttggatctttatacttgtagtaactatctgatgcatctgctatggctaaacacagaatcaacagaagaaatccccctacaaagttgggtaatcttgccatttttgactgaataacacaacaacaaaaaaaaaacagatttagacaagtgttactcatcagagaaagacattatctttatgagtttataggacaaaaattgatacaaaagtgtaatttttttatggcaaaagaagaaaaatcaaaaccccatgtaaagaaacagagaattatacaaaagagaataataaagataaaaactttttgagtctttatatgatataatcattacttagtttcaaaacttgcattaactaaaacaatgagcataccttaaaaatggcttctttacttcaaaaaaaaaaatgtgaagttgtaaacttgtgagaaaagtttatggattgaagcagaatttatagaaggtcaattgtttgaagattgaaatgtgatcttctactctacactctttgtttattttattttatttatttattattaattgtggggtgaaagaagtttggtgtaatggatctaaaatggacttataatttggatatttttggatatagtggcctagctgtcacatcaactaattcgtgctatgcataacttatataaatatgataattacataacttatataaatatgataattagtgaaaaataatatgagtggttactcttatttttattagtgtaattaagtattagattttatataaaatta

SEQ ID NO: 297661 - DNA, 3668 bp, Cannabis indica
cacaaaatttattcctcctctcaactattttaatgaagaaaaatagaaatgttaccaaaagtctctcaatattcatacgtatgctctcatattaggcaccggcaatttacatgattcacgattttaattagataaatttttatttaattatgatttcaaacttaaagaaaaatcctaaatatattgtcaactagtacaataaattttccttaaaaagaaaaaggataccattgaggtgaggaatgacaatgaaacagcagttgtctaagaaggtggtgctaaactgttaaaaaaaataaataaaaatatattattggggttgataatattttcattaaaaatttgatgtgaagagagtgaaaaccaaagtagggttaattgaatgaagaaaaccctgaaagaaagtggtccaaaagtcttaaaaaaaacagtttgatatttaaatttacataagctacttcaaattaaataattgggatgtaggccaaaagggaaaggaaaagaggaaagaaatctagttagggtttctattctaaattaaatggtatggtaggttggctcacagttcagatcattaatgcttggaagtttggtagaaggatggtactacggacagttgttagttccttcacgctttctaaatagtttcttcaattattaattattattattattttaaaagaaaataattcagtttaatttctattttcattttgcttttattaaagaagagatgataggttacccaccactccatcttttcctgatttctcctcctcttagagcttatccattgccctcaaaatgaaatttaatccaaccctttatagcaaaagacaaactacaaaagaatctaaggcttttcattaaatatagagaataaaacccaagagattagaagaaaaagataatgagtatgccataggataaaatacttgttagaaaaaaaaaaagactgtttgtgatccaaggaaatcaataaagactagttcttttggagaatctttttaagaccatagatatgttttgttcatgaagtgaatcatttggacatttttaaaagaaagatattaaagaagaaataagaaagaaagaaaaaagccatcatttgttttttgaaagagattatataggaatatgaaagaaacacactcatcaatttcttctctcttattttccaacaagcccgcttgttgtgttgtatgtactactatactctctcaggtattgagtcttttttatccactgttactttatatgtatctatattggtaccaacaaaaccttttgaggatgacaacaataatagaaagaaaataaaaaatcaatctccattacacttttgcagattcatgatattgaaagaacaagagagaaagaaagaatgaaaaaacaatcgatattgtaactattgtaagcaaatttttaaaaaaaaaaattaaaaatttaaacaataggaatcaaactgtactggtagtggtactatactattataaacagccatacaattagaggggaaaaggtaaaaaataaaataaaaatatatgagatgagagcttttcaatgaattaacaatcttttccattttctaatttctctccaatattctgttatatgctacataagaacactccccccaacaaaattcctttttttttaataatgatagtattttattattaataataattattactatttcatttccaagcttctgtaatccaaaacaccagatttcaaacccaagaaatcataaccaacactggtgcttgggttattgctatccatacttgaaattgtacagcaacactctttactgttctgcaaacccaaactacaggcgaagcagagagaagcaccgccgctcttcaattggtcaggctgctggcgttgttgttgttgatgcggcggataaggagggctaattcttagctcaaggttcaggtcaggacactgttcttgatgaactgggtttaacaacagaacacttgtcgttttctcttcttctttaacaacagaagcaccaaatgatattgtggtggttgtgttggtaccggcagtggtgttggtggctgcggtggcgcttgtggtggtcgaagtattagtcgtctcttgacctgactcgttcagtggtcggtgtgttgcagggtcaattcctctgttcaaaagctttcttcttatgtgggtgttccagtagttctttatctcattgtctgttcttccaggtagtcttccagctattaaagaccatctgtttcagaaatttcaagcaaaacccattattacttgagtggtgaaaaacaaatttttttaatttcaaaatcatttcttcgtgtgagaaggggaaaaaaaaaggaaaaaagcttacttgtttccaaggagactatggagcttgatgatgagttcgtcttcttcttctgtaaagtttccacgtttgaggtcaggtctaaggtaattaatccaacgaagtctacaactcttgccacaccttaggagaccggcggctttaggtagtgaacgccagcaaccctcgccgtgagcccttatgtatgcaataagtcgatcatcttcttctttagtccacgctcctttgtttgtgtgagctttctcacaacaaggagaccttcccattgagcaggagaaagaagaaatacagaactgaaaaaattagttttctttccaaattaaaaaataaacactttctcttttatttttttcttctttgtttttctttttagcaggagcggtaggaaatctggtggccttgtttttgtgttgctgaaacattaaggccggcccttgggaggacttggggtctgattttataggcttttgactaaataagagagagagaaagagagagaggagtgaccctaattgcttctagatgcgagttggtgagacaggttagagggagtggctggtggcctctctcacttgatgatattagcttcaatcatataataagttaaagagacattaactacgggtaacctccaggtaggtgtaaagtaaggtatattaaagtacaggcaagacaaggtgtgatttctgcctttttctttttctttttttttcccctttatctatctaatctctttatatagccaagttattttagattactaattttaaatctctttatatatacacgtagaatgcaattatcagccttgtcaatttgaaactattattcctaatcaactgttttgtagagaaaaggtctacctcaatttgttcataatatctctttatttttttcactcttaactggtaaaagttacctaattatataccggtttctttctttttttttttacttggcattgattacagtttacattggctttacataagtctaaggatgttgattgagtaatgagaagagtgaaaaagtttataaatttttaaggcgtggttaaactcaatctcaaaccaacatgtggtatattaaatttgaataagaaaatcatagctttgcttgtatggtaatactaaaaagaaaaaaactatgttattttagtaagttagttgtggtgggcatttgggaaaagaaacgttacaagtggtttggctattcttatgcacaagaatagtgatggtagttctatttctttattgattgatacactatcaagcaagagagagagagagagagagtagtagta

SEQ ID NO: 297662 - DNA, 5723 bp, Cannabis indica
aagcccagtccagtccagcccagccctgataagcccagtccagccaatacccatttctttgattagggtttcatatcatctttctcataccaaccaagaaccgcctgctcttctttgattaggtttcattttcttgtatcgacgaagaagatttgaagaaaattttcggttatggcgtcctatgccaaacccgagaatgctctgaagcgcgccgaaggtatgtatatatttcttcgtgtaataaattaattttctagttttgtataataatctgaaattggttgcggtcgtaatgtgtggatacagagttgattaatgttgggcaaaagcaagatgctctgcaagctttgcatgatcttattacgtcgaagaagcatcgggcatggcagaagccattggagaggattatgttcaagtatgttgagctatgtgtggacttaaggcgtggtcgattcgctaaggacggtttgattcagtatcgtatcatatgccaacaagtgaatgtgtcttctttggaagaggttatcaagcactttatgcatctttctactgagaaagctgagcaggctcgtagccaggcccaagccttggaagaagcactcgatgttgatgatcttgaagctgataagaggcctgaagatcttatgctaagctatgttagtggagagaagggaaaggatagatcggatcgtgagctcgttacaccttggttcaagtttttgtgggagacatatagaaccgtgctggaaattttaagaaacaactccaagttggaggcactctatgcggtaattattagggctttatctgggtttgtcttaattgttagtctctgctcaagagagatgtacttgtagaaattgagggttttattcttatccttttatctagggactgcttggttcttgttacatgtgtgttgtttgacaaatattcatcttttttgtttacttgccatccttattacattttgtagttttcgattgtgctatctaatgaaaaataacatatggttgtttattgttatttatctatagggctttctattccttcactagaatttagtgtcgaagttgaactgggtttgtcttaattgttagtccctgtagtgctgtttggtgctctagaggcatacttggctgtagaaatcgagggttttattgttttgattttatctagggctatttggttcttgttactaatttatatattgttgggaaactttgatcttttttttgtttatttgccatttacgcattgcatttcgtagtttgcgattgttttatctagtgataatttatatttggcagtttattgttatttatctatagatgacagcacaccgggctttccaattctgcaagcaatacaaaagaacaactgagtttcgcagattatgtgaaattattaggaaccatttagccaatttgaacaaatacagagatcaaagagaccgacccgatctgacattaccagagagcttgcaactgtatcttgatacaaggtttgagcagctaaagattgccactgaactcgagctatggcaggtctctgtgaagtacttttaacgataagcatatcttagtcagattaaacttttgttgtagcagataaattatgttatgagataaaacttatgcctacttatcatgaataatatttctacaggaagcttttcgctctgttgaagatattcatggattgatgtgcttggttaagaaaactcccaaagcatcattgatggtggtttactatgccaaactatctgaaatcttttggatctcttctagccatctatatcatgcttatgcatgggtcaagcttttcaatcttcagaagagtttcaataagaacttaaaccagaaggatctgcagttaattgcatcatcagttgttctggctgcactttccgttcctccatatgatcgaaggcgtggtgcatctcatatggagcttgaaaatgagaaagagcgtaacttcaggatggcaaatctcatagggtttaatctcgagcctaaatttgagagaggagaagtggtatttctttaacttaagtagtcgtttttttttcatgtatcatcatacattcactggtctgataatgtgtttttgtggttcagctttcaagagcatctcttctgtctgaactggtaagttccatattatttgtagcttcatagttcccttcatttttcctttcattatgtgtgtatatatatcaaagctttggtagtgatggttagtaagaagtaatattttttcaccatgtgttgcttttaattccatttaaatttcgatgcttgcgaattccaataggcagtgatgcagaaataagtatatcatcattttcttttattttagtaggtcattatattgcttctactatttaggtgtttttccggaacactattatttatgtgtatgtatttgggatatagtttctactcatatatagatctgcacgctgatatggtcttacttataggtttctaaaggtgtactaagctgtgcaacccaggaagtaaaagatctttacaaactgctggagcatgactttctacctttagatcttgcattgaaggtacagcctttgctggcgaaaatttcaaaagttgggggtaagctgtcttctgcttcttctgtaccagaagttcaactgtcccagtatgttccttctctggagaagcttgccgcactgaggttgcttcagcaggtatattaatgtctttatattcatattaataggattgttctttattcgatcttgcattgtattaaaattcatcttgtcttatactcaaattgataggattgttctaacatttgttattttttgtatgcattttcaggtctctcaggtttatcagacaatgaaaattgaatgtctatcacaaatgatcccattctatagtttttctgttgtagagaagatttctgtggatgctgttaagcacaattttgttgcaatgaaggttgatcatatgaagggtgttgtactctttggtagccttgtaagttggtcctagcttatggttttaatttcttttatttttgttttttccttttggaagattgttgtactttttggttgatgtatgttactgattttgtccatggcatgagagatcatacttggatgtagtaatacaattacctaaaccattcatttttgtaaagggataatagattgtggtttttgttgcttttactttattttctttatgtccttatcttggagaaaactgagggaaatttatattcctacgaagagcaaggaatttgttttaagcgcttgcttgtttatactttgaacggtgtagtacttggtgtgtctgtgtttgtgtgatattgcttgtatatttctttattatttgttggcttctgattttgtacttttcgaattgggtcttcagggtattgagtcggatgctctccgtgatcacttgaccattcttgctgaaaatttaaataaagcaagagccttgatttatcctcctgctaagaaagcatctaaattgggtgaagtgcttccttctttagctgatgttgtggacaaagaacataaaaggcttcttgctagaaaaacaatcattgagaagaggaaggaggaacaggaacgccaacttttggaaatggtatgcatttcaattttgctacttcagccacaggttttaaatagtcttttattgttaaattaatgaagtttaagtaagaattgatcatcttgtctttgattaggaacgtgttgaagaatcaaagaggcttatagagcagaagaaaactgaagaagcagagaagaagaggcttgcagatgaaatagagcagcgaaaaattttcaggattcgtaaggaaatagaagagaaggagcaagaagaagctcaggttctacttcaggagacaataactggcaagaagtgggccaaaaggattcttgaaggagtgagttaatttgatttaatgtaattgttgtccttggtggagcgatcaatcttaacaaattaatttcttgtacaggatgaaaagatttcaaaacaaaagttgatggagctggcattgactgaacaacttagagagaggcaagaaatggagaagaaactgcaaaaacaggctaaaacaatggattatttggaaagagctaagagggaggaatctgcccctctgattgaagctgcgtttcagcagcgattggtggaagagaggattcttcatgagcgcgaacaagaggtattttatctgggattatgtgcgtgtgtatatgtaaatcttaattaagcattacactattcttgtattcacataagttctttttactctggtttgcagcgggagattgtggaaagcaaacagcgtcatcaaggggaccttaaggagaagaatagactgtcacgtatattggattacaaggtttgtttgaaactctacaattctacaattgatttctccgagtcagaatatcaaacactgttcttttcttctgtaggttatctttcaagaacgggtgatgagtcgtaggcaagaagagtttgccagaagaagagttgagcgcgaggagcaaatcagccaaatgattcaggctcggcgacaagaaagagagattttaagaaagaaagtattttatgtgaggactgaggaagagaggctgagaaagcttcgtgaagaggaggaagctcgcaaacgtgaaggtatacgtcataaaagaatattggttaaagaaatttggtgcatttctttttatcatgctttggttgtttattttattgtatttaaaatatgcagaggctgaaaggcgtaagaaagaagaagctgaacggaaagcgaagttggatgagattgctgaaaagcagcgccaaagggaacgggaactagaagagaaggaaaggctgaggaaagaagctttgttgggtagatcaaccgatggactttctaagccctctgaacctcttgctgctacccgtgtgagtgagaccacagctcccgctgctcctgctactgctgtttctgctgccaatggagctgctgctgcaccaccgccatccggtggaagatatgtgcctcctaagctgcggaggcaaggtgctgagagcactggacaggcccctcctccagaaactgaccgttggggtagccgacaggatgatcgtgatcgaccctctcaactgcctggtgacaggtggcgtagtggtactggtagtgatgaccgaagaccttcatttggcggtggttcgagatctacttccacttggtcatcgtctaggtcttctcgtggtggttcagaccgttgaggacatgaaattttcgagtgttgtatttgcttgaaggtgggccaattttgattgatcatatatgcatttggacgctctctctggtggacccaagataataatttagtaatttcagacctgttaaaaagtttttcttttttcctttgattttctttgccatcttttcaagtacctactctactcatgatattggaagctctcgttgtaatcttttgaaggagttaactgagtttttattataatttatttgttgttcttaataactaagaaggatattattgtttgtcaaaaaaaaaaattcctaaaaactgtaaaaagttcacatttttttgtatattttttaggtttttacatgactaaaaattttttatagccagaaattatttgtggagatacttaagttttagtttttttgttcatgaaaaattgttcttgtttgca

SEQ ID NO: 297663 - DNA, 4802 bp, Cannabis indica
tgatgcaagcagctttaacaacagtgtagctgatcaacaagtaggtctttgtttctctaccaaatttccgtaatacatagctttattattaggttaaacagtatgattcatcgctatacggctgcctaaatagatcaaagatatcttcatagcttttgcatttggggttctgcatatacttaaatgtttaaactgtttttttccactgcgttacccccacccccacaaaaaaaaaaaaaaaaaaacggaaggaaatacattttaactgtgttaaagttgtttcctaattttatgtttacaggctgttctggagactgtagccaaaatcactcatgagaagggcaagaaaaatgatacacaagaagccaagtatgggagtttttcaatatgaatcgcactcctggttttattatttttgtctaatgactaatttattttaaggtgaaattgtacgagtctacttctgcttttccataagtaatagtatttatcttttcagtggcacaagatctttccagctgcaagatgttttttctttggagaatgaagactctgatgacatgacaaccttgattgataaaaaggtaataagtgaataagtagtgtttaggtgtgtagaagaaagttctgaggtatgacagcacttgcgatgtttttgtttattcttacatcacttatttaatgacaggataatgtgtttgtcatgtcaaacaagaaatccaagtttccaattcttcaagtagatttgaggtacattttcctgtatcttcttaactctagtttgttttttttttaatgatttgactatagtttctttaatagttctagctttgttcacaacttgaaatatcattcataaatgctttagggaacgagtaattgaatgtttgtctttatgtgtttttcaatggaattagccgggggaattcgacctttttgtgctgttttgaaatgaaagtaatatcattttgaggttataacaagcaaaaatgaaaactaaaaagattgattgataaattttaagcaatatctataacaatcgttaatgagatggccaaagaagcaaccttccctttcctatattctggaactctaatggtttctgaactgctattaggtttgttattattaaaaattcattttgaaaacattcaagggttgttacattgcaaagatgcttcaatagctaacttctataatttatgggaactgacatttaaagcctggcctgaagtttctttctcctattaagaaaattgtgttaaataagtcctttgaaacataggttactttttttttcttctacatttttactaattaaagtatatgctttgttgtttatctatatcattgcagattaatttccgatttggtggttgttatagtttctgctgccattggtggcattctgttttcttgtttgggacaaccggtttgtttttaaaatcttcttgtactgtcgttcatgcttgtacattttaattgatatttgatataaattgaccataaccatagcttgagatttttcttttttattttggacaaaggttattgtgggttatcttcttgctggttctatcattggaccaggggggcttaaattcattagtgaaatggtacaggtgtgttatagtgtatcgcctctagacaagcttccttttctttctctttcccaaaaccaatggtacacctttctccatgattggcgttgagggtaccacgttttcagttaccatttatcatatgtttctgtttcttgcaggttgaaactgttgcccaatttggtgttgtatttcttctttttgctttggggctggagttttctttaacaaaggtttgtatagagtatattgtattaagattttttaaaataacacagctgaagtggaatataggaaaatttccttcatctgaaaagctcattaatgcagctaaaagcagtggggcctgtagctgttataggaggactccttcagatcataacatttatgttcttgtgtggagtaactgctatggtatagtgctgatagtatttaaatgtttcaattcttctgttaagtaattccataatgagtgttgcctgtcaaaactgactctaaattactacttatctgccaactttgcagttatgtggggcgaagttgtctgagggtgtttttgttggttccttcttgtcaatgtcatcaactgctgtggtgtgttgtagatgcattttccttttctctttacttcttgcctgcaaattactggatgcaagtccttatttctcttctcatacactcttttgccaggtaataaagtttctggtagaacggaatactaacaattctcttcctggtcaagttacaatagggacacttatttttcaggtatcatgtactccaaattttgttcatatgtatgtggctcttaatatcaagttatacatgtttttgattttttggctcatcctgcattcatttataataatggagtgtttcaggattgtgctgttggtttactgtttgctttgctcccagttttgggtggtactagtggccttttgcaaggaatgatttcaatgggaaagctgtaagttgtttaaacattgaagtgtttatttctttcatgacctttataacattttttgtagctatttttttaattatattccataatatatttttttattttctattttgctggaatacgattagaatcatgttatttataggctaaggctatatatttctttcattactcttttatccaaagtcagtccatcaccccatataggtgctatttttcctgtctgcagcatatctctttgtctggttggagaagcaaacagagcaacatatgttgtatctgcttcctttatcaaatagttcttacattaaaatttatatatatatatatattttaatatgtgtgtgtgtatatatattatctgtttatctatatatatgaaaagcagtagcaccctagatgagaactattgaacacactttatctattatttgacttcaggatgctggtattatcaatttatctcacagtggcatctctgttgtcctggtcatttgtaccctgctttttgaaactgatgatgcagttatcctctcaagtaagttttaaacagttaccagagaaagcttgtctgtctttctagatggaccctatgattgatcttaattcattttgaaccagacaaatgagctctatcagcttgctgctgtggcattttgcttattgtcagcttgggtaagtaacagttgttcatgtcaatggcaataaccattaatacatttgaattcgttttagttctatttaatttacttgtacttttcaagatagtcatgtatgtactaaatactgtcatcaattatctgtaagtgagctaaactgtagctagagttttttgaagaacagctaatttttatgataagataacctagatgtatggttttataagtggtttaaacttgttggaagcttcaaactttaagccttttcatgagattagaaaattctatatgcctcgttggctttgagcaaattgaacaacaatacttctctttggaatttctaacatatgaattctctctaatctttcagtgcagtgataagctgggtcttagtcttgagttgggctcttttgttgctggagtcatgatatctaccactgattttgctcaacatactttagatcaggtactattctggtttctaaagtatctactttatatgctgctaaggtacaaaattcaatatgtgaacatatggatagttggttcaataacggcttgaaaaatttcataaatggattcatcttcttgtgaggactttgatttccacattagggttttgctgaattctaatttcgtatttgttttacttaagtttcagtgaaatactttctaaaatgcagtttccctacattttaggtggaaccaattcgtaatttatttgcagctctcttcctttcgagtattgggatgctcattcatgtacattttctttggagccacgtggatatacttctagcatctgtcattttggttatagttataaagacggctgttgtcactatagttaccaaggccttcagatatagcatcaaaacatcatttattgtaagttaattatctacttttttagtgaatgtttttgttcataggtgaactcagattcctgaacccccttctccaacacattacccccaaaatagaagagatgagctttacttggcaaattaaaaataaatagaattcattgcgttttgttacaatatgcaggtaggaatatctcttgctcaaataggagaatttgcctttgttcttctcagtcgtgcgtctaatcttcatctaattgaggtaaccgctctctgctgttgtcatatgcatatgaatatggcttggtttgtggtttacggaaaacaattatgaaacttttgtttatggtcatatgtaaacacaggcacctaaaggaaagcaattccacttgttattgctatcttttgtagtccttttctaattctctcttttctattgctgttttctttgacttgatttttgtagggaaagatgtatctgcttcttcttggaacaacagcctttagtctagtaagttgtttaaatgagagtggattatggctcttttgctggtctatatgaagaagtccttaccctggtaaattatttgatttacaggtaacaactcctctcctattcaaattgataccccgctgttttaaatctgggagttctcatgcactggtttcctccgtagagcaacattcagattgaggtctctctctctct

SEQ ID NO: 297664 - DNA, 2072 bp, Cannabis indica
aaaaaaatgacaaaaatattaataataggtattgttatgctcatatttcgagccataaatatggatatgacacatgaaaatttgggcgtgagaattgtggaaaactcggtaataataaatgaatcatcttgaagggataattgattacgatcaatatcagtctcgcattacgcagtaagacagtgagacaagtaacgtatggcgagatgataatgatagaagtctactcgggtgtaacaaatccaaattgtattgttggaaaaggtagataataagttgtttaagaacttctaactcattaacccacatacttgaatgattaagggaaataagaaaaatgcaacttatttcaaaatcttagaagactaagtctaagagttgccctggaaaggctatagcgagaataaacatattaacgagcatctcgtaaaatgcgaccaactatccttgaacaccactgaaagatgcgagccatccttggaatgtgttacctcggcaataaaagacttccaaataagatcaaaagattgttatcagcagttatttcattttttcaacttgttgtaaacataaaacgtggggattgcccacatttcataaatagttacctagatatgatcgaaaagaataactgtcatagtaaaaaaaaaactcctataaataggaactgaaccttagggaggggaatccatcattttgggaaggaaagatcctgtgagattaaataaatactcatggttattcatttgtaatccatatacataatcacaaaatactcagaaataatagtgactcatggagtatgtagattttaaatacaaaatgacgtaaaaacttttagtgtttcatatatatttattaattaaatataaatacttaacttttatttacaaggcttcatttattgttaatgagagtatgagttaacaatttggtgctttcattgagagcatttgtaaaaaaaaactcaaaacacatctcctctttatttcattacacctttgaaaatactcaacacgacgagctagtcgtggaagaagagataacatgtcgatcaagaaaagaaccccagggggcacaaacttagaccactcaaggaaggggtcctactgagaggaactctgatagaagtgaccctgagcaaaaaaattcgtgagagaagggaatcagatgcatatgaccccacaagatatgttcccatagtggaaattcgtcaaaggctcacagaatccaactgaagaaatgaggagttaaaacgagccatggctgcagccagaatgactcaaaacaatgcaccggttgtgcaagaagagcaacctgcacgaagaccgtgcggaaggccctgtggttcacgaactatactagaagggcacaaggacccaacatcaaagaacatgagctaaatagtcccactcaaccccaggagcaacaaccaaggaatacaagggacattcctgttgatggatgaggtccccaaaattagggtgccacaacttcgaggcaaacacgagcaaggggacaacaaaagtctcaaagaagtaatgaaaatataaatgatcaactgcctaaccgatgtggtcgtcctccaagtccaccacaaggacataggagagaagaaagcgacagtatgtatacatacttgaatagaggcagattttccccgcccaggggagtctccacaaactaaaggaggtctctcctttcccaaacagtgtctcttctcacctaagggagcaagtttggacctcgaaatttactaagtgtaaatttgaagtgttcaccctcaaaatttactaagtataaatattagagcttatccttatatgttttgatgcccaatccaatagttaacacacaaaggaacccctttcccctctcttccttctctcttgctctttctccctcaatctccacgggaaggtagctacacgaggtgtgcaagctcctcgccctccttctctctctttgtctcacggggagcacatgggggagtgcaagctccctatccccctttctatctcttttgtctccatggagagcacacgggggatgcaagctctctctctctctct

SEQ ID NO: 297665 - DNA, 3073 bp, Cannabis indica
agacccaaatcaaggtatatatagcactaaataatttagagcctaacaacccctagcttatccgatctatatatgtaatatgtatatatgtatacatataattaattttactttctatatattttcttttttctcttatgtctaatacacagttctttcagagcaaggatttttcttggaagcaggaagagaacatcatcaccacatttacaacctcagccaactcccaatgctacaaagtttcaatcaatggcctaattcaagtttaatcaggtaatttaattaatatatatataattgactccataataatcagttttctctccaatatagtctaattctatatatagtagtatgtatatacgtatattaattaggtgtttgtttttttccttctctttcaaattaaaatgtagatcctcatatggtgattcttcatggagatcatcatcaggccgtgaccaccagatttataataataataactcagttagggctgctcttgacagtgccaacaacagatcatcatcatcatcgtcatcagtacatggatcagttcaaggattcaattacggctcaattgcagagagattattactcagaaataataatcatagtaataatacactgcttattacgagtaataatttttcatctttgaataatagtgctagttggagatcaatgcagcaaggtcatcatcaaaacgaatcgcttcaaagatcatcatggccgagatcatcatcatcaacccgattcggtcacaccacatcatcaatggaagatcatcatcacaatcataataatatcgtgccaaagaaatctcatcagccgtcaaagcaagaaggtgataatattctgaaaagaaaggcattggattctgatcaatatggtcatgatgagttggatttggacttgtctttgaaattgacaccaaataatagtactaataataataaagagagaattgggggtggattgttagaaatggatcaagaaatagatacaagcactagtttgggcctttctttgtccccatcttcgtcctcaaaacttaccaagttgaataatattaatggaggtggtcatgttattagaagtagcagtagtactggtaatggtagtggtagtggtagtggattaataatgaataataggaggttaatgggaacgagtactcttgatctgactttatgaatgagacaattctgagtgagatcttgaggtacttgtttccagtatatggggttaatatagatcattatttgatcatcattatatatatattatttgtcatcttgaatgtgtaacatccatctactctatatagctaaattacaaggtataacagtcatccttattttcactgttttcaatatttgtttttgtatgctcgatgatatatattatatgatatatatgcctttcaaatgatgaaaaccgaggaacatgcatatctatcggttaatagtataaatataaaataaatatttttaaaatttatcaacagaccactatctgcatatatgtgtattttttgcatgaactgtcatttgcttaaaaatataaatgtaccaaaagggacacttttgtaatgattgcaataatttggagtattttttgccacacaaaaatgttcgaagagtacaaattattttaggagaaaaaagttgtttctcttacaaattattctgataatatataccaaaattattgttttttattttttttctaaaacacacacatatatatagagaagaaaggaagtatatatacatatatatatatatatatatataagagtttccattacagttttggtcatttattccgatccagtcaatacttggattattcagtgttctcatcagaatgaaataaataaataaaagattgcaaagttttgttttatgtaaattaatctatgtatataaatatatatattaataactgtgtggctagagagtaccctagagataatttctccattattttcttgtgttttaataattaagtttatcccgagctcgaattacatgatctcaatcaaggacaaagatgctatatattatatattcatttaatgaatagagtgtttttcttttgggggggtacatatatatgtacgtgtataaatgaatcgaagtaagctagctaattttcgagcacacgagatgtacagtttcttctcgaagctctaatagacattccagtttcatttaacccacaggcaatgacaaaactaactttgagagaactttttgaaaagtgaaatcttgtcctgatcaaatattatatataaatatatatattaaatatgtaactgtaccagagcatatatatatataatataatttcaaaccttatattatatatatttccatatactaagacaaaaattcttgagaagcaaattaattgatgttagctctagtctatacctagatagaagcctagctagtaagagtaatggagactgtagatttttctcaaatattgatattggtttccagttcctctgcgtctctaataaacgataccacattttgtaaccatcttattagctaggctaaaaatctaatttagggaaattttatttcctatccttaaataagatctctattacaaaaaatactcgattaatttttttatatattactattttgataatatgagattatatttgcactctcaaaaattataattacaccccatcactaaattggccccaattaaatattattttttataatcccatcccattctatttaccaaaaaagtattattttgtacaccccaaaacttctcattttatgtttttattttattttattttattttcttaaacaaaatttctcagttcgcaccattaaattttgtgcattcaccaaattgcaactctctgcctttggttcaccaaatttacatcctcctctaagccaagatttttcattgtaggattaatataaagcccaaattacacatatgtatccactgtaaaataaagatatgcatatctattgggcattttacaaaaatactgaatttggggtaatacttttcaattttactg

SEQ ID NO: 297666 - DNA, 2141 bp, Cannabis indica
tatatatatatagaatatatgcatttgcacactcaactcaactcaataaactcaatgatgctctatcttcttttcttttcttttcaacaaaaagaataacaaaccatatgcatgaaaaaacattcccccacccaccaacattaatttagtaccatataccacaatattttcattttcaccaaaacatttcccatttctcgatcaatgcatcaaataataaaaaaaaaaatgaaaactacattatgtgtgattatgtaaaaacaaaagtactcataataaccttgaggttgtctaatattcatgagttgagttgaggagatcaacattttaagtgacagttgtctatgtcacacaaataataaaagagagacaaccctaacacacgagcttagatttttgattataattgtttgactacgccaatttggttaatatattaattatatataatgttaataggataattcttgtgtacttatggagtagtatcccatgttataaataatatataaaaaccattttgatatattgtacttacagatggagttgtagatagatttatggattgtgaatcggtgatacaaagtgaaatatcacatgagttggatattcacgtgacatgcacgcaaccaaagggaaatgggaacattcatactttataatttatactaaacaataatattaatctatttatttatatattataattacaatatcttattacaacttcttaattaatatttttggtcaaaattatattcgaatttttttaaattttttttcatagcagtattcgttgtaattataatattatcactgtaaatttataaaaaaattcaaataatttatagtaccaaaaataaaattttgatattttagtatactacgcgtgttcaaaaaaattttaatttatttctgtttcgacattttaaattatataatttttttaaaaaatttataatatacttttaagaaaaaaccattttgtttttgatgtataatccattctagtagttacttctcttctacatagtaaaagaaagagaacaatcatagtttttggagtatttacataatcaagggctcagattgtttcatacaagtcaaattttgtgataaaaagtgggacccacgagatgatcctaattggctactttttagtggaatcattaattataataataataataccaaaattactttttaatttaatgtaaactcttaaaaaggatttgaaaaaaggtagttcctataggagtcactttaataaaaagttatgcttcaaatcaaagtctttgtgcattcacccccttattgggggaggcttttatataaattataaatacttattagccatattttgtgtatatatatattagtatatctctcttcaagtcccaagctataataaaaagatttaattatttttgtgttcaaatatgagttgagttcagaatgttgggtttattattatgtaagcaaagcaagtttgtattgacaattttagccttgagaaccgttggaactaaaaagggtttgaaatttttgggtcaaaacctacattatctactattaaaatataatatattggataggcactagtagtagtagctagctagctagctgtggagaaactaattaatattaatttttttggtcacttgatggtaagtgatataataaattaaacttccagaagcagaagcagttgacagagaaaaaataaaaaaggggagagaatattttgaaagggcttgttctctaaacaattctggataaataccaacccatttaatgccataaatatatatgtataaaaataaaaataaaaaataaaaattggtataactaatttgggatttccatattattatcactaggctaattagaatttttattctcgaattttaataaatactaaatcatattctctgaacttttaaagtcattaaaaataccttttaaactattgaaattgttgaatttaagaatttttgtctaatgttaagtaaaaaaaatataacatagatgaaagttcatgaggtatgatttagtatatgtcaaagttcgagagacatgatttggtagatatcaaaatctggggagcatgatttaatacataaacaatcactgaaatagta

SEQ ID NO: 297667 - DNA, 1321 bp, Cannabis indica
tgattttaggtcctttccccttgcgaattcattcactattatagagaaaaagttgttacaattggctccgtaaaaggagtgatcaaagagtaaatatcctatattctaaggtgcagttacgatctattgaaactcttatattctcagatagattggctggatctgagtttgtagatttcaatttgagatatttgtggaagcttgttgaagaagaaatcaagtatcgtgtaaccttgcccgaaactcctgacatcatttcttttggtcggcatattggttacgcaggcaggcctttttcgagacttttttttttttttttttgtggaacattcctgcaatgtgagtcaaacttcccttctctggttgatacattaatggcccgactagatccttcttggaaggcaatcaacaactcatggatgtcagctttatatggaacctgtcaagcatacttctgcccgaaagttccctgtcatgtcaaaggttagctagactataccacgtgtaaatgccatgttagacgtgcaaactttgaaataataattccaaaattacttttatatcaaatatatcatttttatcatctcctattaaaaatggttagattatgtaaaaagtaaaaacactattctcaattaaaaatttgtgaaattcaaagttaattctattgaagagtattatgcaacaattttaagtggaaatgtgatttgtaacttgtagaacggaaaaatttaaagtacattcttttaaaagattatttttggaatactttttttttgttttaatatttatgagagttatttaagtttttttttttttcaaaatgacctacttatagttctctagaataaaaaaataattatacatgcaataaaatattaaattttcattttaatactgtaattaattattgaaagttttttaaaattaataaatatttctaaatatttaaaacttacactatcacagaaaaaattcaactaaataaaatttttgaatgctagtataccaaagggttaagatgcaaaatgaccctaaatttggaaactataaattagtaaatgtttctgttctaaaaaaaaaataagaaaatggtcaaatataataattagctaataaaaattataaaaatatatttattacatattattttcttaaaaaatatatataataattagattatataatttttttaatattacatattattatattgtaataaaaataaataaatatattacatcgttgaatatatacaacagtatttaatatatcgtatcactgaaaattaatatacagtagtaataaaattatataccac

SEQ ID NO: 297668 - DNA, 3547 bp, Cannabis indica
tgtataaaattaaaatataaaaggtaataagctctgtgattaaattgagctatgtaacaaatgaatttatatatataatattacagagtagctttaacttctagtgataataaacagttagggcaacaaaatttagctaaagagtataatgaaggtttggcctaggttaaggcgaaatagacctacacttaaagctacctaatcagccaagaatctcaaaaaaaatatatattatttcaaaattttttttagcatttttcaaatatactatttttttaaagggctcaataattttaaacccaataaatctcagggcagcccagaataatagtttctcagtagaaaactcaactacataactcactcagggaacatcattaacaatgccaaattgctttaagctatgttctaatgccatcatttgtgaaatcaatttttccaaacataaaaaaacaaaaaagacaactaattatagatgtgtgtttttgtttaggactttgttgaagatacagggccacttgagagttttaaaatggataatctaacattagaaggaatgcttaaagtgttcaattcctatgtcaatttgcttataaatgcattgcccggttcaaccgaaaatgagaacttagaaggttttgggaacaaaattgtgaggatagccgaaaccgaagctcaacagattgcgttgctcgcgaatgcgtcgttgttagcggatgagatactcccccgagctgccttaaaacttatgccttttcaacaacaaaccaacaatagatcattggagactccgaggaaaggtcattctgataggcaaaaccgtgtccccgaacaaagggaaataaaaaggcgacttcaacgtgctgtggatcgccttcgcgacagcttttgtcgccaacatgcactcgatctcatctttactgaagacggcgaaactcaactttgtgcacaaatgtacacaaatttggactcatatgcatatgagccagagtggtttccttctccaatttttcaagtacgttaaaatttaatatcatatataagatgaatgaactacttctcttatttttttttttttgacacaaaacttctcttattaatacatcttatcatataggaactttatgtgaggctaacgcgaatagcgagcattgcaacggatatgtttgttggtagagaaagatttgcgacagttctattaataagactttcggagactgtgatcttatggctctcaaatgatcaaaacttttgggaagaaattgagtcaggaccacatccattaggtcctcttgggcttcaacaggcaagctattattgaatttgataaataattatcacataattaatggtgaaataattatgacattaattaatgtgtgttttgcagttttatttggatatggagtttgtgatgttgttttgttcacaaggccggtatctgtctaggagtctacatcaggttataaaagacattattgatagagctattcaagcactttatgctactggaatagacccacaaaggtacataataatattcatactatatcatataaaaaaaactcataaacaatcaaatccaattcatctctataccatcttaattaagggtggcaaaacaggttttaatacggcacacaaacacgaatacgatacgaattttacaggttaagactgaaaaaattaaatgcggattgaaaatgggtcaacacgtattgacacaaaataaaaacttgattaaactcgcttaatatgtatttaatataagtttttaaataaaataaaaagaaaattattaataacaatataattatataaaaatatatatttagtaattcaatgttaagttaaaaacattgtaaatttaatttttttaacatgaaattgaaaatattttaaattttttaattttaaaattatttagtaaccattaattggtaatacctattggaaagtgttctatatataaatgtatataaattttctaatagaatataaatctatcatttttctctaaaacttccacctttaataatagaaaaataggtgaaagtgggtcaacacgaacataacacaagtttttatggatcacgttagggttgaaaaaattagacacaaatcaaaaaacaggtcgcctgacacaaaatatataagcagatcacatcaaatttgatacgaacccaatacgaacatattttgccactccagatatatgatgtttttcaataattgtcaatatttttttaaaaaaaatataagtactaatttaaaaagtattataagggtcctctaatggtgtacacaacaaatgtcatattaatatttctcaatttttattaaagtcaaattgcaaataagagcatcaacaatagtatatttgttttaagtaacatttttgtttactctacctaatctcacttatttgacaaaaaacacattaagcaatgtcatatattgttgatactctaatcgttctaaatcagatttaaagtacaattaagaatttttaatttgtgattgtaaatctaacattatttatttatttatttatttttggtggcagtgtattgccagaggatgagtggtttgcagaagtgggccaaatagcaataaaaaatgttaagtggtaaagccaactttggtaatgtagaaagaaatcctgtaactagccctacttcatcttccatttattctcatggaagtaacttagactgaaatactctatcaataataattcatctatttatatacatatgaatatttgcggtgtaaataccatatgttgtgtttttcttgtagcggttacaataaacttcgttaatataatgaagtattaatttgattaaataaaatatcacatgttaatattttatttttaaaaattattaaataatcttaaaataaatgataatagaagttgaaatatcctcaacaaaattataaatttttatttatatatagctttttataatttagtaattattatttagtcaaatttaataaaatttaacgaaattaaaattaaaaactgcaacaaatatgtaacatatagtatttaatccttcgaaacaaataaatctaacacaaaattaatttatgaaaaagatcctattttatgataatatttgaaatgttttttttttgctaactaacttggtttaatgttcaaaacttatgttagaaataagtataaccaaagtataaccaaaatgtaaagtaaagccagcttttctataattattttttcttctgttgatcgaggtttttgacaattaatgattagagttgtatgaaagattcaatgaaagttaaaaagaatatttttttacatggtcgtagtattaatgagttttaatccacgagtcactgtatttatgagagtatttattttagagtattttcttagtcaatccatatttctgtttaggctaattagtatttttttcccctgaactttgacatgtaccaaatcatgtcccctgaacttttttggtcgttataaaaattccttatgaactattgaaattgttagatttaaggactt

SEQ ID NO: 297669 - DNA, 4059 bp, Cannabis indica
ggcataaaacccaacatgcactatatattaggcctagttgagttgttcctctcaagtatctcatcatccatttgactacttcctagtgtttagggccagggtttcccatatacctgttgatgacacttaaaccatgacacaaatcaagttgagtacatatcattatgtacattattttgccaacaacactagtatagggcacattctccatgaaattgacctcctgtgcaaagctgggtgcttgagttgcaagagtttaaagtgttgtgctataggagttccaactggtttaacattctcaaaaccaaaccttttaagaaccttagagatgtatccactttgtttaaactttttatctctcagtatctccattccaaggatcttctttgatggcccaaaattcttcatttcaaaatccttgtttagcatcatcttgaatttgtttacttctaattttttccttacttgctatgaacatatcatccacatacagtagcaagtatacaattgatctcacccctactgtcttgacataaaaacaacaatcataaccactcctcttagacccaaagtcatcaaatctcttgtaccattgtctagggaaatgctttagaccatatagagatcttttcagcaagcaaacatggtcttccttttcttttttaacaaaactatatggttgtttcgtatggattttctcattgagatcaccatttagaaaggttgttttcacatcaagctggtcaagttctaaatccttcatagtaattaatgtcaataaagctcgaattgatgtatgctaggcaacatgagagaatatttcattataatcaataccctccctctatgtgtacctctttgccactaatctagccttaaacttgccattttctactcctggtatcccttccttatgcatataaacccacttgcaccctgtcagccttataacaccttattttcttaccgagatccaagtaccattctttttcaattaatatttcatcatccattactttattctattccagctgccatcacacctcatggatggcttcggtataggtctttggttcctcatgattgagatttgatacattcaaggcatgatgaatcaaatatgcctaaccaaatctctcaggtgcccttgagctcatattttccctatctcttacaagctagttttacataatggcttcactaccaccatgcacttcttgaatctcgtcacttgagtcctcttcttgtactccagtagcttgttcttcccctacttgatctgtactagtacctctttgactctccacctcaaattgtatcttaccacttccttcattctgttgtggatcatattggttcttgagagtgtctttgtacactttttcttcctcaaagatcacatctctactgataaaatatttttgattatttcttggtttagtgctccatagtttatatcccttaacccctagtggatacccaacaaaacacactttctagccctaggttccaacttatcttgtcttaggtgagcatatgcaatgcatccaaaagtccttaggtgatcataccatgcaagcttccgtgaccacatctaaattggatttttaaagttgattggtgaggaaggacaatgatttatcaagtaacatgcagatagaacaacttctgctcaaaaatttcttggcaaaccagaataaatcaacatgcaccttaccctttcaaggattgttctatacatcctttcatctaacccattttgttgtggtatgtttttcacaattaaatgcctagctataccaacttgtttacaatagttcttaaacacatcagcacaaaactccaatccattattagttgtcaatcttttttatcttcctaccagtttgagttttaataaaagttttccattctttttttttttaaacagacgaatattttattcacaattgaagcaaatacaatccaaagcccacaaaaatgctgctcaaactcaacagaaaatcaccaactctcgataatcgaaagtatataattaacatctttttttttaactcttttacagatcaatcccatcactctatacatgacctctgaatctctttactaattctactaactgtcaaacacttagattcaaaaacacaaaggttcctatttctccacacaaaatagatcattgatgctataacaacattctatagttgatttctcaaattaataccaaaccatcaaccaatagcagtagctattttttttttttgtgaaaatgcagtccacgaataagtgggcatgagtctcaatctctttctcgcaaatagggcacaagtcagttgcaataggcagaagctttctcaggttatctctggttagaagttgattattgtacacctaccaataaatgaatctatgtttgggcataatcaatctatgccaaacaatccctgcataatcaacttcttgagcattcaataaatttttgtaaaaaagtttagcctaaaatctaccttttttgacagcaagcttcagattttgatcacttgttctctctcggagtctcaataatttcttagagtactaactcatgtcgtttttaatatggatattccaaaagtttgatcctttgagatagattgcattaatccatctaacccaaatgttatcttgtttactgaaactagcccacataaatttttccatcaaagccaagttccatttttcccttcacgaaaaccaatcccactaagctttttgggcagacacaccttctcctatgaatggagatgaaatttacttttgttgcccttcactccccacaaaaattcacgacaacatttttcaattgctactgtcactttttaaggtaagataaataaactcatccagaaatttctaattttgaacaacactggatggataagttgagcacgcccaacaaaggaaagattcctacttgcccaacaattaagtttcttattcagtttatctaagatcataccacagtcagccgctttccacttagttggcctcagattaacccccaaatacttcagcaggaaggacccctcagtcatttgcacctcttccaaaattctcttcttacaatcctctttaactcctccaaaaaaatatttgggatttggagttattagcaaccaaacctgttgcatcacaaaagtttcggaaggctctaaaaacatccttcaccgaattaaatgttacctttacaaaaatgagcaaatcatctacaaaacataaattgaccaacttaagctgcttacaaagaggatggaatccgaacgctttcttctccaagatttgagccagcaacctagataaataatccatgattaagacaaacagaagaggtgacatcgaatctccttgtcgaagacctttttctcccttaaaagacccttaaattcttccattcattaaaagattgtatctcgtgccttttaggcacaccataatctaatggataaatcgagaagggaagcaaaggtgtttgagaagatcctcaataaaattctaatcaacagtatcatatgctttgcttaaatcaatcttcatgatacatcttgctaaaatatttttccttgtataccccttaagaagatcttggaagataaggatattatgcgcaagcaatctgtttttgacaaaagctctttggttgctatttatcaaacttgggagaacctctgacattcttgggcatatcaattttgaaatacacttataaaagggtattgcagcacgctatcagtctataatctattgccccttatggatcttcaactttggggattagagagatcaccgtttcatttaaggctgaaggtgcaacctttatggaaaaattcaagaactgcttgtgaaacatcatccccaatctcagtccctaaatctttaaagaactctgatccaaatccatctaaaccagggctcttcaaagttttccattctttaaaggtcttaaaggcatcattattattcttgaggatgtacacccatacatatcttaaataatgatgaacaaagtgttggatatatttt

SEQ ID NO: 297670 - DNA, 2063 bp, Cannabis indica
tgacgtactcgtgtataagagccattattccgtgggtgtaaggacacaatggaggcttgaagcggggacgttacaccctgatagtcatcaagaggtatatgttcttaacttattttttattgttatgatttaatgtacacacatctagagattcattgagctatggtataatgataataagattatacacaactattccgctgtgtacctaatttagtactagaaaatccaacataatccaattaaggaattccaatggagaaggaaaattaagagcctaaggactattcaaccacatttgacgagcaagatgacaccttagaaataaatgaaaaaagagccctccaactcttggagcggagctttccacagattcttccacaccacattagggaatccaactcttgaattaacaagatacttgtaagcaatcttgataccaaaagctccattaggagccttcttccaaataagttcatttggctctgaaagagaaagatttttggtaagtttgcaagaccctgccattgcaaatatggctaaaatgcaaacttgttatgcctcttctaaatcggtttttgatgaaagctagtactctaactcttgggctactcatcaccttataccaaacaactccaatcttgatgctagtagctcctactcaggccaagaacagatctttgtaggcaatgtcacaagtcgttccattgaaaatattggtggctcttcctttctttcgcatttttcatctaaaacactcactaacttgttacatgttccttctaccaccaaaaactttttaagtgtctcccaattttcccaagataatagtgctttttttgagtttcatcatttctcctgttatgtcaaagatcaagcaacccacaagatcttttggttgggaaacttgacaaatgcttgtacaagtttgattcaacccatctcagtcatatgcctcctagtccagctcttgtttcaccagcttctaccttgagtctgtcgtttcagaacttttattgtttcacaattaattgtatataccaaattccattttttatctatgaaatagtgggcttggccaccctactgccaaaattgtaaaaatgcctttctctaattgtaatattccattaatgaataaaattttcctaatgtttcaactgcatgttatcttggtaattctcataaattgacctttcccaattctaccaccacttacaatgcacccttagaactgttacatttaaacttatgggcctctgctcctataaattcatctaatgggtatacatattatataagctttgtaatttttattctaagtaaatttggatctatatgctaagaatcaaagatgaagctttacctactttcactaagtttaaaacacaaattagattacaattagggtgttccatcaaaaccttacagtttgattggggtgatgagttcagggctttcactcattttcttaaaacactaggaatagttaataatctagcttttccacatataaatgaacaaaatggggtagtggagagtaaacacagacatattattgagacagacttaactctcttagcttaagcatctcatccattaaaactttaggatgaagcatttagaacagcagtgtaccttattaacaggattcctactcctaccttacatatttctaatcacttagaatttttatttgataccctctgattaccgcatgctaaaagtatttagttgtactggttatcctaatctgagaccttataatagaaataaatttctgtacgggtccacaccgagccgtgctgggcctatccttgaaaaatgttagcatgacatgacacaatctatattttttatggcacgacacgacacggtttgttttttgaaaaacacaaataaatatgggccgaaccagcacgacacatacgaacttacattagatggatttattgtatttttacagaatgagtagtgagcttaaggatcgaaaccttatattcatataagtgggacctttcatcaaattaattattagaatattttgataattaatttaaaaa

SEQ ID NO: 297671 - DNA, 1800 bp, Cannabis indica
agagtcatttctaaaagatagatattattagtgtccaataaaaatactcatatatatagggatacgattttgtctaaggatgtactttcacagaatgtattctgtgatgtacgacagtcatgatgggagagttatttgatcttagggctgaggttgatctaggggtaataattaagattaaaaaatggtaacatactctgagacccatctagtgtaccttgagacccatctaatgtaccacggaatacattccgtgaaagtacatcacaaaatcgtatccctatatatattatttatatgtgtgcattggatggagaaagtgtccacggggcctcacgtggatggatgatacccactgcgtctctcataatcactcgaatcaatccccatacatttcgttgctgtaaaaatattaccattattataaaaacccatttcgtacggataaatagggaaaaaaaaaagcccctccaaaaaacaatctcacctattaaattattaaaaatactctcattataatataaatatagttaaacttaaactataggctcatatgaagggatgggatatatgttaaggtttgcaacatgcatgtggtatggtatatgctcatcatcataattgatcgatcgactaattaatcacaaattcatgtgtgtcagtgtgtgtgtttagactcaaataatatctatgtgattatctttttaatatcatcataacccagcaattatatattattacatcatgcaaataaacacttctttcatgcatgattattaattcaatatatagaaatatgttttatcaaaataaattattcaatttcataattttgatatctgagagttgtttattaatttttcattaacttttctattacgaaaaaaacatatattaattataattatatatgtacataaacatctgagaaatgttaaaatgtatctgtcgaaatttacataatattattattagtataatttaatatatcaagtcttatttattttacattaataaacaatattgtaaaaaattgcacatcaaggaaataacaagtcataccacacgacttgataagagcataaggagagtaatctaaatccaggtaacaatatgcataattgactaaactatatgcgacctaattggcatctcggaagacaaactctaaatcaatgacagtatcatgttgtagtaattgcttaatttcttccactaacccatctctctgtctgcatatatccatcttcccctatgtgcaccaatctaatagcctaagacaatctgtctcaattttaaaatggtgcaatgcctatccgaaggccctggcaccagtatatgcgaagtagcgcagtagcataattaagtgattgcaccagcatcatttctcacaaccacacctctgccatatcgattcttggcctttggacactcctgcatctatattaatagaataagtagcatgcatgttgtaagttcgtggttcagctcatatttatcagtattttttaaaaaacggattgtggtgtatcgtgccacaaaaaatacagatcgtgccgtggcgtgtcaatatttttaaagaatagatacaatattttcatatcgtgctttgttcgtgtcggtccgtattttttaaacaggtcagctcgatttcatattttggcttaaattcgtactttacttttttatttattttgtaatttgttattttatttattttgatatatatgttgttggagacataacataactatactttactttattttgttgctagtacttatgtaaaaaaaatatttt

SEQ ID NO: 297672 - DNA, 3246 bp, Cannabis indica
atgaatcttatcgatatcaaacaaagaattgcaattttttcaagcttttcaagacacttggatatctccctgagtaaattttactctttacagtacaaatcaattcctaacccctttggattaatcaacctcacttttcatactaattcatcttcactgttttaagctaacacattcgagcatctctaatagtaataacttttaaaggtgctaaaaatctctatgttattcaaatatatagtatttttttttatatcttttttacataatttttggtactcttctaaaaacactttaatagtataataatttttaagaatactataattatgatttcatatattattatttaatatattatatattttaattataaatattgtcacactaaattttttataaaagatagtattaatgccacatcaacacaattttctatgatagcacttctccaatgctatagcatccaaataagcaatttacatcctaatcaattaagaatttaaccattggagatgctcttaggactattaggatagctcacgtagaaacattccatctcaacaactaagaatttgccaactcagcctccataatcctattcctaatcaattatatttaagagacctaacattctgtaccaagttgccattctttgtgtcttgttcacgcaactttgttgcatggttactaaaataatcacatgcatggctataggagaatacttgagcattttgttaggaaactagctgagtctttgtttgcagttctctattagttgagtatttgttttgctcatatctttatttctttggcaggttaatagagaactaatgggtgtcattgaatcgctgatgcaaaaagaagagcctgaagagagtgctgagacatgtgaagaggtagctgccgaaacaggagaagagtttaccgtgggggcacgagatgaagaagaggaaaaggaagaggaagaaaatactttgaaccctgaagctgaggaagagaaagaaactgttggcgattccatgaaagatgttaagacgtcctctcccaagaaacctactgctactaatgagaagcagacagacattctgatgaaggttgaggagcctcaaccacaagcatccccaaatggagaaaacaaagctcaaagacagaattataagcgcaacaaggctgaaactgttggcaatcccacaaaaaaggccaagacatcctcccccaagaaacctactgctactaatgagaagcagacagacagtccagttaagggtgagaaaccacaaccagaagcatccccagaagaagaaagcaaagccaaaaaacagaattataaaagcaagaaggctgaaactggagttgttggaacaccaaccagaaggagcactagggtaaagcagtagctgcaaaattttaattttttcttttttttactgagaagctgcaaatgatttgatgcatcattgagcttagcttagttccctttttgaaatgctgatcaaacatttaagcattttctttcggctttaaagattacccattgtgtatttaagttatcttttcaaaagggtctagtgcagtacaaagcactaggcaaccacagattacattatgtgagaagaaaaacagattcctatccattttttagtttgtaatgtcattcaaaatgaaacatccatgattatttacatattattctacagaacagtacagtcctgtcaacacattatgcatttggacttatgtttctttctttttgttctaattaagaattttgctgctcaagcttctcgatcaaagctactttctcatcttccggaagggaattgaacataaagacggatttgtcaccaatatcatcctagcaaagaaacaataaacaccacaaaagttttataatttatgaagaaatgtaaatgagtttttaccaagtatagttattagttatagataggtccttaggtagctactaccttaattggctgagaaaacttccttccagcaaatataacaaaaagtatcatccaagctccaagcagaggaagtttcactccatcgtccatcaaaccactctgcgtttcaaatcaaaaaccaagctcatccaatgcattgtttcattaaaagggaaaaacaaccctacttgaacacacgcaattcttttcgttactatacacaattaagaatcaaaaggttgaaatacgaaccaggtggccaagaagaagagttggtattataaaagtgagaagtccagcttctagcttgccataacagagacctattccatccattgaatccaatccaacatcattatgaaaaatgacccaaatagataaataaaagagatgagtttagttttaccttccttgaagacaaggccagtgagggctgcaaagagtgggcccacaagccagacagcagaggggttgtgaactacatactggaccagcccttgcccagaaggcttagccaagttggtgtatgtgagcaaggacccaaccacgccaagcccccaaaatgcttgaagagttcgcttaattggggtgacatatatatgaatcaaagccaaagacaacccaagtccagcaccacccacaatgtaaaacaggtcaagattgtggtgtatgaattccccgacctgattttcttcaggcaagaaagctgtggaggctgccccaacaaaagaggctgcagctgtgaccagcccagaacggtaggatatgacctctctaacgtcggtggaatcgacagaccaaggaccgtaaattccttggaaaacaggagtagaagtagtagtagtagtgttagaggtagccttacatttgaatatgggttttcgaaagcggcgattagcagctgtggcggtggataatctaaggttgtacttgggtgtaggcaccactatagctgcggtggttgtggcatgtagatgcagcactagtcttgaagatgccgccatttttagaagtactattactactttttctttcacttcaattcagccataagactattatcctttgttttgttttaaaagaggaaaagaataatatatgaaatcaaagttgaaaaaaaagagatttaattgaaattgttgggaatcaggggttcgatctcaaaactaattggctatgggaggagtagcccattcctcttatatattctattttctttccacacattagcaatgtgggactctctaacatcccccttaagatggtagctatttatttgctcaccatcttggacaac

SEQ ID NO: 297673 - DNA, 1995 bp, Cannabis indica
aagcccaggctcaataacacattaaaccctactatatgtagtacataacctaattttctattcagcagcaccccatcaaaatcgcaccccattctctctcatgtctctctcttccctcaagatctctctcgcacgcccatccaagccccacaccgtccagctatgggctcctatcgtcgaagggacactatattgctctctcgcacaacttctatacggtggtggccactcgaactaaaaccaccatgcgacgttcaagcaaccatcgaactcagagaggtaatgttctctcttcactctttttctctctcttgggatctctctctatctctctcgttcttttgagacctctctctcgtaaatttgttgtttttctatttcttttatagggctcgatgttgacggcaggagccccgtagtgtttgcataatttttcgttggcaacgatgaggatctttagtggattttgatttattattttgtaaaaattatatataattttgatcttcaatattctgatgtgtggagggatttgataaatggagctagacctgatttttttttattattatttagtatgtgtcggtacaaaacagacaggaatatagttaaaaatttaatttttactctatttatgtcggttccaaaatgacgggattttttaatacctgatagataaaaaatgacgcaacataatatttatttgcatctacgacatatacgttgatttatgaaactgacaaaaaatgtttaaatgtcagttaaaattgacgaaaatagacatatttgtagtagtaactttaggcttcagtttgacatttttactctagaaatggaaattaaacaaaaaaagaaatcaatttttttttcaaaaatattgaaaaaacatgtccaaaacttcttctcctttcttcattcttagttgaatcagaccatctcacaatcttctttgttcttttcaattgaggaacgaattcagctccaacaaaaatcgtccaagttgtgtaatactacgggcacaatgtagatctcaacaagaaattaatctaatcccaaccaatccaaaatcaaaggtaaaccatagaaaaaaaaaaggaagaaaacaaagatttctacctccattgatttgaaaagacagaaaaataacctaaaaataataattttaattatattgtgcagataatttcaaaataacacaattagagagaaatcaaagcttacccaaaaaataaatcaaacaaaaattacaaggtagcaatatgtttagtgattttcttcataattctgttgattttttagtattttccttcgtaattatgttattttctagtgttcgacaattagatcaatcataattcacatggtgaagaaattgatgtaattagtttctaattgaaaaactattgatgcatttaatgtcatttactattttttttgtcagtttatagttgtttatacgttattttcaacgattaaaatagttttttgacattattgatacaaactataaaatacagaatgactagtttacaaatgaacaactattgttgcaattaatatcattcattgtttcgtatcggtaaacagttgcttaaaagttatttttatagatgaatgtaatgaccgcttagctttatctggtaactagcagataattatgggttattaccaaaaaaatgctttaaaatattatttttgcaattatggtagtacatttgaattctaggtgtattatttatgctatatacgaaattaaagatacaactttaggggatgcttaacttagggttatcccgacaaagtgtgtcaccctagcaagctctggtgttgtttgttaataagaaagatggattgcttcgcatgtctattaactatcgggaactaaacaagttgacaatcaagaacaataagtaccctttgcctaggatcaatgatttgttcaatcaacttcagagaaagacagacttctctaagattgatctttgcttaggctat

SEQ ID NO: 297674 - DNA, 3042 bp, Cannabis indica
agtctcaaagaaaaataatcaaggcagcctcaacgtcgtcttagaagatgtaaacattctacctccaaagcatgcccaatcgagcaatgtgagaggaggggagacgtcagaagcagacaactgagagggtaacttagaccatcgtctaaggaaggagaagaagatcatgacacagaagatgaggaggaggatgatgatgaatatatcaaggacgagtactataaagatgggtattagtatgagcaagacctagaagtagttcgagtgtccaaagagctgcattagacccaagaaaagtttgcctatcaagtgaggttttctcaaaacatggagaggatgatggcccacctccaagaaaagtttagagacctggaagaggattctaaagaggaaccctccgtggaacttttcgacgataacaacgagtaaaaaccctgccaacgctaaaacctcagctcccataaaggacaaggggaaggcaaaggtaggtgaccctcaaaatctaacaactcttgtacctcctaggaaaagcatgaatcaagctagcaaacttgtgcaactgcagaaggccatcaatgcctctgagcttggacacctttctgttctgaaaggtcttgctgtgcaaaaaaggactggcaaaaaagtacctatccctaggggaaggaaaaaccgtcccaatgattctattaaccaagatgatgggatcgaggcaaaatattctcataatagttggtccaccatggacctctgaaggagtcttgatgctaagtacaaaaaagccaaaggagagatggacaggccacgtgcaaatgacctaaaaaccatttgaatgttaaggctggcggacgcgacctcctagatagtgacacaaagaggttggacgagcaaattgctaccttgaccaaacttgtttgtaagaaaagtggggccctcttaaattcagaagatgaggatgtggaaatgtgtattaggtggatcacagaagttccactctcgtagaattttaggatgccccagattaagttatatgatggatgcatagacccaagaactcatctatcaaaatacaaaaaaatgatgcacgtggctagggtaagcgatgatggataatgcttgtgcttcttacggaccctgaccaaatctgtggaggattggtggaaaaggttgtctcctggatctattcatagctagaaagacttacaattttgtttctacgagtagttcataggcgctcgggataccactgtcaaataacaagtaggtgaaagactgaagaacatcattcagcgaatgatggaggagtcagcaaagacaaaggtgagtgaagacttgaagctcgtagccttacaattaaaacttacagtttgctctttgctatgacgtaaaatgtacagagggttgagactttgtctgagtttatgtttagagcacaaggtatcatcaaccaggaatatacctatttgcgatcttttggagtccctcaagctttgacacccttagcatcctcactaagctttgtcccacaactttcagttcctagaactcaatatactctgactgtctatcaaccttttgtatccagacaagaacctacccagactcattttctaggtatggagcaatgccaactagatgaagcatcactcccgaacaatcacaaccacaagcagaagctctagaacaaaagctgaaccattcctggagcaagaggagtgggatgaaccatagtcaaagtgaaacttcaaagaaattgaggaaagaatttgaacccaagtttaacaagtacactaatttagtggatacccaagaaaatgtctacaaagcaatatgcaatacagaccactatcagaaaccccaaaggatgccttcagcgggaaacataagagagatagaaaacaaaggtgtgaatattacagggatttagggcacaacaccaatgagtgtgactacttaaaggataaaattgagactctggctagagtcagacacctaggccagtggattcaaatcccaactatctatctcagataggggggttattcatagacaattgcttgtttcaggacagtagggagctataaattctccacaaggagtaaactcccctcaagctcctggatcataacttatggccctacttgctctgctagctaaaaaatgcgatgacagtgatagctctaggactagagaatatgtatcctctaggtctatctccaccccacattaatggacatgtggccataatctcaggaggccccaatattgcaggagccatgagaaattcccagaagaggtacttaaggggattagatagttaaagggagaagtttgccttagtgcaatcactgaggcaacatccgcaaaccataaacttgcctattaccttcacggaggataacgctaggcaagttcatttccccacaatgaccattttgtcacagaggcccagattgctaaaaagagggtttccagggtcgtggtggacaatgggagctcagtgaacattattttcaagtttacatttcaagcaattaggatgatagaggatgattatcaccctgtcccatacaactccaagggttcaatggagccgtgctcatgatgatgggaaagatttagctcccgatcacattaaaaggggaaaataacattttcaccttcaagcactatacctttatggttgtagattgacccacaacatacaatgccaccctagggtgcccagtcttagttgattttagggtcataaattccatcaagaatttttgcatgaagttcccttatgataacaaaagtatcagagtggtcaggggtgacaaaaggagtgtgagaagctactataatgtttcattccaatccgtgtttatggtttgggaagaagcaaattttattcccataatagatgttcaggtggaagctaaagatgtctaaaggagtatgaagatgaattagatcctaggttgggatagaaagagtaattgagccgctagaggatgtagaggaagttagaatctatgatgaatatgttggaattattttacc

SEQ ID NO: 297675 - DNA, 1968 bp, Cannabis indica
aacatataatttcggaggtaaaaattaacaggtgtaatatgagattgtaactttgtaataactgatgtgcacataataaaaacataagaatgtatatatcgattaacagagagataacatatattaatgataattaatttacctaataataataataaaatttatatatatcctcccaaatcccgattacattcatcgtccagacttccaccgttgctcaagtaaataaacagtgaactcgaacttcctcgcagggccacagtaaaggacggtacactgctccacacgataatcctttctcacacgcgccatcacaacacgtacctaacaaacccggtcaaaaaatagtacaaaactgggagcgtgtttcctacgcgcccaaactcaatctctgaaaggccatatcacactgtgtctgggccagtccgattcttgatttatgaagatcaaattccatccacatattttgctgatggtgatgaccaatcagatacgcttccatacctaacaggtcagagttcccaaatgtgaagcaatgcaccgaatcattttccctcacttcacccggaacccgataaagaatgctcttacccgacacaaccatctcagctccttcaaaaaccaagctcacggtgggcaatcggggcagtttcgggttaccgagtgggacccggaaacacaaatccatagctccttgaaacacaaaattcgaatcttccaagactctcaaaacgcctgtggtttccttcaaaaacgcttctcttagagcagtgtaagcagggccgagtaggaacgtgaactgtgtgcccgaatcaaccatggtttgacccgcccctgtatgatcgggttcgaaaacggattttggtatctgcaacagtttacccgatacttttatcccgatcaactggacggtgtaagcgacccggtcgaagtacggtagcggcgtcgagattttgactagaggtgtgtaatttaaaggcgatatccacgagaaattggacgagtcgccgagaagtagtagacctgagaaatccgaacccgaaatgcagtacgagaatttggggaaagccatttgggaaacgaaggaaagagaacctaggttcatacccattagtccggtgttcttcgagtcctcttcggagttggagctgaagcttgagcccatacacccgaaaaccaaacccggtatttcggatgatccgatatggaaagtatcggcggcgaggtttccttcggatgaggagaaatcggcgtaggaaagtgtggcgtggcagaggtttctggagtcacacgaagctgggatggtgaagtcttgggtccggttcgtacaagttggcgaagaacattgaaccggagagtaagatgaagagcgggtcgggtcgaaagttaatgggaacttctctgttttattacagttgagccaagagagctcactgcctgtatcaatgaccatggtaacattctgtggaggcgagcccacggtaagagatacagtcaagctgacattgtggcgaaaatgaagcttattgggtgatctggggaaagacccagatggtatttgttgagttttgagaggtaaagcgagaagaagagggggaggagtagcactgttcttcgtcgaggtagagatgcaaagctgggttatgaaccaaacaatgaaaaacgttaaactgaaaaagaaatctctcatttggtatctttgtaataaaagaataaaacttctgaaatgaaaatgtttcagtttcagttccaggttcaggtttttatgtaaagaaaatgaaaatgaaaataatggcatttgaaggaggtagatctatctagccatctagcgagagtagaaccaaagatttatgggttcaaattcaatcaacggcaagatgacatttgtcacttttggtacgtacaatgttgtttgatgagttagaaacttagaagtaatttatgcttttttttaaaaagaaaactatg

SEQ ID NO: 297676 - DNA, 1037 bp, Cannabis indica
ttagatgatgccatatttcttcagtctagtctaaatgggtggttcagttatgttattgtttgtgaatatgtacttaattagcatgtggcaatgaaccatgagtgatttcgagccaataaagtggtacatgatatattttgttgtcctcttaatgactgtctacaatttctttttaggttgattgttttcatgtgttgcgtaagagtgatcctccatttgtcccatcatcaatttttatcaagcaagggcttgcctcatttgtaagtattgtctataatgagattcaaattaattggctgtcctttttgtccagtaattactttgttacattttgattttatcaagtgacggagattcaaattaattggctgtcctttttgtcaggttactttcgtagtcacacacttcaatgatcctaggatatcaagtgcagaactaagggatcttcttcttcagtctatctctgtattggtacagtacaaggaatatctggcagtttttgagagcaacaaagcagctacccaaaggatgccgaaagcattgctttctgcctttgacaacagatcctggatcccagtaacaaacattcttctgcggttgtgcaagggatctggcttttgttcttcaaagcacggagaatcttcgttgtcatctgttatgtttcaggtaaatttggtcactgttgcttcagacctttatactgtattttgctggtaattttctgattgtcaatcttgttgttctgttttggtggtttgaacttttgattcataaagaggttgttaagggaagcttgcataaatgatgaagagctgttttcagcatttcttaatcgcctatttaatatgctcagctggacaatgactgaattctcagtttcagttcgggaaatgcaagaaaaataccaggtatcattgtgatattttagtgttttgagtagtatacctttttttttctcttggtaatatttatctaactaagtggtttaaggtatttaattgttattaaatgggaaagaaaatctgctccttgctttc

SEQ ID NO: 297677 - DNA, 2935 bp, Cannabis indica
cttcctagaattggagtctatgaaccaaacaccgccaccattaaagggccggtttaagtaacctttgaaatcaatcccatcaccactggcagcagagctaacagcctctgcaactttcaccgtactagccagctccccaaacctagagctgactatcactttcatcctaccaacaaaagcctcttcaaaaatgtcatcccacaaatccgaatcttctcccaaaacgagctcccgcattctactccaaggcagctcgatgtcagatccgaaaacgttcttgagccactccagactcccttccaacacctccttgctttccattgtctcccttatcaatttctcagccaaggcaagttcccggccactgcccacggcatcaatcagaaatctgccattgatcttatcaaccatttctctcccgcagtccctcaaccacaaagaacaagcattggcaatgtagtccctgtcgagaatcgccatgactgactccaacttttctctgaaggaattccacaacttgacttcctcctctgggttgggaattccaccgaacagttgagatgcaggaggggaacccagcacaaccttgtaaaacaatggcatatcactcaaaactcgtagaaaaagctctcccacctggccaacggttacctgaattgtcctcaaaatctcgcagaagactgacacaacagcagagcaatcggcatcgggagagcaagcagctaaggtttgagaaacccacgactttctggaatcgagaaagagagcaagagcgtgatcgggaaggagatcatcaatggcggcgacagcggccaatgcatcagcataagatccaaccggaaggtgacgatcgaagaggcggtcacgggcacgctgggagatctgtgccttaaagctgtcaacgatctgccactggtgctgaaggagagggaaatgagagaggaagcggcggtggtcggaatcagcggaatcgaggaggagatgaacgtgaagtgcgcgcacgtagcgcgtggcagcttcgaggaacatagactcatcaagacagccccaaatgttctcaggcgtatcgacaagatacttgacgcggcaagcaatggcgtagatccggtggtggagggaaagagatgaggttttggaatgatcaaggggatggtggtgatcggacaaggagagaatggattggtggacggaggagagattggaagagatggcttgagaggagcgcttcatgagaagaatggagtcggcggagtcgataagatcgcggtatcgagtgccgacgaggagacggagctcctcttgcttgtgatggatgtgggagcgcgtggtggactcggcattgcgaatttcggagattggttcgacggaagagggcttcggcgtctctgaaacctccgccgctgagggtggccttgcggccatcatcgtccgccggaggaactctcattacttcttctttctaataatctctgattctttctcttacactaaccgaaaacgaaaacgacacgacatatatatatatttatacaattgcagattctactcttacgacatgtcgtttcactatatacacttatttgtatgtggttaattaatgttataaaagattgatgggtaaattaataaatagtgatggggaaattgccatatgattatgaatatattatatgaatgatgaagttagtcaccacttttcactcttatccaacaaattttctggtcagattcgtctgcaactcggtcggatcatgacatttagtgtgtgtggccaacaatctcttgaccttctttccaaagcagcagagggaatcttgtttgagagtaatcttgttgccaattaaggtagctgcaatgcaatattgtttgagaattcaatttggaatataaaatgaagttgagtgatctcatctcatgaatgctagtagtagtggaagaatgttgttgatggtcagttcctcaaacaccgcaacttagttcccatgttgggattttgtatggcagaaatagaaatgcaccatagcaaattatatgatcggaacacatgagcctcaaaatccgaatttggagcaatgaaaggattggcatggcttcatcatccatcaaaatatcagttgcataatgcttattagataacattgtctcatatatataaatatataagaagatgggctataattttaccatcaccaattaattttgaaatgaaaataaggattttgagccaatgctatgtgactttggggttgcaaggctcatttgagtagttttctgaatggtgagtttggtggccactccaaaaggggatgtggtacaactttggaggggttctacttgagttaatgtgagaaggcaattgaggtagtgaagaaaagtgataattgcttcttcaagggttgtttggtagagtggattagccaagtttcaatttcaagtgattaagtgtcattgacaaacacagtgtttgagagagagaccaaccatgtttgaagatgatgatgatgagatgttgttgttggtgataattaatatcatcattattgttgtcaccaacccactttactttatttatttttatttttacttttattttcatattctttaaaatatactcaattttatgaatgatgtctccattataccttttagattaatgtaaagggattatttcacaaaaacataaaaacaataaaaaaaattacaaaaatacggtttcacggaattttaaatatttttacaatttttttgattttatttacagaaaatacggtctttttatgttgtaatcttgttgattttttgttatctgtatgttattttttgttgttattttgatgttattttcatgtagttttcttgttgattttatgttatttttgtattattttttggaaaatcgtaaaaatataaaaaaaaaatattctttgaacgtaaa

SEQ ID NO: 297678 - DNA, 2290 bp, Cannabis indica
tcttaaaaagttcagtcaattgctttcttcttttccttatttggtgagactctaataacattgaaaatttcagttcagtagagaaagagcagttgaagattgcgataactggtgaaagcaccgagaaacacacaaatttgatttcagaatcagagtcctcactccaacagactcaagtaattgctgagaatgaagtttctgtagtagaatctaaggttatttcagtttctgaaaaagatgagaccttgaatcctgaagaatactttgatgacagcatggcttgtgatatccacgttcagtcaaatgtagaacaagcaagggaaatagatagacaagtgaaggatagtgatcaggtttattctgatggaggacatgaaaaggctttagatttcaacactgaagtttcaggtgccgctgagcaccttaagcctatagagaacttggaacagactgagacttgtgatgtttctccgatttgtgttagtactgtacaggagatagaaactgaacatggagggcagcaaatagaatttgaaaagcaacaagaaatgcctaagaaaatgggtggtgtaaatgaaaatgatggtcatgcatgggcagatgtgacattctcatgtgagcccagtgaattaatacatgttgaaggtacaacacctggtgacaatgctcctaaccctgttgataaagccgtgctatctccaccagatcatgacaggaactcacctactcaaacagtatgtcgctcagaaatggacaaccaaaccactaagaacgtggacattgctccaatggacaccaatgaagttttgatttcagctagtgaagctttgggccagtcagatgataatcaaaacttgagtaatgaagagtgcttacaggagggtgtagccactgattatagtatttctgatggaaatttcgcagatgaggaaggtgttaaagagcaagttacccctgttgagtttagtttacatggagagaaagacttgacagtggtcaaagaaattactgatagtaaacagccaaacaacagcgaagagaaaatcattaatgagaaatctctggagccagagaattcgttagtgaatcaacaaagttgtgacttaccaccagaagatgaagatgtattttctgtaaccgacttagtttggggtaaagtaaagagccatccatggtggccaggacagatatttgattttactgatgcatcagagaaggcaatgaagcatcataaaaaggactgcttcttggttgcctattttggggatagaacatttgcgtggaatgaagcttcatctttaaagccctttcggtctcatttctcacagatggagaagcagggcaatgcagattcattccagaaggctgtcaattgtgctttagtagaaatttcgaggcgagtacaattaggcttagcctgttcttgtataccaaaagatttacacgacaacattcaattccaggtcgttgaaaatgcagggatccggccagaatcaagtataagaggtgtggatgaatctgctagtgttaattccttccaatctgacaagttgcttgaatacctaggagcattagcacagtctccatcaggtgggaatgaccgattggaacttgtaatagcgaaggctcagttgttagcctttttccgtttgaaggggttttgtagcttacctgaatttcattgttgtggaggattggttgagaataacaccgttggctcccgatttcaggatagtttacatcctgatgatatggctgaggatgcaagttctctttctaaagatgacgaacgagcttcctctagccaggagaggtcgaaattacatagttcttctcataaacggaaacataatcttagagacggcgtttatcctaaattaaaagagaaaagcttatcagagttgatggttggtgccatagatttttcagatgacgataatcagtctggtaagaggagaaagggtgtagattaccatgctgaggacttggcagctcaagatggaaggaaaactgtttctgttgcaaaagcttctaattccacttttccaaagcagtcatttaagattggtgaatgtatccgtagagttgctagccagatgactgctagccagacgactcccagccagatgactcagagtactcctactgtgaagcttgagagggtgaagctagatggaagcagtgacagacctggggatggttatgaaatttcctttcagagctctgaggatgtctgtagaggaaggacaagtgatgcaggaagggcagctgatgcaggaagggcagctga

SEQ ID NO: 297679 - DNA, 1723 bp, Cannabis indica
agaagaaggtttaggaaataggaagaggcagaggaagttaagagtgaaaaagaaaagaaacttctcaaagaagctgccacgtgtgatgctcccaaccatgaaatccaaattcgtggtggcacaaggtgtacgtggcagttcctcaagagaaatatcaaaacaaagaatcaaataaaaattaataaaaattacacgtacctttattttaagaaatatgtagtaccaagtgggccccttcaccaccttggtcgatcatcaccaccacaccatgtgacaaaacttaaaaaatcaaatacggtggctcatatttggccacgtgtactgtaagaaaccattgcccaatcacggcccacacccacacctctgtcttctccagatatttttctttctcaaaactttgtttcgcggctgtgatacagagcttaacattttgtaattttctttattttttttattaactaaaatagagaataaatctgctttttcagttttgttttcgaatttggtttcagatactttttttttttctttttttcccgggttttatatgaagaggatgaggtagagttttttttaagtttaaagttgtagagtagacctgatttttcttttaatagtatttttatttgcattttctcgtggtttcttttttaatctcaactgggtttctggaattttgggtttgggttgtgtttacagggtgtttgaaaatgggtgaagtagctgagagtattgaagagcttatggcggcggaagttgaagttgagaaacgagagcagaatgaagaagaagaagaaaaagacggatccaaggaggtagttaggtgggagagttatcttcccagaatggtgcttagagttcttttggttgaggctgatgattccacgcggcagattgtgacagcccttcttcgaaaatgcggttataaaggtcaaatactttgctcctttatgtattactctcattttatttgctattattggcttatgtatagtaatatatgtgtatatgtattactatatttgctgtgcgttcttggattagtggcattctttttatttaattttttttgtagaggctagtacagttacagttttttgttttttaacagaaccattctttgtactttgttgtaatatgaaaatgagatggaacattagaaaaactttgcgtttgaattctgtctattgggtgattttggtttttgggttggacatggaattttatattttgtaggattttatgctgttattgatattcattataggttatgagatgttaagcttgttcccaattggaccccttctttgcctctttagtgttatagcaattactcgatgtttcttcattagtcctttcgtttcaatgtcatgctaagtaagtgaagttttttatttttggattgttaaatcaaagagagatgttagacacatttcatacataagatttatactcttaagactgatgcatcattttttattaacctcacttatttttatggggcttaaaaataagcgacatcactgatgagggttaaaaagtttgtgtttaatattaagtctaaaccaagttataaagtggatgaaaacattatacagattcaaatgtaaacccaatagaattatttaaagtacatcaataattttcaataactttattgtaggcttttaaattagggaaagtttggggggggggggggggggtaggggagggggtagttggc

SEQ ID NO: 297680 - DNA, 694 bp, Cannabis indica
aatactgtttgttgctgctggttgttgtatttgagttgcaggtgctcatcaaaatggtggtattagtcacctaaactataggccaggtggtgaaggttggtgttcatcattatatattttaacataagaaaatgcagcaatttctatgctccaattcaacataaaataatgagtgagtgggtgaggtgatggtcgtggtggtggtgcatttggtttttctgctaaagaaataacttatatgcatttatttaatagattagaaattgactgtaattgaaatgagattgtaagtactaagtagtagtatggagaggttcttgatcatccgtggattgattatgcacatgggagttggtataataaaccttatgttttctatttgtatgtaactggaaacgaatcataactattgaaatttactttggaatcttcttatgtgtcaagagattcaagatagaaaattttgaagctacattgatagggactgcggatccattgttttaggcacaaaaaacatgagtagatttgtagtttccttggcatattattaggccagtaatggtaactacacaacatattacattaatgcataacgttttaataatgatccagactaaaaaaaatgtaaacctctttatataaatatttaatattatatatttatgggtgactattcaatggttatgtaatagca

SEQ ID NO: 297681 - DNA, 2668 bp, Cannabis indica
tttctacttttttaaccctaattacccctagatcaatctcaaccatcagatcaaataactccctcatctgacggctaccgtacatcacagattacaatctatgaaagtacaataataacagaacaaaatcatatccctatatatatatatatatttcttttttcaattatatatgtatatacatatttaaaatctttccaccaacccaaatctggagtctccacatgtttgattttatatcataaagttccaatctttcatcattatgaaaacaaaaaaataaaagaacgtttgcaatttatttaattaattagttaattagttttttcaatgttgaccgacaaaacattatggtttttgatactaattattaattagtaatatatatccaaacgccgcttcacactataatatggataacttaatttgatcaaagggggcttttttttatttattttttatttttttttaatataaataagaaaattttatggtgcaagtattaaaaataggtgtattgatgcacttcttttgtaaatttttgagaaattcagattagtttaatgcgttgaaaataaaattcaaacagttctgtgtacacgtggtttttattttatatgcatgtgaaatagataatatgaattttacttttatagctggtttggtacctcgtgttgtataatattgtattgtaataatatattatttaatacaatattatgtttgatattaatttgtattaatagtttatgtaaaattatattatttttacgggaccagggacaggtcgaggacgggtcggggtccaagttaggggccaggtcaaggtttaggttcgggttcggagttgaggctgggtcggggtttgggttcggagtccgagttcggggttgggtcgggatttgggtccgaggcagggtcgtgatccggggttcaacattcgacactcagggtttgggattgggtcaaggtcttagtctagggttcgtggtctgggactgatcttaagccttagacttcaaccaccaggacagagtttggggccggattggggtctgggcttttggttcggggttcgagaccggcccaaccctttgtgaatattacaatacaaggtaatacaaatcatttgctagtgttaaataatacgattcacatgtataacaatttatagtcgtaataattagtacaatacaatattttatccaaacatcttgttccttgttatttaatacaatacgatccttatacaacaaattaaccaaacgagctcttagtattgtaaattattttaaattttttaaaattttacatagtgtcttaaatgatacaaatacactgtttataaaaaaaaaaattgagattacaactattcaaatatcaaaaacacataaaaaagtgtattggtagtgcactgtaaaaatacctacttaataattttctattttctataaactattagaaaaaaaaaaatacttatttaaattctttagtacgaatatttttgcccatcgtagtagtactttttagttttgatatttgaaaaagttataattcaattttattttatatatatgagtgtatatttagattgttttataaagtttaaacaattaattgcatacatatttttatatatgcttataattatttaattattttaacttttatttttaacacagtaagttatataaaattttattcaaagttaaatctaatataaatataatatacaccatcaatattattttatttatctaaaatattgaagataaaaaaataccctatgtacaataagtgcataaaagtgatggcccaatcctaaaaaattttcatacttatttatttgtaatgtgtatatgcatgatctaataatagtcaatattgtaataagtacatttgatttttccattaaataagttgaatatgattagtactgtccaaaagtggaagcatttattatttttaatcaaaacatttaattagtggcttcttaaattttactcaaatattgtacttaattagtgcccataccatattaaaaatattgtatgatcacttactaatgtgatatattttggattagttgttggaaattaattaagtatatatgtttttttttaactaccccgcttcaaatttttattgaacttttcttcacgaagtaatgactcttatacatagatacgttaattttagctgcttcatagaatgacgactgaccttgcaaaccaacacgaatctttcgagcgtgctttgttctcattcgcccgttttcttaaaaaacttctcaagaggtcacccattttgaaattatcccaaatcaagcatacttaacttttgagttatttcatgatgggctaccgaaaaaaagatacatctttttgatacaagttgtaccaatcaatttatttaagccttcttcaactgtgtagtctcatacctacacagtcttaaaataatcacacttaacctttcccaggcgatgtgggattttgcacaactcccgatcttactccttacgaatcacaggactctgactgtcacaatcacctccctttgggggtctgacgtcctcgtcgaccaaacttctggctaggtaaagattctgagattatttttgtaacaccctaactaacttaggcgaattacgtgatttttaaacgta

SEQ ID NO: 297682 - DNA, 2598 bp, Cannabis indica
aagaataaaattaagattttttaagtatagaaaattcaatttcccctcacaaattcataaagctctctgttagtcattttgcggagctctcaatgagagcaccaattgatacaatatcaattggactcttccagtaagtgccaaagtacatattaagagatttgttttgttttgaagagaactattatccatcatatgtcctttaaatttttcagccctttaaaaataattccttaattaactattcacattgttgtagttggttcttcttgatttctgtcaagttttgttaacttgaaaaataaaatgatacattgctggttatccaataattgtcacgtcagcaacatcaaatattaaaattgtaccatattaattattaaattttagaccgattcacaccattaaataaaaaacttacagatattctatatttgcccattttgccgtaacatcaggaaaatgaccagacaagtaattcccagctactgagctgcattaattaatccaaacatatataattagcattttgttgtctaaacaaacaaacaaggatgagaggacatgtagaccatgatgaagaaaatgctatcactcatgagatttttactcactctttggggctatcaactcgttactgccaagtaactctattttccttgataattatgtatagttttaaatcaatattgatgattacgcaactaaaaaagaagcatattaattttttctcatttaattaaggaaaacaaatctagtaagagaattaaagttactcacaacgatactagatttacaagtttgcggaaggtcgatggaatcccaccagtaaaattattggaatacaacgagctgcaaaaaattaagttatataaacatatctttgtgtgttttatatatttgttaatacataatatgttaactaagaaatttatatattcattaaaaaaactaagaaacttacagttctcgcagtgaggttatttttccaagttcatctggaagagaatcattcaggtgattttcgcccaaattcctttaaaacaaggactgttagacacagagagacaaagatagagagaaagaaaattaagaagataaatttaaataattgtattgatagggagtagttagctcagtatatacaagagtaaagttagttattgtaactaactaacataatatacagagataaaaagctaacaaactatgaacaaccaaaacagatataactaactaatgatctaacaccttcccttaaactcagagttgatttagaaaccaaattgagtttgtcccttaaaaatttaaatatggtgctagaaaatgccttagtaaaagtgtctgcaatttgatcataagcaggagtgtatttcattagcaactggttgttgatcactctttctcgaacaaaatataaatctagttcaatgtgccttgtccgaaaattgcagacgtgagtacaatactcttattatcacaccacattgtaggtgtttgttgaaaaagaactttaactttagtgagtaaagactcgatccagaccaaatcaacagtagcaagggccaaactacgacactttgcttcagtgctcgagcaagacactaatggttgcttctttgaggaccaagatataggattaggaccaaggtatatgcaataccctgaggtagattgcctatcatcttgatctgaggtccagtgatcaacatcacaaaaaccagtgataaacggagtagaaagtgtctttaacaagagtccaaaattagaggtaccactgagatatcgaagtattttcttcacagttttccaatgggattccagaggtgtgtgcataaactgtgagactttattgactgcataggacatctctagtctagttagagtagcatattgaagtgcactaactatactcttgtaaaaggagggatcagaataaattaacatcacaacctgaagctgtaagtttttcgccccctgtcataggtgtaggaaatgaattggcattttccattttagccctgactaaaagacccaaaatatatttcttttgacatagatctaatccttcagtagaatgagtcacttttatgcctaagaaataattaataaatctgagatcttttagagcaaacatgaagttgagacttgctatcaaggatgttacatcttcattttaactacatgtgatcaatatatcatccacatatataagtacaaatgttgagtgatctgcagtgtgtttgaaaaatagcaaattatcagctcgggcacactaaaaaccaaaagaaataagtgtggcctttagtttatcaaaccaagcccttggagcttgtcttaagccatagatggctttgtgaagtttgcactgttgtgatattttgcacacgcaagtgcacgtatcgttacaagtagtaaactcaccaagagtgaggtcgatcccacagggattgtagttaagtacgttaaaataaaacttttacttctatttggttaaataaaaattaagaaagaaatttaaaataagaaaactaataagaagcaaataattaaaaaaaattgacagttaataaaaactaaggcttcgatttcaattgt

SEQ ID NO: 297683 - DNA, 1575 bp, Cannabis indica
attgaaaaagcactgtagcgtgccttagcattagggcgttacaatacctatgaaacttttgtcaaatcggtagaagtagtcaataacagtgtgaccaagtttctggcacaattgacattgcacacgattgggagctgctggaaaacgactgcctcttcctcttcccatgttggtgacttgggaattgatattggcccctcgaggtggatttcctctaaagtttcctctggaattaggaaagggagaagagttagcgtaattaaatccacaaggaaaatactgacctcgaggatatgcatgtggtctgtaatttcgatttgtttaagcgtaaaaagcttcaagaattggatcttactcagtcatggtcacattgatgcttggttcagcttcttgatcctcctcctcgattcgagattcagatgcaaggagcaatgcttcaatttcaccaacagtgtatccttcaacacgagtgttggtggagatgatgaatgtgtcgtactcactaggcaggcctttgaatatcgcgatgatatgatcacgatctaagaggatttcgccaacagaagccagtagatcaacgtgttgtttcactttaagaagatagtcattgagacttgatgtgaatttctttaatttatgaagcttggttttgaactcaagaatcttataggagaccttcaatgtgtagtgttgctcaagagctttccaaatctgacgcgcagtgttgtagcccaccatgcgagtgaggaggctctcagtcatagatgacaacagccaagaaacaaaaagttgatcttggacatcccaatcaacaaattcagggttgaaccggtgagctgtgcgatctgcatcgatgaggaacttaggcggagggggaacatccttaatgaatttttgcagtcgatttctacaaattgcagctaaaatctgttgcttccacagaaggaagttgtgatcattgagcttgatcgatacggtatggttgaagtaaaaaggggcagtatcatcttgagttcttgatcgatttcttgcagcagcatactgatttccttgtggagttggttgatgattcgaattgccatgatcaacagaggccatgttcgtcgacaatggcagaaatggctctgataccatgtgagaggtattcaacctcttaaacattgtttgttaagaatgaaaaataaagtatatcaaagaaaaagaaaggcaaagaaaagaaggagaagaaagaagtctcattacattgatctgagtaattacaaagatatttatacaggtttgtacaatggaatacgtgcaacaaaatacagctggtgtgacaaaagtttgagtttgagatactgagtagagagtgcgaaaatatgtgcaccgttgagaatactaattgtatgttattttgatcatttgattgttgaggcttttacctccttatcaatgaaattgtgatccttttaggaaaaataaataaatagataagtaaatttttacaatatatcatagaattatgtgatttctcttctctatttccttatctcaatcatttaaattatattttttgtatgaacatatttttga

SEQ ID NO: 297684 - DNA, 3024 bp, Cannabis indica
cttaggactataccctggaggtatagtcataaagacttcctcatgcaaatcttcatggagaaaagtattattaacatccaattggtgaaggaaccacccttgaataacaaccaaggcaaggatgagtttgacagaaacaaccttagtcacaggagcaaaagtctcattgtaatcaactccctcttgctgactgaaccttttggcaacaagtcttgccttaaatctttcaatggatccatctaaattttgatcttatacacccatttacatcctatgacatgatgactagcagggagactaacaatgatccaagtgtcattggattcaagagcagcaatttctttgtctatggcattatcctaaacaagaatgcatcttgcttgatggaagaattcaggttcaaaatgacttgagatggctagcacaatagctcaaaattttggtgacaacctgctataatcaataatatcagacaaagactgagtagttgagcatttggggacatgggactgaacacttttagtggagagaaaacaatgatagtcctggagataagatggcttctaagtttgtcttacatgtctatgagatgtagatgattcaggaacctcaacaacatcagggttttccatataagtgggatgtgcaggctgtattataggaccagactgtgtgggaacattagactggattggggagaagttttcatgatggatgggaattggagattcagactatggtgtaggataattttcatgaacatttatggaagcattagcatgaaaaaaatcagaaaactcagaggacataggcccatccacaacaaagggaaaaatatgctcatgaaaaacaaagagcaaaacactttattagtatgaagatcaagaagcttgtaagctttcataccagctagataccctaagaaaacacaagggacgactctaggtgaaaattttgatcttcctgcactcagagtggaagcataggccaaacatccaaaggctctcaaatgttcataattaggaaccttagaatgtaagatttcaaaaggagactaatgttttacatttggagtaggggttctattgatgatatatgcagtagtgttgatgcattctccccaatagggtaagggaatgtgtgactgaaataaaatggccctagcaacattcaacaaatgttgatgtttcctttccacaatagaattctgttgtggcctttgcacacaagaatgataatgcacaagtcctaaagatgagaatagatcaggaaattgtagctcctttgcattatcagacttaacacccctaattaatttgagcattatattgagtttttatcaactgtataaaagctggtataactaactgagcattagatttgttctcgataaggtgtatccatgtatatctagaacaattattaataatggttatgaaatacctaaagccttcaacaattcgagtattgtagggtccccaaatgtcaacatgtataagatcaaagaaattttttaacaaattgtgactattaacaataggtaattttcttcgtttagcaaaatggcatatagaacaaagaaagtcagaacaataagagcattgaaactgtaattttttatgcaaaggatgattctttttacaagaggcatgtccaaacctgtaatgccacaaatttttattattgactttagaatcaatgacagaacaagttaaaggaaatttttgttcagacatatagtaaagattgccaattttgtcacccatcctaataacttgattcttagtgatatcttgaacaatgcatttgtgaggaaggaaaagaaagaaatagttagctgaatcagataaagcacatacagaaataaggttatgttggaaatcagggacatacaacacatttgtgagctaaatgtcataaatcctaacatttcaaacaaaagcaaccttggtattacttccatttggcaattttactgaagtaattttactgtgcttctggatagagcaaaataaagatggattggagcacacatgatgtgtggctccagtgtctatgatccaactaaattgaggaataagaaggggcttatcagacacatttgaaataataggttgatcaggttgctggttttgtgaagatggttcttgcatttgtatagagttgaacaacaggcaatcagtctaaaatcaacatctctagttaggttgtcaattttagggataagagatatcaaagtggagtgtaattcagaaggcatttaacctgaaataaagaaatcagtgactgccttgcaaatatcagcaccaatttcaggccacatagtcttaaagaaaccagatcagaaaccatcaggcctcagggatttggtgtctatgatgctgaataaggctttccttatttctttgtgagtgaatggcttcagaagagtcaactactgatctaaatttagagtggagtcctggtcaaaacattcagagtagagtatgtttgaacttgtgttcttagtgcccatactacctctgaaatgattgagaaagtgatcaacaatgtcaatgaagttatcattgacaactccttgatctgtgacaaatgaggttatcatgttgtccatccttctcttcctaagagaagcatgaaaaactgcagtgttgtcatccccattttgaagccagataatcttgctacgctgcctaaggaacttattgtacattttctcaatgccattaaagttactagcagcagctttttcttgatcttgataaagaatgtccctcaaatgggattgagcttgcagcttagcttctaaaaaatcatccttagccttttgatacattttcccaacatcaccaatcttctcaaaattaaacttttttaaggttgtgcttcaatctcatgaacttgaggtagatacctttcattcccacagctgatatagtcttctgccaactagacataacaagattcttgaactctgggtggtcaatccagaaattcaagaaacgaaacgacttgataccaatc

SEQ ID NO: 297685 - DNA, 3954 bp, Cannabis indica
ttttttttttttttggtgtaatagaatttggtaattggataaattttatgcttgatgagattttattaaaaaaaaaagtggaatttagttaagaagttgggcaaccgttaaggaatttgcatttgactccgttgagctctctcgaactcccagatagaccatattatcggggatgtattcgcctagtcctcttgcggcggcgcgtacgcgcgtgggatcttcatctgacgtcgaccccggtggactggaatcttctcttctgcaattagttcacgatcaccatcaatcctctctcagacttcgtcaaattaatggtgtgttccctaatcagaaaattccttcgtcacagaattcaagtttattttccccttaattaaatatgtgatctcaaaaaatatatgatagagaaggcgaagaaggacgcgatcaagaacgccgctagggtttcgaatctattggtggacgcagtaaatggcggggttcaagaatgctttgttaacgagaagcgaattgagcttgaaatcagggctttgactgccaccattactcgattcatgaagcagaccgatcaatggctcactgccacccacgcttttaattccgccgttaaggtgacgcttttgagtttattatctattatattcctgatttcatattcattgtatggctaacattgcatgattttgttcatctgtactagttttttttttctttattattatgaactatacaagttctttaagcgtatgggtattgtcaatctcgtagtctcatactctcatataggttgtgggttaactttgtctatctattgttgaaacttgaaataaagaatccgagcttaaaacttatgatggtgattatgtttttgtggtaatgttttatattgcaatggctttatttttagtctcagttttcttatatgttgggagcttatgttttgttatttgcatgttgatagtgaaaattctcaattttcgggtcaactaggaatcaatgcttcccagtgctttattgagaagaggtcaaaaacttaggattaaggcttgtctataattttgtaccttcttcttattgaggaatgaaatccacctgtttaactttgtgaaaattgttggcatgaaaagttattgttttgacacttttgagatgacctaagttagggtctcagcaaattgataatctttctatgacaattagtcgatatggcaagtttccatatcatatttccatctcttcccaaaatacactgttgacaaagatgtattagtttaatatcagtagaaacttcactctggtgataatcaccctttctttctgaaaacgttgaagctaggtgaaaagattgttgcgacttgtaattgtgttttgaattttcacaacagtgtcgattgcttatagattttccagtgccccgtttggcatgctttcataggtaagctataatgcatttgaaggtgaggaggaaacagaaataataatgcatcatggcagattgtttttctttgttagaaatagtatagatgtgcttatagttaatatgttgggagtttgatttgtattgcaggaaatcggagactttgagaattggatgaaaaccatggaatttgattgtaaaagcgttgttgcagctatccacaatattcatcaagaatgaatcacgacaatttcttatatctgaactatgataataccttagagtgtacataattgttttcacatgaatacaagttaaagtgcaaacaaatgaagtgttcattcatttttgctggttactgagccatttgtgtacaaaattatttatttaatttttaggtcatcttgaagcatagtgtgcagcatgaggggaatactgctttgttttcaatgttgaatttatgttttgcaatctaaatatctggatttattagtagatgtagttctctttgatgatgaacaattgatcttagctcaattcatagcttgttgcacctagtagattgtggttaatataaaaataagtagtaatgtcatgtgtgcttcatgtacatatttcaagaatgcgacaggtatagaagaaaatgtgagaaaaaagcttttatatagagctagagtatcggcaaaaacaatgtcaacaaacaaagcacacttaactaatttatttgcctacctctacgatagcaagtcgatctgtactttattggttttggtgtgtaatttagctagagatttattaggcttagataaggatttggtttggagagcaattcctccaagataattttaagtaattgtagctctgtatttattggtttttctgtcgaagttactcctaaaaaaaaagtctgtactacatctttattagtgtctacttttgcccaagatgatcaatcttggacacgtgataacctagattaggttggttttctatgagtatttggtaaattatgatgatttcatgtcggagtagcctaagctgaaattttaccaagcacaagaaagtaatgttatgctgaacatgttcccatatttctcgaatgtgttgaacatgttactatgttaatttaggctgtttgtagaaaattgaaaataaggtgaattcttaacgctacaaacacaaacaattaagtgatactattagtaccttaagatgtgaatactagttagtagtttttattcaataataaaatgtattaaacttaatattaaaatattacactaataacaatacaatatatagtattggataaggctaatgtttcttataaatagagtaactattgatttgatgatgagtggagtaacttatatttttataaatgatttaataattttacatttaagtatcacgagtaactatttattcgttattttgttcttaatatttaagtgtcttttatactatgtcgtgcatttgacttactgtctgcatagatgtggatcgaaggctcacaaagaatatagttatgatgtcatgacaagaaacttaaaggtttatctcaaacccgaccttccaccctcgagccccttgtctgtccgtctatctccttttcttcttctcgagtgtgcacgacagtggtggtgctccggtcaccacatgccaaaatggaggccacgaatcgtggtggtgctccggttgaactctcgtggttggctgggttaatgaaaaagatgaacaagaaaaaaaaaatatataataaaataaaataaatttatgattttaaaatatattttttagttttttattttattttaatttttttaatgaaaattatttttttgaccaataaaaaattgacacgtggcactttatttgggtttaatatatagttaaaaaaaggaaacaatcgacttacaaaaaatgtcacgttgagaactattaccgtcaatttttgaggttggggattaatgtgcatcaaccctatatttttgggaacttttgcaacaattatccttttttatatgtataaaaaataactagttagtatattattagtattatagtaatcaaaacatttacggtaaaatactcagaaaaatataaaataatggagaattgagattttttttttattttttatatttagtataattaagtttgaatagggtatgtatatgctaatgtgacgcgatatgttttaatatttaatttgttttgagataattttgtttaaattttaagtatattaatttatataaaattcccaacttatgcagtactgcaaatctgcaatattatagttgtcaattattgttggcttggctttgatgtaattaatagtagtgagaataagaaacaaagaaaattttctcaatcaatggaactgattgtgatattctggtgaacatgcatttgagtaatcaacatatatatcatgtacctaactaataagagtaactgtaagaccttgtagctgtatattgtagttgtataatatatatgtagggacacgattttgtcttgtgatgtacttt

SEQ ID NO: 297686 - DNA, 1516 bp, Cannabis indica
attgcaactagcgctacaatctaaattgcaataaaaaatcgtataaaaacccttattgcaactagcgctgcaaccactttagaaacctaaaccgtaaatttagaaaaaaaaaagttaaaaaaatagtatatgaggtaattccccttatttatttttataatctttcacgttatagttatttacgctgtaaaattttaaaagatttgaaaaaatttaacatggaaaaagtagggttcaaatagtttattgcacgttaaaataaactgtttaaaccttattttcgatgtattgatttttttttttcatttttcaaaatttagcctaatattttaattataattataatgtattcattaaaaatatataaacatactttaataaaattcttctaaatactaaaataaataaaaagtatatgataaaactttaaatagtgcagtgtagaatttttccatattatattgatgttgaaaatatataataaaagacactttcaaaaagtgataacttgattaagaggatgaggagtacttttctagattccccatattctaatatattaaggtatatatattaatatattatatataaatcaattttttctagaagcaaataccaaatttgttcatatctccatcttatgtcttttttattaaaatatatataaactcaaataatagaaattgggatagtgattaggttagttacactccccatggtagtagcaaaaaaatctccactctcaagtaccatagaatgattacaagatatatatctatattatatttcctctattattgagtgaggatttccattcaccaaataccataattgtgaaagtacatactccaattaatatgcatcacatgcagctaaagtgggagcgtaagggccaagttttgaaggaaataaaaaatgaagaaaaacagtctacaatgaccaaaatagggtttggtcaaaggtagttatgggagtttctaagcttgagagagaaggagagggagaatctaacagtcaagagtctcgtaattcgtaaaaagaaatattggataagttgtacaatcttacatatttctgagaatgtgtagatataagactacacaattaataaagagtacttaaatgaattgatgggatgaatggcttcttaaatagtttttacaaaaaatatgtgagtgaaaacaaagcacgctgaaaatgtatcaaataatctccgatgacacgtcggaaactaccatcaagatcctctcctcatctcggtcgcaagtacgacaattctttgttgagtgtgaagctcatacacattctttctttggacgagttagcacaagacacaaattttgagttcgaattaaagagataataaaatacgattaatcaagatggaaatgttgttagatcttactatatctttatatattaaaagtgtctatctaacgacaattcttggtttaacgattcttggtttaacgattcttttttatttagcccttacacgattaacttaacagactgt

SEQ ID NO: 297687 - DNA, 3916 bp, Cannabis indica
aattatattataaaatctttttgatgtgtttgaaatttctgaatgagtgtagataaattactggaaaatgcaaatcaatatgtaaatgtatatatgtgcgcgcgttgtttttatttactctctgtattgttttgctgaaatttttgcgctcttatattatatacattgattgaacaagaaatcttaaactaaagatttaattattgatgttgtttaatgtgacagttaaattatgctcggttaatttttgtgaaatatgattttagaagcaaaatttgattgtgaatatgaattttcgtttgaatactgttgattgtgatctgtctagtaatatggctcaggaagaaagtaacaaatttgtcaaattttgaggaaacagacaatggaaaagaacaagaggaggataataagatggctttgcttgcaattttggttgagcaagctaatagttctgtttgaaattggaagtagtaatatggtatatatgctgtgcttcttagatagtttacctatcaattaaggactaaaatggcttccatgttgattcttgagacatcccgtaatatcttgagctgctaaaaagttggatgtcaaatttttataggttgcatattctaagttatttgaaaagcatttaaagtccaaaccatattgttgtgaaatgaagataatgagtttaccaaacaaagatgttttgattgagtatatgaatatatatatatttatatgccttacgagtccatatgtgcctgcatttatgttttctggtcatattatcttccttggttttgctttgaagtctgcattcatgtgcataaatgtatgttattgttgccacaatactttgaagtattcttttcgtgatagtaattgttcttcttagttttagttctgagtttactgaatggtctgtttgcatattgatttactatgcactctatttggttttgtagaaagaagctagtgttacagcttggaagaaaataaggagtagatgaaaaaccaagaaagttatgtgccaccctcttatgttcctctggggcagtcagattccgaagcagatgttgtttcacaagatatagatcctgccttgcataaccctatcattgaggggtcattacaatggtcttctggaatctgtgcatgttgcgatgatatgcagagctgtatgctactttttgccttgtcaccttgatttatcagagggaaaattatgaaggtgcctcttgtgaatagagaaaggaaaacctttttttgcctttgtttttgcttgtgttttcagctttacaagctttaaaaatggttagtgcacagtgcatatagaatggtttgaaaggctttacttagttaactccttagaacttggagagagtgtacagctcaccttgagattcaaaaccttattagtgtttccacttatggtcatttcattcttttcaaatgtatttagaaaaccattatttgtctataatgattcaggtttttgcttgactgcctgcgcaagcaaagatgagcacttgtgatatttctcataaaaggcacctatttttatccatatcatctaaattgtgtattctatccaaagacagtatgggaagtgtaggccatatccttctccattgctgatactctcttataatgtggtatatattgctcaaggagcttgggattcctaaagttgttgagtatctttcatttaagtgtatatggtcgggttttagagaaaacaaaaaataattgggaatgtggcagtttaggcattttttggccattatggtcacatggttggagatgatcagaagaatttcgaggatttaaagataggtgatgatgatttatgggatagggtgaagctcgttgcatatgttggtttggtcgtatttttctttctttacttaaattcctcgattctggatatacctacctcatgaacactctaaaactcatagttagctcctcctgtacaaaattgtaaatgacttgttttagaatcatcctccctctttgccttcaggcctaatcttcacatatctggttattgatgttatgagaaataagtttcggttgctttgtagtgtgaaattttgtgtgatattagaaaataagaatatgatttgaataaaatggaatagtttttaggatgctttggaatattttgaagcttttaaagaataaatgatgttctaagtagcttttctgctgtttggccgagaaaaaatttagggcctccctagttccttctattcaatccttatgtttcagtttcttttgttttttgaggttagttccctttgttttttgaggttagttccctttgttttttaggtgtttttgccttttgctgttttatctttttggttgttgtgtgatgagaacattctgttctgtttttctaccgtttcattctttgtaaatattttcatttgcgtatcactacgttgggattttgtgaatcatttttcttccttcatgtaaaacttatgactgttcaatttggatttctttttgcacaggctgtataggccttttttgtccatgctttcttttcggaaaaaatgctgaatttctgggctctggaactttaattggatcatgcacaacccattttatattgtggggacttgctagtactgtctgctgcctattgactgatggccttctgttgggtttgcctgtgtgctttgttgcgtgttatgcatgtggctaccgcagggctttaagatcaaagtataatctacaggtatgtcttttaatattttagaggttcttccttagttttggtttcgttcggtgttatgtgactagcacaggactgagatatagtaaggcctttgaattggtatgttgttgataaagattttgcattattgtgttgttgctacattatgcaggaagcgccgtgcggagactatgtcactcatcttttttgccatctgtgtgctaattgtcaagaatatagggagattcgagaaagagctggttccagtactcctgatcttaaccttgccgttgttactgctcctccggtccagacgatggtttcagtctctgagaataacacaaatgcttaggtactaagatcagcattttggcttgggattgtatgattttatcttgtctattatcacatatttctgactattctgaatctgtacaatagggtaatttttgaattacttgtgcccttagattcgattgaatgaatagagttagtagaactcatcagagcccatatttgagtgaggtatcatttctctagttctacttcataaatatgtaataacagacttttataagaagcttttgaaacatgacttttaaagtttggcaaatcgatgtgtatgtaacaactgaaatctgaaatttttgagctatgaggaaacaaaacaaagcttgttgacaagtaaagggaaccttggactaggtgactttggtggtcacctaaacctagtttgtgtgttgctttgctactatagatttgaggcacaatggaaaaggtggcttttaaattctgaggagaaatggtagaagattgagtcggttaactccaaccaactagaaatgtattattgaacttttgatactacatgatcctaccttttctgttaggttccgttatgccacttttgttatgccacttttgttaggttctgtttcttttatcattatataattatgcttattttgttaggttttatttcttttagggttgagatgcaaaatgattataaatttggtaactaagtttagtaaatgtccactttttaaaaaaattaagaaaatagccaaatttaataaattagctaataaaaattataaaaatatatttatcacatattttttaaaaaatatatgtaataataaaagggaaatttgattttacatacttaaaaaattaaaaaattttattattaaa

SEQ ID NO: 297688 - DNA, 1921 bp, Cannabis indica
acgcgaatagttttctagacgaaacacaacagcagactggccaacttcacctatagctgcagtatgccacaccccacatgcaacctttatggttcttaagccatttaataactgtacctctcttggatacgaaatgctttggcgatccccgtgccccaaaacaccgaacgttccatccccgaatgtaaatagtttcccatttgaagttgctaaagccgaaatgccaagtaccacaagcaactgataaaacttgaagtccttctaaaggaccgttaacccttttcggtatccagtgactaatatcagtaccatgtccaagaagaccagcattgtgggcaccatcaccccaagtgaacaaatcaccagctgcagacacagcacacgagtgatattcaccacaagcaacaaattctatattgttaattgccaaaaactcaactaaacgaggccgactgaagtctttatcaatcccatgtcctagtcttcccccacattcctcaccccatgtgaaaacctcaccttgtcttgtaacaaggccaacatgcctaactccacaagcaatctgatgcacatcaagaacaacatttgattcaagagatttcggggttaacacatcagattttataggaaccgagctaacaactcccccttcacttaaacttccatcaacccaaacctctccccacacataaacatctcctagtgattctatatcatccggtccagatcccccactcgaacagctaggagtgcttgaaacactaatacgaaaaccatctgcaccgcttcctcttagttgcatacttgcgcgttctgttcccacatctgaacttgctaaactaaatgaagattcgcgaggattgaaatcgatagacaccctaccatgggcaatacttgcaaaatctaatgacacacttaagggactgccattctgaataaactcattcccatcttgttgctgaaaaaataacaaacagttacacatatccaaacacaactgtcaaaactgaatgaacaaacgaatctaacatagggacttacttcagaagtatcactcttagaacgtctaatgcgctttggtcctgtaggaattagttccttaagcgctgcaaaccataattctgcttcagctttgtccttgcagatctttaaaatgacaacaatacaaattcggatcaaactttcacaaaagtaaacaaaacaataagaatagataagtattttgctccctgagcactactaagatcgtgatgttaaatattctctctcaaccttgaacgttagtgacatatgaaatttttaccactgacaaaccatgcttcctcttatttaacaaacgtctcatatttcactaacgatcatagtccaggaagaatatttaacatcgacaataacttagggggtattatcttttccgaccaaagttcagagggcaaaatacttatttattcaagttaacataaagtaattcttactgaccagatcaagtgatcgttcgccgttattatataaaagagaaaatgacaaataatccttttcggggcgcaaatatcttctaaacacagcctgttaatagaaaaaccaacaaccccatcagccaaaggaaagtttttatttttatctaatagtaatagtaattgtgtttttcttttgttattaactcacagttctttgtccaggtataattcttgtaactgaagataatttcaaagtcctttcttgtccatgagaaaaccagattaacgttgtttcatcctgttagtgacactaaaactgaaatcattcaagcaattcagatatttccctattatacatagagaattttcaaactaaagcaatcacacacaaatatctatatgaattgaagatattgagtatatagggaataagtaacaagacaaaaactatttcgttttaggat

SEQ ID NO: 297689 - DNA, 6081 bp, Cannabis indica
aaaatagagaagagatgagaattttctgagtgttttattccaataggtgatctcctatttatacacgtacaagagttaaatattaagaaactaagagaaagggaaactaagaaaaagggaatgttgattacattaatggtaataaataaaagatttggacatccacataattaatactatttataacacgttgtttatttaatggtagtagtactagctttaatatggttgaccttattattgatctgatcttcagctataatattggattttaaattcaactaccttacaattcgtttattcattttagtgcatatatatctagcgtaatcctgagtctctttgcctagatcatgtagtaaaatacgtaactaattaatagattatgtcccatccagtacacatcactagcgtttcagtttataatatagcgtttcagcaaacaaacacaaaaacaaacagtgtctgctttgtgttacattttgtctagcaatttcacttgtgacttgtgtgtttgatcaatcatatcattgatgatcggcatgaaaatgttttctttttttcatttcttttcttcttatcgaaactgttttgagcaccatgtcttgaagtgtcatcgtccggacaactgtcccagaaagttttaaataaacttcctaaatttcaaacattcccatatctcaacttcaaatacctcactccatgacaaaccatattaggtgggatagttagaaaaatgaagacatgaaggcccatcgatgaggcaactaacatgatggtggagttgtcataaagtgatgcagctcaaagaggtaggggcaattcatcaaattactatttatttaaaggcacaccatataaataaatatatatatatttatataatatcccatgaaactgatagacccaataaggttggataatatcaatcaaacaaactgcactaaacaacatcacacttagaacatatacagttccatcctcttaatattatccactttagttatttattattattttagttactctttattttttctctaatttgtctgtttcgatcattatttgacatattggggtggaatttgtagttttggattgaggttttcgtaaaatggggggcaaacacaatctggacttgatttgggttttggcttttggaaaaaagaaacagaccagccctcggtgtcaataatatcactctttgagttgtgttatgtgtgcgtatatatataataataataataatatgtttgtactattctttgggggaaaagagagatagatcatgagctagaatgctataaagtaattatactactgaatctgaccaatattggttttatcctattgaggattatgggtccttttaatttactacaattaggaactcaaaaatgtatggtaccctttttgatcgacaaatggaccccaacctcctgtcacctcatcctaatacaaacccaccatacttattattgctattccgtttcccttaagagaataccccttgctttattaataataatatacatatatatatataatataatggctttaatatacatgtacgtaccttacaaattaattaagaccacacaccctagtttaataaaacataagtaggcttattaactttggtcagtagatgttgcattatattgagatagtgagtgcaatcaactatagctagagagcaagtagagatatagtgagtcaaatcgtataagagagaaatgccaattaattaggtcatcatatatattgagaatattatagttgtaatatgaacaggtactagaaggacaaagccactgtcccatgtcgagttggtgctataccccattatgtcatttagggaatttaattgagacatgtcttgggtgttgtatagcaaccaaatagtattgttattctcaaccatgcacctttttatttagtagtactactttatagcgatattcatatctctagatagctacgtgtgtataaatacatatatattggtggtctttatttgagttattgcatactgatcagaaaccatatgaggcggtcggcgatctcccatttactatattggaatgattaatttgatttgcattatatatttgagaggcatcctatgtgtgttacaagaatattcttcctttttctttcttttttgtgaaatttggacctcttcaaagaacgaccaggttgtgtaataatttgctcagtagtaaaatattactgtataaatatatccaattagaactagatcaaacagaatttcgacgctcaataaaagaacagagaaacaaaatgtatgtttcaatttcagatacgtcaagtaaatggcaaccacactttacgtaattgaataaactataaataataaaacagattactagtttacatgtatttgatagaatatagctaattaattagtttgacacagtatattatttattgatcataatgtgatgtacataaagtaacactattacaatttggatcttaagtttttttgcaataaataaaaagcagaaataaaatgttttatctcgtttattgttgggcgcataacctatatcttcagttatatttaaaaaagatgatgataaagaccgtaagaataaaaaaaattaaagacctatctcttgagtaattaccaaataactaataaaacataggcctatacgaatcagaatgtttcatagtgtattaaaacaatctaattgtgacacttcaattaatttgagtattttaaaaaacaaaaactgcataaaggttaattttttaataaatgaaatattagttaacagtgtcaaatttatattggtttaacacagtatgacacataactttttaacaagagatcttgattcaagctgatacatgcatatacttatgtcttcggttattggataatagcccaagacatgtatatgtatatatatttttggagaaagttgaaatttttcattttctctcttcattcatggtctttctcatccaagactctaataaccaccgaaatcaaaccgccatttcctccataactatttctctttattttttttctaaaatattataattttcatacggaaaaatataaatatatatagcataaaaattgatttatttcaacctttaataagctaaataaattatttctattttagggttttgtgagtgtttatataaaaaataaacaccaacaattatcaatagacaagattcattgccataactaaaatcccaaattggacagagtacaacatgcataagaaattacccatacgatgtcacgagtaaaaacaaagccaacaaggtcccaccttgcgtgtacattctggggtatgtgaggccccctcgcgtgtacgacctgggagagtaaccaccccccccccccccgccccgcgtggtggcctgagatgagccaccccctcgtgtggtggcccaaggtgacgaggccaccccctcttgtgaatggcctgagaaaagtgaggcccatcccctcgcacatgtagcccgagatgagtgaggccacctttccatgcatggacatagcccatgaggacctcagctacctcccttaccacatttcatcgtctatgcacaacgtgaaagcattaagatgtgaccctatcgtctcatgcatgggccacatagttattctgtccctctctcctctaagtcatgcatggaaaacccttaccttgtctacgtatcacaagcctgaagaaatggatcacttatatggagacctgcacatcctatagttcataaaaagccccaaggtgcaaagatactatatacaacattctaaaaactatgggcaagtacttgagacaaaatttataggtgttagtacgacttaacaccccaccaccactacttctggaaggctagttttgtaggtacaagtcatggtgtattttttattttgggacaacttgtacactatggccaatagagccactataaatagaacttccctcaattggaagggggttggaaaagcaaactttgtacctcatacttagaattcaataaaacagtagcatatcttcatctttgtttgagtattcttaagaacataatagatatccatcttctattctcatacttaaattgatgttctagccttaactttgttgacgagctcttaccatcaataatttggcactgtccttaggaaatacaaagctctagctaggcttttctctaaaaatcatccattaacactccaacatgcaagggcattcaatgcgtctccaagatattgaagtactagttcaccttgatcataaccgactagtcgttacaaggagtactctagtggctcaatccattagggaaaaccaagcaaaaatcaatccaaatgaagggcataataagaggcaccaaggtggaaacaatagagattgaaacgaatttgacagccacaaccaaggtcgagtaaatttgcctccaagaatgatgctcttatctcttcccaccagagacgataacccatcccacgccatggaagaagatgtaagcaagaaagatagagttaccatttcagtgacaaaacttgttgggaacaacctatgcctgtcaaggatttcaatataaggtacactctgcaatggatcccacatgaccctagtacttggtgttaccaacctaaaaaagaaaaatgtgtccactaaaatagttttagctcacgcacctaccttcatgtagaagaaatgaatgacctatgattgacaaactagatgttaaaggaacaattgccaattggtatgtaggatgttctaaatgacttgttacaaggacattttgatgtcccttatacaagcacaaggccaaaaagggtcaagaataaaaaaaaattagggttaggtgaacctctaaatccttcctaagtaacatagcacaaaaccttgaagtggtgcgacaacgggtggctaaggaaggtaaaacccttgtactcaatgaaaaatgagctctataaagacaaataatcctataacaccttaggaaagttgagaaagaccaaggttcacactgtaagaccttcgagacaaattaaactaaaaacaggaaaaagctagacaaataaatggaagacctacgtaagaaacttgcttcagtcacatatgaagaatgtaattgtgatggtgaagagtttgatgaagaatcaacatttgtgagagagatctaatctgaactgttcccaccccacccccccctcccccccgcaattttctcacaatatgacaggacaacagacccgaagtgttggttagtacatatcagaattaatgtttctgattatcatcgtaccatatctccaagatgaacgtatatatatatatattaaatttaaaattaaatagatgaaaagaaaatttacctgtcgaagcctattagggtatcctctagtctttttgtatgttgtatccttaaaacgatgacgtcaaactcacacacattgatcttccagatcatcaaccacacacaaggactagtgtggactactagaataaaaagtatatgaagatcttgtgggattctcaactcatgagcaagagcaattctatagtgtttgagataaaagattaaatccgttttaggcttttgaaaaagttacaataaaattcatttgttattagattactgaagtttgtttatacagtatattaaataaacccaataaatgttttatttaattaattatttcataaatcatatttaattatttcaataaataatataaccaaattctatttgatatatttatttcctataatagattgagggaatctctcaacaatcaaaaatttctataactactttttaaattcaaatttacataattatttatctttaaattaattaacctaaaaataaatccagtggagaccaccctatataataaggaccttttactgtgctaggacaaagtgatagttgtgccacttatgtcttaacaagacattggtggtatcttttatcaagaaaacttttgtcttttccataatttatctaataaatttgaaaaataaattatttattacaaaataaataattactattttgacaaat

SEQ ID NO: 297690 - DNA, 2024 bp, Cannabis indica
gaacaaatatatacatatttatatattttttggacttaatagaatttatgcattaaacataatcatgaaataaatcatgtgaaccatgcaacataaatccaatttgtaatctttattaattagtaaatatgattatattaaaatgggttttatttagggcacaaaacccaacaaatggattgtccggtctgtggctcacgatggcagtaagaaccataaacccatttgggttccatcttcaacacgaccaccacagggacaaccatcctttctcctagtcgcatgggtaggacgtcatacattcattatggatgcatgcatgcatgcacgagtgtgagggcacaaaacgcgaagccactcgagtggttgtgcatgggtagggaaaaattcctgaggtcgtatgcatgtaattttgttgttcatggtcgagttttaatattgaaaccaagctcaaattctcttgagcattacataggtttataaatttcatatataaattaattttcataaaattaaaattacatgccaatttcatatttcccgaaatgggttacattataatctagaaaaaataataacaaaagctacactcaattataccatttaattaacaattcatcacctctcatacattcacgataatataaccatctatttacatacatatcaccgatatttataaatgcataaatcccacacatcatttaatgtatgtacattcatgaaactgctcttgataccaattgttggttttataatacaaaattatgtacgaagaggaagatttggtatatctaattatcattgtaccatagtcccaatagatttctagaagtgtatagattaaatcaatacataaattacaagaaaagaatatataccctttcatgactattagggtatcttcaaaacttctcgtaagttgtatccttttggtttattagaaacttacaccgtagttttctaaatcgatccaccatacacagggaatagtgtgagctattaggataaattgtatgatttgttcttgattaattctcaacaaatgagaaagaactatttgagagagaaagtaatttttcttttctcctatgtatttcaaaaatagcagtaaaaaattatctcttgatttcttaaattagaattctatttatagtagttaactcttcattaattaaatcatatgtcggccattgaatgacatatgctagccagcaccagtagtggtagccagaaagaagctcgaatgattggtgtttctacaaccttcgccttagccggaccataacttattctcagctgcaaaacaatttcaatagcccacgaacaatagggattcaaccccaaatatctacctattctttaagagcaattgattagttatttttgtataataaatatatgataaaagagtaatatctccccattttgagggatattaacctattttgaatctagatcttttgtaagctctaaactatataaagagtattaggttagacctaaaacctaagttctaggttcaaaactcgagaccctagctctctctctctctctctcatgtgtgtctccttatctcacttgttcgagacctggcttacattgttctcactattgtaatgttcacagagagccccactagaaattacaaggtaaaagcttatagtatgtttggtattatctcttgaatcaatacaaaaaattagggagtaggtcattacctactaatcaaaggggtcgaacctctataaattgctgtgtctatttaattatttgcttacattattacacgtggtgattgtctatcataaataaggctccgctgtcaaccgagcaaatacgaagtcaacatttatttgctttctgtgagagcattatttatcaactcgatcaatcatcatgactgtaacaagaagaactacaacttccacttcctagggtcttcctcatgactccatgacagctgtgttggaatttgttttaccaagatctagatttactaacaagtatgtttcattaacatc

SEQ ID NO: 297691 - DNA, 1585 bp, Cannabis indica
tttttttttataattttaattatttttaagtgtgtaatttttcaacaatactttgcacatatctatataaaaaattaactggaatgattaaaattacaatatttattggtaaatacatttgaattattattattattagtatcaaattataagaattattaatgtgttatatttttgggctagtttattcgtgcttacatgttgtgcattcgggcttttcgtatcgtgttgtgcttatgcctatatttttcgtatcgtgtcatgccaatttgcatcattgtatcatgtcgtgcctaagcccatatttttttgtgtcgagttgtgctcatgcctccggagcttgtgctgatttcatgtcgtgtcaaaaatcccagcaagtattttacaactctagttgagcatgatgataatcaatgaagaaaattgtatgcttccaaattgctttggcaaatttacaagtaaacaaagcatgtcctattgattcccaaatgcttacacattgaatcaatgacctttcttttttgaagtgcagcaactattggtaatgcattctaaatgactttccaagaaaaaaaaaattgacctttggtggtagatttaatttccaaaaaaaaatccaccaatctttgtaattatttgcagtagaatcttcatctacttctgctaaagatgatgctaaatgcaagccagattttagtgagtttataccagacaagttgtgatgccaaataagggtggtcttgagtttggaaaaaactcaagggaatagaaacaatctcgtccaaatcaactagtgcgaaatttacatttaacaaaaataaattccattcccttgtatctttaatgaagtgagcaacaggtactgttggcaacccatagtaagagattggatgaaattaaactatgtccaaggatccatgggtcaatgccacaacgcactccaaaaccatttccaaatttgtctctgagtaattttatcagtgattctcaggaaatactttgttggttctatagtactaaattaggtacgcaacggaagagttgtttctgattatcactgtaccatatgcccaagatcaccacatgtatatatttttttttatgaaatcaggaagtttgtattgctcacaatcaaatttacaaactaaaggcacctaacaaaggcccataaccggctatacaatcaactcatgttgagtaattacatgttaaaattcagctttaatctatactttctatttacaaatgttgaaaccacactttgtctatgtctttaactttcttcggccagcaaagagtgatcctttgcttaacaaccatcttggtttgttgaaccagtcgatcaatctccacatgagttccttcccagattttaatgttgcgagctctccacaacgaatacaccaaactagcaatggatgcagcgagaacttgcttattttatttctcccaatccaccttaagagcctgggtagtggggaggctgcagcatgccattgcacccaatctttcatagcttttaaaatagatttggttagataagtattattttaggaataaaataataaataaataataattacca

SEQ ID NO: 297692 - DNA, 2364 bp, Cannabis indica
aattttcaaattaatgctaagcggtctttacatcccttagttcattttttctgttcagaaaactacccacaaggtcatagtttctctctagaaattggagctttgacacttagccttattctgtaataccatcttgcgagaaaaaacaactcaaaatagacgtagctccattattatcatgatagagggagtgaactactataaattgatgtgtgtttctctacttttacttaacaaatatttcattctcgctaatctaacgagcgggtgtggcttagaagtctgcgtccaaatttctgagttaatattttggtactttcattaagagccacaactcaagaaagttactagcaagatggttacaacatgctctacaagtgttgataagggaatcccaacttctggctaagcaactgggggcacaccagttactgaagctggaactagaactactcctgcacctcacatgcaaggaggaggccctagaaccagctccataactcttcccctaaggccactgcattctcttggtactggaaccagtgagtaaatcccatctggagagccacatgtgcaactacaagatcttgaggagctcgatcgtcaggttgaacaactcaccttaattatagctgatctacaacaatagttacgagactttcttgaccatcaacacgaacagtttcaacactggtttatggagaactgccagaacattgaaagccaatgagctataggaacatcggagagctaactagttttaggagattagagaagcttatttctttagtcgtagaactactccccacatgggtatttctaagcttgttagagagactccccatcgacaaattggtcacataggaactactgctcaaggggaaacccttaacgtgcggaatgacaccaccaaactttgtaaccgtgtaaccactaagtaaacaccaagcatggagacctctcagagggaaggcaccttggagcaagagccttaaaggactcaagctcatgggtaggagctagccaatgggccctccacttgatgtggagtgacctcaaaacacagagagaaccaacatgactcttccaccaagtcctcctcatcacactcatgagaccgggcctcgagaccatgcaaagggaaagggacctaccacacaagacaattgaggcagacaaagaacttacttagagactagaggctatgagatctagcaggtaaggaccaatgaaccacttcatacataaaagtactttcaggatgaaaggggtgaattatgtcataactttgctcgtggccccgatggctagtaatatgagtacttccctcaagtacatggagaggagttgaacttgtgcaaccagttcacttcttttcacaattgtgatccagaagaagactactttaagagaagtagccactacaatgctctagatgatcactccgacaacgggtcatcccaagatgatctagagttcatcccaaaagcatcactagagttgccttcacgaccccgtggtcaagagacaactacaagacagaagtagactgaagtcgatggttgacttggaagaccaagaggcgtgagtggcctcttggctagaagacgttcggtggaagcaggaacttctaaaggataccctacccgaataatagaagctccaactaggatgcagaccaccgcccatggggtcaaccgagcagaattagaaactctagcaatcttagtgaaatggattattcagttttgggccctaaataaaacccatttcatataattagatttactagttaataaaagatcagaaatcattttatgttgcgtggttcacaagatttatttcatgattatatgtttaatgtataaattctattaaatccaaaacatatagttattcatgattatagtgttgtcaacacagtagaatataatcatgattatatgattcaaagtttaagtcccatgatttatcagtacactggatttagactgacatgataatcagcgatagagtatacttagacattagataagtgttatgtcctttctaggacattggtaaagtatgctaggatcagatgtatggagtatacatcagactagaccgatattgaacttggatgagatatcataaacttaccattatacctatctatgtcaatatcagttagttgatcttaggtcaatagatcttaatcttgatatggttaggttctgcttaattgtattattttatgttcttagagttgttcgttaaagcttggtcgggtgaatacttacatcttgggaacatgatagtataattgagtgagatcactaatcatagatatgaaaatctatagcttctataagtattttagaa

SEQ ID NO: 297693 - DNA, 3693 bp, Cannabis indica
aaagaaaaaaaaacaagagcaagaggagacagactacaacactgtccgaacagaagaagcaacatgtgtgtaactgacaatcagataaaaacacatttacgggaattatatacagatagaaaatatggccaaaggctccttccagtgactagataatacgactgcaaatgagttcatcgtccatctaccgccttagcattccgttaagcacaatagtgtcttcatctgattcctctgcgatatgaagagaggaaacagcctgagccgcaataagatcagcagagaatcctgtacctccccaacctgcttcttcctcaagaaatgagtcatgaatatctcttccataatgcccagttgaaaatgaccattcgctttttcccaaaccaccccacttgcatccagatctgtaaccattggagacccattcaatgccttcaagtgaacatatggaagaatcctgacaaggtaaacctgttctccttccacccatgaaaaaatcaatactgctagagcactcccaagggttgaattcctcatctttgtttaagacaatcttacacgaatcatctgagtcttcaccaatcaggacatgcagggcaacagcttcagcaattgcagcgccctcttcatcaagtctctgctgttcttctttctttttctgtttcttcttttcaagttcagaaatgatggctgctgaagtagccaatgctttctccaagcgtcttttcttcttctcggcctgcttttgacgatccaattcgtcctttacttgcttcttcttcacttttctcacaaccgtttgcattttattacacgcaacgttatccattaaactaacaatctctacctactcagttggctttactcaactttcttttttcctttttagagagaatttctctaaagtgtatacattaccctataatgtgtttccttctttttctatataatactaagtaaattcaatcaatttccttattgaaaactaatataatattacgattctcaaaactacacccactcaggtctgaacgagtacctcattttacgaacaatgcaatcccaaacagaaacaacaggagacaaaagaagagcaaactggtaagcactcacagatccaccccttgaaaccattcttcctaatttcccacaacccttgcatttacccatgtcaagaatgccaaatcaagagcaattctgtggaaagttgtacggcaacaaccagaaccagtttaaaacagctcacatggccttccctgctggagagaaaaatgataaaactgaatgtcattgtaaaattaaaacactcaagtagtaatggtattggtaataatatatatatatatatatttatacaactaaatcaatataagaggaagcagtattcaaccttcaattatccaaccaatataaattaaataagagaagagagatgcatcagccacaaaaacaaaagtacacttcgccaaaaactataatcacagaagcaagaacaaaacctttgccttccgcacaaaaaaaaaaaggttaagaatggtggtactttcaaaattgtacaaacataacccttaactaacactaacgtaaaattctgaaacaccagcacagaagggttcaaatcaatttatattgaagataaatacggaaacaaaaaaagttacaaatcgttcacctaaaatagaaatgagaaaacagagtaaccaaaccatttccgattaaaaggaaaactcatcgctgaaacatgacaaagtaaaattggtgtccaatatcaataattgggtcaaaaactccaagcgacccatcacttattccgagtgaggagtgaaattggggtagtcaatcaattcaatatacgaaattctcaatcttcaattaactaacaaaaacataaactctatttaataaaaaccgattcctctcaattaagatctataacacagatagaaatgaaaatactaattcagcaattaccgaaataatcaaatcgagtgatctaataaacccagatacaggaattcaattttgaacagtatgaaccacttctacacaaaaagtaacaccagatccaattatccgtcatctcaaaaacacgaaaattccaccgaaaaatagtaattaagatgaagacagagcaaatcatattacaaaaacttataagatacacaattataatcccaaaatcaaaattaaaagtacaaacctggctgtaatgacagagagaggaaaggcccccaagatttctatgtttcccgttggaataatgagaaggaaagagacggttaggtctggaattcagagtgtttggatccagagaaaacttgggtatgtgggaaagaaagtgggaaattttctgagaagagagataaaagaaaaaagaagaaagagagagaagaggggtaatcgtgtgaagtacgaatagattagttacacgtggcaagcgatgggttgggttgatctaaaggagtaaaaatctagaatatctgacttttcttggtgtctctttggttgggatttggaactgtagctttgctgatgtcatgacacgtggctttgattatgcgatgaatgaggtgagtcaagtgggcccttgcttaagacgtgttcattcttgtccgtcagattcaacaaattgtgatttttgattggttgaaaggcccatcaacggccgagattgcagatctaaacacgtaaagtgattcatacacggtctaagcatttacggtaacaagtggggcatatgaatgaaaatgaaaaagttggtgaatgaataaatcaagatctatagtttcataaaataaaaataaatctatgatgtgatctgtattcttattctatatgtttaaattactctttcatttcttttttaaaaaaactactcttaaatcttggggtaaaaaacataattctctttttaagattagaatttctcaactcaacttagaaattgaccaacttcagagtaagatggctcttaattctgaggagtcccgtaggctcagttttttgaagtctgcatagactctctgctgtataaagaagagatctattagagacaacgtgctaggactaaatggttgaaggctggggacagaaaacaaatttttttcataaacatacctcttttaggaagaaagtgaatacaatcaaatttcttaaaactgaggacggctctgttgtgaatactcatgaggggattgtaaatctgatcactgactacttccaaaacctcttctctacccaaggcagtgatgtgcatgctgcttctgctatcttttcttatcttaattctgggttagaggaatctgatgtcagtttccttgatcaagattttactccagaagaggttaggagagctgtttttcaaatctctggtgataaagctgtaggccttgatggcttcaatgcctatttttaccagaagaattggtctgtcttggggtctgacttgactaaggctatcttggattgtcttaatcacggtgcagatttttcctcactcaattcttctctcattgtcctcattcccaaaaagcaacgtgctcattctcttaaggacttcaggcctattagtctttgtaccactttctacaaaattatctcgaaaacccttgccaatcgtctgaaggttgttttggacaaaataatttcccctaaccaaagtgcttttatctcagggcgtatcatttttgataa

SEQ ID NO: 297694 - DNA, 3163 bp, Cannabis indica
attaatggacatgggtggtggaacttgggacagagaaactgttactcgtgcacttcgagcagcatataacaatccagaacgcgcagtcgactatttgtactctgtatgtttaaattcactgaatctgatgacacctgttttatcttgttttaactattgatgttttctcttcagggtattccagaagcagcagaagttgcagttccagcggctcatttccctgcaaatcaggcaactgagactggtggaaccactgctccagtgtctggtgctcctaactcatctccattaaatatgttcccacaggtaagatttctgatatataaggatctttcttgcattcttctcttctgtgtgtatgttcaaattaaactggttttcttcaggaaacacttgctggtgatggtggtggagcacttggaactcttgatttcctaaggaacaatccacaggttggcttcaagtaaaataatttttcattgctttttgtttataattctgttctgccatattatgggctttcacaactgcatacccccaccaagcaaaagctttttgtcaagtagtcttatgctcctcagtgtcattgttggaggtctggcaactgaatttttttttggttcttttctaaatttcagtttcagactttacgatcaatggtgcaatctaatccacaaattttaaaggtctataatcttttattacatttatagtctaattgtttttttttaatatattttctaagctttattgcttgcttctactcttacagcccatgcttcaggagcttggaaaacaaaacccccagcttttgagattaatagaggagaaccatgcagagtttcttcagctaataaatgaaccccttgagggttctgaagggtgagcactttgtccttattctgaatctgaaatatctcacagattttggtagataggtgaataataagggtgggtacaatttgtcttgctatgctttacgcactacaatgttggcatggtacatgacctccatcttgagaagtggtaccaggattgttcctttaagctcttacgacaagaaatcatggcttcaatattgaggacatcaccttggacaaatatagttaggtaaagactgtactggacgaagcctaacaaaacaaatagctcccacaataaatagggccagacccctttccggattttggattatcactcgagctttatttacccattgttacaccaccccatacttaactattcataagatataagtggacatgtgtaacagtgatggatctcaaataagtaccctagttttttcaataaaaaacaaaataaaaataagtacgcttatgcacaacgtgggtgaatttagttaggaagattttatatagggatgaatatggaaagttgtaatggccagatctggtttattttcagcaatgtggttttagatggaaggagcttgaatcttgttttgtcaaccttggctctgtgagagaaccaggtctcttgaaaacctgggtcttactgttctttatttcaattcaataagtaactctaattctcaaccaattttagctttctgttattgtttggcacttgcgagtacatcaaacagtaggacagaaaactcaattacaaattacttgctttcatagaaactctcaacctaacttcaaagcagaagtgtgagccttttgttttcttgttttttttcttgtttggtgggttaactgtagtaatatttggaagttctctgttttgttttctcatcacattgttggaagatgaatctttgagggttcaattagaaagttaaaagatacgaaccatatgctcgtaacatttgtactcaatgggaactaacatctatagtttgtctttggtttcagtgacttatttgatcagcctgatcaagacatgccccatgccatcaatgtcaccccagctgagcaggaagctatagaacgggtatgcttactttttgtgaatcggtgaactttttttttttgtgagatgtaaacctgctaactcagcaaaatttgtaagccattttatggattagctatgcatgctcttagagtggatgaacaacttatttgcttagaggattatcctgtgtttattcgagaaagattttactgatagctgatgttgtttttctgtatagcttgagggaatgggatttgacagagctttagtcattgaagcatatttggcttgcgatcgtaatgaggaattggcagcaaattacctattggagaatgctgcggattttgaggattgattactcaacactataccattggattcatagttttagtgtgttggatccgagctaagttccgcttcttttctagggttagtgaatttattatgattaattttgccctggtgaaatattagttactaatgtgttttgagatttttttttctctttgtattgggggatcatttattttgtgaggtttaaagagggaaaaaaaagaaaaaatcattgatatatattattgatggatcaacagtaatagttttcctaatccacaaaaaacgtaatgcaatttctcttatattttgtaaagtcattttgagaatcttggttaatagattaaaacctgttgtgatggtcctcatctcaaatctcaagttctcatggtgctcgactttcggagaagatcatttttgataatattttagtagttcatcaaatttttttcatggttttttttttttgacaaagtgattagaatttagaaccactcgtgaatttacgacgcaaacgtctgctaccggcgttagaacctcctcgaactaggatagttcattgtctaaccgcagaacatgttttgccaagccttgggctgctaaattcttagagtgagctacatgggataaaattgctcttgaaaatttagataataaagttataatatctccaaacaacgctcctagttcgttgaaatacatctttccgttattgatagttgtcaccaaagcaaacgaatttgaataaactgcatgaatgggaagaccacacatatgagctcaattaagaccaaccaacattgctaaagttgtacgaattcatactgtacggacctatatgacccggttttgttggctccattttgctgccccgtgttctccgtcattagttctttttttttttttattt

SEQ ID NO: 297695 - DNA, 1510 bp, Cannabis indica
aacataaaatgttatttctgatctttattaataagtaaatctaattatattaaaatgagttatatttagggcacaaaacccaacatgcacttgctcttaagacactaatatacgtatttcaactactatgtttcaatgtttggaggggtgctgcgaagcgttgggttcttcgtcagcgacgactatggctcaatgacagggtggttagggttgttcaggtacgtgtcgatggatctccggtttgatccattgatcggtttgtgcatttcacccttcgtctgccatttggttgagtaaaagtttttgaactcgtctattgtggcatggggttctagtgtggtggattggtggtctgagtttgtggttccttcggagttggaaagataaagcatgtggatggttggatcttcctatggtggattagtgatttttgcttttgtttcttgttgttttatttttgatttattgtggccattgttgtttttgttttttgctttatgttgtttgtttgtcccagttgtggacctactttttttagagtcacgagggtttgtattcttggtttatttctttacctacaatttggtagctacttgttaacgactatgatttcgggcgcatgccttggtatgtcagtctattggttttgttgccgtttgctcacctttattgagaatgatttgcttttacgaaaaagaattgaaagaatttcattaatctgaattaattgagtgaaagaacattggaggtacaagactatatatacagaccacacaactaactctgcacaagaccagtaaaaggtagttaaagaatttaactaacttaactggtatacaacaagaaaggaaagaaagaaagaaacagttaaaaatagaaataacgaaataactgaaactaactaacttcttagaatataggtactcaaatcctaatacccccccttcaagatggagtgtatatattgtatatggacatcttggagatatgattggagaggatggtggaggatagaggttttgtaaaggtgtctgcaagttggtgtgatcctgaaataggaacgaggcgaatagttgaatttttgatcctgtctcgcacaaaatggcagtccaattcgatgtgtttcgttctttcatgaaacgtagggttgttgggaatatgaattgctgactggttgtcacagtaaataaatgctggatgtggctgtggtatgtgaaagtcgtgtagcagatattggagccaagtgacttcacttgtagtagcagccaatgcacgatattctgcttcagcagagctcttcgatatggtaggttgcttctttgttttccaagatatgaggctggcaccaaggaaaatgctgttgggttttgtaccctaaataaaactcatttcaatataatcagatttacttattaataaagatcagaactaacattttatgttgtatggttcacatgatttatttcatgattatatacgtataatgtaagaattctatttaagtccagaa

SEQ ID NO: 297696 - DNA, 5984 bp, Cannabis indica
atttataggatgatactgtaactataacgaatatctctatgaaaaaaattgaaaaataatatttcaacatgtgatttcggacgtggagtttgactaagaggttgtaattagcatttctcttttacaatatatgcttccccttaaaaggtatgtattgatacattctttatttgttttgacattctgaaaaaaaaaaaataatctaattttttttcatattcatatacattataggtatttaggatatcctacttatttcaaaaaaataataataataaataaaaatattgactcaaaaattattttggatactaaaacggatagagatgtattggtgcatcccttttaagatggtgcattataaaattttctaacaatttttatctatacgagatatgtattattgtacctttaatttttaacctatattaaaattgacagtattataaattagttttttttatcaagtactattatatttggcaaacaaattaataatatgattacatagctattcattaccacatcaataccacgtggataatttaacattaaaaaaaattatgcagttttaaaattattattaaattataaatcaattattaattaataaaattacgtaaatctaaatttaaaaaacttaaattctattttttttcaaattaattgtacatataatattaatagtgtcatcaatttatttaccacatatgagaaaatttgagagaaaatttgagagaaaaattaatttacaacactgtgaatagttcataaactatttttaataggctgaaaaagctcaggagcacaataatatatattatataggtcataatttagaggcagaaatcttaaataacttaattttaaataaggcttatttagatttttcaatgacatagaaattattaatgttttggtttcctttatttgagccaattatcaaattcagtttgggtttattaaaaagaaaaaagaaaggttaagactaattattttaaagggtaaaaaataatttatgttgtatgttcttaaatttttgtaattttattttataaaaagataacaaagtatgtagaaatcattattattttttatctcttttttttttttttgctgagaaaatattttttatctcctttatttgagctattatcaaattttgtttggttttctaaacaaaatcaaaactaattatctataactttaaaaggtaaaaaataattaatttgcgaaaagaaaaaaggaaaaatataatttttggaatgtttttagtaattttttttatataaaatttatattattatttataataattttaaaattattaatgaattaaaaataactggttataagtaatgaatatttctacagtgcaccccaaaaaacgaatacaccaaggcactccttcatatttttgacatccaaattattttaatcttaatcaagtagtgataattcgtcacaatctcgagcacaaacataatagagtcaatcccaatcacataaatatacataaataattaaggctcataaactagacacatagatactagcatcttaagagctttctaacggtataaaatacgtccaaaacaaaatttaaagtaaaaaagcgttcatcaaaatttttaaaaactaaattaagtacgagccaaaaaattaaatgattgtttaagtaaagtaagacagaaatttttacgtggttcgagcattaatgatccctagtccacgagtcaatgtattggccttaagagactttgaacatattacagatgaatttttacagctttgaagaaccctagtatctatgaaaggataaaggggtttatataggcctagattcgggtttgggcatacccatgacccgctggggtttctgtgtaaaatgggaccactattggggtaaatacattaaatacatgaccttaaggcccatggcaaggtcctagcttgtgaacgaaaatgttcgtacggttgaaatcccatgcaatctggacaggtgtcacgcatgggtgcagaaagtagacaagaatgttagagggacgtcgttttggacaaaaggaaatatgtctctctttgcggtacgcgcactatcatgtcctgacataggggacaagatctgatctggtaagcccaagtgtcacagagcagccatgtcatcctataagggcttctggaggcacctctgggcttcccgtccatatacgcttcattaatcgtccagaggatgtagttcgctccatctcctggaaggctgaatgggctattaggagtaggagaatcttacttttggaggcgatgctcctggagatatgatgggctagtgcctacctcctgtttggactgggccttagtatactagaaagcttaggtcgggtattacatggaccggttacttccacgaaatgccatgtgttgctcatctagaaacgtggataacatttatccccatgcttccgaaacttgggagttgcaaaggcttgcagtctcacctctgaatgactttgagtacttcgaacacatggattattttgaaaaagtggtctgttcatctcccataatgtagaatgtgaaaggttgggaactttcgagggttacatcttgcactacacatgtgttatctttttgttaattcatgaatttcacgcattcttgggaagcgcgtgaggctcgaggtatcgcaatgacgactatctaatgttaacacaaacctcgaggagaatcttgataatgaggaaatgcttcgagtatcgtaaggtgaatttaatgctacccttccagctacccattcgttggattggcattatgtttctctaggtgagatctgtgcctttgattcaagagtaggcagatcgccaacccttgatataaatacaagcggggtaaactttttcatcacttttaccctttcgaccctttgaactcagtctcaagcgagaaaaatccaatgaaccatgtctgcaacttcaatgaatgtctgatctcttcaacgttgccatccaccatcttctacgaattagagtgagggagtatccaacacacccccattgaatctgatagtaaccacccccagccgctggagcctctagaagttcaggcaaacatggatagaattcttaactggccattcacaatctgtgctggccaccgccacactcctctatccctacttcctccaacaattaagttccctgtattctatgaacaatataaaattcatgcttttgtagaaatttgtgttagaattttaatatgggaatggaaatgtggggattgagcgtatcaggtcttgataatctagaggcaatagggttgttttagcatgaaagtaggtagggttctaggactccttgctcttaatttatttttctgaactgagtggatgtggattataactgcgttgaattgggtttccatcctcttgtctggagtcattagggcttcagatgatatgtttaggtttatattgtttactctttgtgttcttgaacaatcgtgcagaagtgtggcttctgtgaggaccaagttgtgcttccgaatgacctgtctggttgggacctctccaaataatttgcaaagaaggccttcccaatacccatgctattatccttgagtttaggtattaatttcttgggttttgattttcttttagattcattcaatatgtctgataacaactttaatcttgaaactgggctgcaggaggtggttctagaagaacaggcagaagttctggaagccccaccccagaggaaaggtaaaaagaaggctactcccatagtctataactcgtccatttaggagatggatcgaattgaaaacaaattttggagcttgggaatgctccaaagatacgacgagttctaaggcgtcaacaacgttctaagactatgctggcacaggctttcccttgtgagagagtctactactagatgtgttgacgccttcagagtatggagttgggcacacataatctatggggcccactttcctctatgaagctacttcgccaacttctgcgcttatataaggatcacgcccttctaactcatcccatagtcttacaagcttctggttggatggtacatcctgtgcaagcttcaaaagttgaagttccgaacccaaaagaagttttatatttgtatgcatttaagttacagtcgatgcagaataataaaaccaaggtagggtcttataggctggataaacgtctgccaaatcaacgtgtctaacaagtttcaccaagtatgtccttaactttcaggactattgttttttactaccgagtccctgtcgaagagggttctaactttgtccttggacttctccgcccatagtaagaattttaggattcatatctctcattcactttcttatgtgtcacctttatttttctgataaagatgacctcagtttgcaggcaacattgaacaaaaattatccctggcttttgcattaaaggaaattaaatatcaaaagatctctaccaacgtcttgaaggtggaaattttggtcactacaaagaacctccgtagccatggactcattgctaggacccaaagcattaagcctatcagcaactatggctattgtgatcccccagatattcgagaggagatcgctgccatggtagcatcggtgatgaaggaggcagttaagctagacaaggctattgggtttctataccctaactaaaattctatttcaatgtaatcttgaatatttatttatcaataaagaaatagaattactttattacttgtttaatatgctgcttggttcacatgtttgtttcatgatcatttgtttaatttataaattcatttaaatctttatcacattgttattcatgattattgggttgtctacacattggaaagtaataaagattatgtgattaaatatagtctcatgatttatcagtacacaagatttttactgatatgataatcaacaacgtagtttacttacacttgaatagtattgagaaattacccacacaattcaaggcaatactcaaatctgtgtggaagactgtgtagaagaaaagcatttattaattcaagaaagctatttaggtttagtacttggtgatactctccaacataagggaatggggagttagggtactaaatggaagaactcataatttttttgctgccatttagcccagataaaataaaaataaaaataaaaaaattattctctataataaataaataaatttacaaaaactaaaaccctagttatcagcatctttgaaaagaattggtgttccatttcgaatctccacttcaacatctttcggaagcaatcttacaccaaaaataaataaaattaaacccaaatcatgaaaagctgcccccaaatgaatcaaaccttaaaatctattcaggatgaaataaaaagcgtatatggttagatccttcccgcacaaactcatcaaggaagtcttcgaccctaagcatctcatcctcaccggtggaaaccatgactctcgttgaagtaacccgcagaggagagcaccgacgatggcaaggagaaggaacaagatggtggctcccatactctctctctctctctctctcagatctgttaatctcaagctctctctcttgcagatccgttcatcctaagctcccacacgaacccagatctgaaataaaacgtcagaacaaagtattttcatagccttagaagcttggccggaaatgggctccattcccattcccattgaagagaaatgatcgctcgtctgggtttgcataggtaagcaagagagtgagggagggaggtgatctggtttggtcaatgacaatttgtggcacgatctaaatgaaaaagaactccaaacctaaatctaaaacccaatctaatctctcattttattttatattttatttttgtgtttgttttaattttgatttgtatactgtctgtttttgttttttttatttgttttctaaaatatttttaatttt

SEQ ID NO: 297697 - DNA, 705 bp, Cannabis indica
gtaatgtgatcattaccatgataaggtgccgcgaattcgagcagattcaagtcgggagtgaaatgatgagaggctccggagtccatataccaggccggatctgtcacagcagtggtggacgagggggtgggaagcaaagggggattactggcagggggagtaggtgtgtggggtgttgtattctggggttgttgtcgagtgaaataggcattgaatgggcgtggcggagggggttagaaactgaggttagtgcgatgatagcacatgaatgatgtgtggccagttttgaaatagatttgacactttgggggtcttggtggaggacgggggccagttggattccaagtatttggtgatcgaggagggtaaggagatgggttacggggttgatgaaacgatggtaaagcaggttggcgagatggctgtgtttgaggtgagtatcgtggaggaaatggtggttgttgaggagataactttggtctctgttttgggaaggaaaggttagcaaagttggcttgaagggagctaagagatgcagcgacattttgtcgttcaagacgagcttcatagttgagaagaagagcatgaacctcttcactggtgggcttcactggtcttgctaaaatcggagtaacaaaagcgttatactctggtctgagttgttgcgaaaattattaatctacgcaagtgcacgcaatcaagtag

SEQ ID NO: 297698 - DNA, 2089 bp, Cannabis indica
aaaatattataataatataaaaaataaaaggtaaaattgaatgtaataataatattttatgtaattatcaatcaaaaaaattataatttttctaggatgatccgtcatctgctttcctttgttccaggccttctctatctttcagactctatttctgtgatatgtacgtatgaggtggagtcttatgggacccgcttctctattttttccatactcacgccacttgaaacttttgtcattttcacaatttccatcatattcttgtgtcatcaattcagtttttaggatggtactaacgccatttacaactaagcattaaagactaaatactattaatcaatgtacgtactacttacgcctaggggtttgataaattcataatttagaactagtttagttgacaacaatgagaattttaatttacagttttgcgataaaagcatcaaccgtttactttttctttctttctataacttttgttaactagactagagtacatgttcttttaccttttagtatagatgtggtggtagaccatagatgtcacttaaggaaggtgattccacttgggtttatcaaatgtacacgctgtaaggaataaatatgggatagcatatatcacataatattagttttatggttattttaaactattatcaattattagtaatatgggaaaacacacaagtttaagggatttgatttaacctatgtccaaattgggaaataagaaaataggccagggaatgtgacttgactatgtcttgatgagcttttcttaaaggacacacgacacatgtatgtatgtatgtggagtccaacctggccgaggtcgacctttccaattaaaatcttattaaacttctatgtttgcgtggtcagacaaaagaataaatatagagttaaattctatgagaatgtcaccatgtaacaagacagtttatttaatatttccatacttgtcaaggttgtcatagtaataactctcaatggtacactgctgtgaatttatttatgatagtttaacttatttcaattaaaaacaaaaaatattggtgaaatgctcaaagtttgggttgggaattcacaatttaattgtcacggttacttttatgtcttggtcagttggtagtggctgatctcgatatgaattaatctttgaagtaatccttagtcattagacaaaggaaaaaaaaaggtaggagtcttatcaacaagaaaagaaataatattaaaagaaaagtgttgaaacgtacggactccatctgccgtctggttgagttgacatgtgattaattatccatgggtggattaattaatagcttaataaaaatggcatttaacttagcattggcttttcattaaggaatcatggaagttagaacttggaaagtgtcctgtctagtgaaatactctttatcataatcaatgtttaatgaaaaagtaacaaaacattcagattaagtaacattcattccccaaactaaagtatggggacctcacgttgaaagtgattataggcccccctaaaccaatgatatttacaatggtccccccttagctataatgactgtgattcttcttcccacgcagctccagagaaagggattgtggctatatatgggacgactataataaaaggttgagttgttagtttctcttaatcttaaaggctacgtctgttataaatatatatatatggaacactttttaatgggtaatacatcaacgggaactaaaaaaaaattaataagataataatctaaataacctttttatggcaagtttctaaaaattatttttttaaaaaaaattatatttattttttataaaattgaaaataataattacaactaataatttgaaaaaaaattataaattatttttaaaaattaattaaaattaatactttattattttatgaaattatgagtttattaataatttattattgtaaaactaaaaattatttacatgtatattaatgtgtttttttttattagaagaataggagcttgattgtggaatccaattgtcttaatattattcatattcttaaaaataaaacgctactaatacttcttagttc

SEQ ID NO: 297699 - DNA, 2773 bp, Cannabis indica
gaaaggatcaaaattcgaacactaggttttctaatttttctcagaattgtgcaaaaaaaaaaaaaaaaagcgtttaattttacctggacctatacgcagcagcaccaccataagtggccatgaggagatgaaaggaaaaaaaacacccaagaagaatagagaagaaggtgcagggagacttgtgaaaagggggtttcagagttgaagattggcgccaaaagaatcagaagacacgaacctgcactgagggcaaaggtgtggtgacgttatacaaggtacatgagccgtggggtgttaggtctctaagatcggaccatctaataaaggaaggaaagctggattatttgacttctcttttcattcttttcttaatcatacgaacgactcaaggaagaagtgcattgtttcagccaaaaaaaaataaataaaaaatagttatgcattcctattaagcacgtgttcatcactaccataaatatgtgttactcacatacttaattgcacaataaggatatgatattttgtaatgttgctaggcttcactaatgttttaccatttttgtaaaagaaaattgttagataccttcaatgagttgtatattttgtttaataaaatagtatctatttatatacaaaattagatagattaaatatgaaattaactaaataagaaactaactaaatgtaattgtttagtgaaatttttggaacttgataaaatataataaaacttaaaaaaatataatatagacaaagaataagagtagagtttttacgtagttcaatgattactttacgagtcaatattattataataaatttaatttttttttattgatttacacaagtgtttgctaattgtttgaaccttaggatttgcttgagcgctcaaagaatgatattctaatcctttgcatgaataaattttcttatatttatagtgctaaggttctagtatgtacacattgcccatttatagggtaaatacagataatacattgacttagggctcatttggtgaagcctggcctatgagacattaatcttctactgacatggatgccacatcacgttgatagttgtcaaaccatgccatacttttgtggataataaaaaaatataatgcttgattgacaattattttatttccttattcggaagatacgaattctaaacataatcttggatataaagccctaatattgtgagatttggcaataaattactgtgatacagagctagatatattggtgcctattaatcactcatccggaagatctgttcgatgccctctagagatatgatgtgccagaggtgtatcttatccgaacgtgccatctgtctagcatccagaaggcttgactttgctgatggatccagtccattatcttggttgggcctgggaatgagcctggaacaactgagttgaaaccatcttgcaattacacgtgtccttcattcagaatacgaatatcatttacccgccaagccttcaacacttaagggctttcgaaggcttgcattcaaccttacatatggcatgaggcatgtcgacgttaaaaaggtggaaacgtttttgacttccaagcaaatttgtttactgttaacgcaaattttcattaactaaatttgagcctcacagtagggatttcacacagaaaaaattaaagctgtgaaaataaaaatatgaacacagggttttttacgtggttttgtagttaaagttcagcatagtccacgagtcaatcttgttcagatttctgattgtttttcagggcctctcttgtatgagttttttcgtcccctttctgatattctttgtcacaatttataattacatagaggacagttattacaaagttgactgtattatgtttacaacaatcacccctaaaatcatgggatttgattatatatcacgtagtgtaaatgcggtttatgatttgaaaatcatatagcagtgatgttcccgcttctactgggtcaaaaatgattgtgttttaaatcacgtctttaattattatttctagagttgtctccacaggagcttggttccagtgatctcaatagcgagctggggccattcgtccttctgaggtcgacgatgcacgtttggtgtcaaccacggttcttaaagagttctttgaggcccatttaaatgttatcttcgggtttgccaggattgtaagcctcgctaacgctaactggatgaagctataagaagtctacaatagcgagacaagcacctcgcttagttggtatcaagccgatccgacttttacacttagtttgtacattgtatgctaaggactttcacgattgaaacgtgtcactttctttggttcctcgctatttgcatttagcgacatatggtttctcgttaatatgctaagtaccagtttgtatattgatttcttgcctaagacctttcaatcagcaggttacaaatatactctgatacttacgtgattaatgagttatcccataaaaagtgattgcatcgatccgtactccttttatcttgacatgtgtcccctattaatatggcaactgaattatgggtttaacaattgccccttaaaaagggctttttaataattacagagggcattttcgccaaaatccttccttggaaaaaatgcatcctttgattctgatggttgtacggttttaagggtcattatgaatcgtctcttcatattcttgttggtattatatttatccaggaccttagatctactcacaagtatgttgatttaacaacctaatattg

SEQ ID NO: 297700 - DNA, 5314 bp, Cannabis indica
ccaggttcaagttttgtttccaagttctaagttggccgttggagtccaaaatattaattaaaaaattttaaaagtgattttgttttttaaaatttagattcttaatttaaaaatttgaaaagtaaaaacagttttatagaatgaattttaaaaataaaaaactgattaaaaaattgttaccaaacgcatcctatattatttagtgatcataacaaataataacttcttatatattattggtcttgtttgctattcgaattttaaagtgtaaaagtactcaaaaacttaaaaatgtaagaaattattatatgtaaaatgaaacatatatgatcgatttgaaaagtagaataatacgaaaaattgaatatatacgcatttaacaaaagagatcgaagtacctacctctagtctttaatttttttttttttgagctttgatcccacacgagtttcaaaatttacaaaagaaaagaaaatatagttagtgagggtatttgggcttaccactactcttttttcactatcttagatgaatttcactattttcacataatgaatagtaaatttgggaacaagtatcctatatataaaggtaagatattttttgagcatatgtgacacattaattagcaaaatgttttgataattaatttagaaaatcaaatcgaataataaattatttagtaaatcgaaatctgatcattagaatatttaattaaaataaaataaagtcaatatcaatctgatctccaaagtgggaaatgaatttaatttccattaatgtgtgacatcaattacaatgattttataccaattgacttctaaaaatccagccaatataactaacctagtgagttgctatataaattaatgagtgctttttgcatattatttactgttatttcttatataaatgtagggcctcaccagtcaatgttgggattgtagtttctctttgcaagctctactagctgcaaatattagtgaagaaattggagatgtgctaaagaaagcacatgagttcttgaagcaatcacaaattagggttgatgttccaaactattcaaaatattttcgacatatttctaaagggggatggactttttgtgatcgtgatcatggatggcaagtttctgattgtactgcagaagcattaaaggtacgtacatatattatcacaataaattttatgactaaagtaaaaatattgtgactaaaaatatatcattcagtgtatatgttatcactaacaaaatttgataacaacttgttgtaactaaatatatatcaaccacatcactcgtgatgttaccactaaatctataaaggtaataatttttagtcgaaatatataatttttttgttgactaaatgtaacttttaatcacaataaaaaattatttatggtatttagatacaagttgttactaatttagttttagtcacaacaaacattgcgactaaaaatatatttagtcacaacaaattgtaatttttgtgcttaatacctttagtcacaaacttttttttttttgtataatttataattagtgacgactattttacttttagtaataaattttgttatgactaaaagtaaaaaaaaattatagagttaaaccaacccacacaaaaactactaaaaaaaaagttaaaaaaataaatatatgagtaatttccctaatttctatatctaaattattttatttttattcaagttgagatttcttaattacaatatttgttttttttttgttttagttcttgccttttgtctctcaatgatgtcacctaatattgttggagagcctatggatgtggaacacttgtacgattctgtaaatctcatcctttcactacaggtgatattacctacaatatattaacattgatcataaattaattcattttttttttttaaatatatacttttatttttgaatgcacatatcattactctattattattaacactaataattgttatttgtatctaaaatcagagtgaaaatggcggtttaacggtttgggaacaaggaggagctccgaaaatattggaagtatgtaattaagcaaaaatctcttttttatctatatttttttttaccataataatattttggactctatgttttgtaaaaatttgactatttattttctaagataatacaaaatatagtaccttgagttgattttttttttattaaaataaaatttaataataatacgatgtaaagctttatgataagactgattatattttctatatttatctgtgttaaaaagtatttcaagtttgatatattatagtaaaatattatttaataaaataaaatatctaatttataatttttacaaaacatataatcaaaattaattagaatcaactttttttctttataaaattataacttaactatcatattatcattatattatagtggcttaatccaatggagttcattgaggatgttgtcattgaatatgagtaagtaaaattattattagtattattacaattacaattttattaaaatgtcttctattattaattagtagttgatgaatatatatatatagtattatacactaacacttatgagtgtgtgttataaataatgtagatatgtagaatgtactgcttcctcaatagaagcattaaatctatttaagaagttacatccaaaccataggaaaattgaaattgagaatttcattaccaaagctgttaaattcatcgaaaacaaacaaacgactgatggttcttggtacggaagttgggggatttgcttcatttacggtacatggatggccgttagaggtttaaaggccggtggaaaacattactctaattgtcaagctgttcgtcgagctgttgattttttactcaaaatacaaagagaagacggcggttgggcagaatgttacacttcttgcactaataaggtaccaagaattttaatacatttcttatttgtttatttatattactattccttgtgttagtttgactatattaaagaaaataaaagaaaatttaatataaaaaacaatacttttaatcacaacaaatttattaggaaaaataaaaacacatgtaactaaattaggactaaaagtattataatttttgttttacgaaattgaataggattctagcacaatatatcatttttttctgattaaattttattacaatcaatttctatattttcaaaatgttcaataatcacattaattatattttcacatttctataatttcatacaggtttacactcctactaaaggaaaccaaccacatttggtgcagacttctcttgcattaatgactttgattcatactaaacaggtttgtattaattattttagagcattgctatcagatatcagtggtgcctaatacactttctagatatgtacgttttgtgattgatcctagtgatactccttaaaagttattacattaaactgtgtatgagacccaatagctggaccaataacgatattgacatataagtggatgctagattggtgccatttagcatttctcattaatatatattcactaataacttaatttttacaagattaattattactatatataatttatatctcatctaatttaatgtttttttctatatgtattcataattaattaatttatttataggctgacagagatcctactcctattcatcgtgctgcaaaagtgttgatcaattctcaattagaggatggtgatttccctcaacaggtaattaattgcatatgttaattatgatatatataactatatgaatttaaacagtgttaattaatatatatcgggtgttctataatgcactctctagaaatttagataaatttacaatataaaaagcagtgttcaacacactgtttgattcttgttttctatattatatgttgaacagtattttttatattgtaaattattctgaatttatcaaaattttacaagatgtcttaaataaatataacatacataatcataaaaaaaatattagactaaaaaaattcctctgaatactaatttaattttcctcgtgaactatttgcagtaaaatttctcaaagctaattggctgttttaatgaaaatttacagatggctttgggatctttcatgaaaaatggcattctaaattacgtttgctacaaaaatgtcttccctatttgggcgattgctgagtatcgtaatttagttctactaccaactaaatgaattggacaaccgttataagatacttgtgtacgtattgagctttaaatttttaatcgagtctgtgttgtatcacattgcttatgtgtaagtaatttgtggtatttatattatatttagtaactatcaaagcttaaacggaataataaggttttagtaattgaataaataatatgtttggtgtgattttataagaaaataaaaaccaatttctataaaacataatgaaataatattttattttattttttcccaaaaataattaagtgttaagtttttttttttctaatggaattgaagtgtaagttaaggccgagtgtggactgttgttggaaggtacaatttgcaatcttttgtttgtgctggtaacgaggcacttgtcttataacacgtcgtttgtaacaagtattcgcattgtgattcttggttttagaagaatgttgttaaaatcgagttaggtattcttagaaaaaggaacttgcgatttcgaacgtgggtttatttctagacggctgagaaagtcttgcagtgtagggaaatgttggtttgcggacctctttgatgatcatgatgggaatttaggattgtagcaagctattttgaaagtaggtaagccttgtggcttaatttggtgatgatgaatggatttatctttcaaataattacttgctaacattgcaaaaaattacaattaattaatccgatttgaaagagctttttaatgacttattgttttaattaacaaattaactaattaatgaaacagtacactttatgttggttaattaactaatgacagatcacatcaaaaattgttccaaaacattaactgttattatatcatagagatttaatagaaatttatataattacattacacaaattatatatatatgttgagtaaattctacttataaccagtcgcttacatacaatattcacatcagcatatatcaacacatttacaacagaaaaacagattaactcagccctaggtggctttgcctctactagaccaagaaccaggagttagttacaattgtttttgtaactaactcccagatctttgatc

SEQ ID NO: 297701 - DNA, 2466 bp, Cannabis indica
taatagaattgtagttttattttttttttttttttttttttctaaagggcccaatttaaaaatttcgcacaaggcccccataatgcttgggccagccctgccatctatgcattcactatcaaagtaatctctcatgattgtgtttttttttttgaccaaatacaactacctcttcctttaacatcctctttaaccttacactacacaaccaagtattccttactcacagtcgagttccatagaatatcagttctggcacatgccagatttgataaacttgagatgtgattgtagcagataatacttgtttcctgaacctcctagtcttagccctttcaatccacctaatgagcctacataataaacttgattcagctccccaaagaagccaacatttcacctgttaaagacaaactagataaaaagaacaattgaagaacaaatgctctattgtttctagtttgtaacatgcgcagaaaaggtaatgatcctcatcaataatgttgtgtttctgtagcttctcctttgtttgtaacctgtcttgaatagctatccacaaagtaaagctatgtcttgaaatattgagtctaccccacactttttgactcctagtgaccttattttgaacaggatataaaagctaattgtaacatttagaaatctgatatctatcacgagtaaattgttgcacttcaataagctggcttttaagctaatttttgacagaaactaatcttctccaataccaactcccttgtgcaggagcttgataccccgaccaatgttctcctttgatgtagacacaatgaactcacctaacccacaaattgtcttctttgtttacagttgcccaaacatacttaataatagttggagtattccagtctatacaactctcttaaaaccaattcttcctgctgccttagattaacaaacaatttcccatgctataggacttgatcttgggaacatatgttggcccttccagagataagcttgacaaatagcttctatacccttaagtactttctttagtaaaatcatgtcttagctccaatacaaatgaatggacaacaacattgaattggttaacacaacctgcaaaggataagttttgagaactctgagcttttattctagctctcattttgtcagctagaatagtacactccttgcttgaaatccacttgacacaaataggaatgcctaagtatttgaatggcacatctttcctacaaaaacttgaaatattaacaatacgttgaacgtcactatcctttattccacaacaataagttgctgacttcaaaggtttaggttgcaatccaaaagaacaagaaaataattttagaccttgcaagatataatggatacttttgaaatcaccatgaccaaattaaattacatcatctacaaagctcagatgatttagtttcaactcctcacatctatgatggaatttaaaaatttgtaaagtatcacaaggtggctggagcattcttagatgcactaccgggttggcgcgatagtgtccatgagtatttcaactcatggagacatatgagtcccctcatagtcctcatatgtctgccctactagtcacactgactagtagtaggctagtagctcacttagcactaaagtgacagatgtggtggagagctaacactaggtactccccctaaaagagcattctaagcttttagtcttctactaggaacatatatgatttttatttggtagacatatggtcatcaccatataccaaatcacagagtttctcaaatacaattgcactattgtattcatagacccaaataaatagcaaataccaagtgccatcctgatctggacaatattaaaaatatttacgaaaattccactatcgcacaaactaagcatcaccatgtcaccaacatgtcccaccagctcaccacttgaccaccacttgcccaccttatgggcattaccttgtaacgtgctatcttggctcgcactttacaccaagcagtgtaggattacacaacttactggatatttctccttatggattaggaactactgactgtcacccttccttacgagatctgacgtcctcgtcaaccacacttccggttgggtcaaagttttgataccatattgtaatgctcccgcttgaagcctctattgggacttcccccacaaatatatggatcttatacatgggtacattactctggctgctgaattgaagactgatcctacagaccaacacgagtattttcagtgtgctttgtcctcactcacacacttcttagaaaaacttcgtaagaggtcacccatcgtgaaagtaccttaggtcaagcacaattaactgtggagttctttgggctaccagatgacaaggtgtatcttgttttctaagtaacccatcacgaaagaactccacagttaagtgtgcttcactcgaggtaatttcaagatggg

SEQ ID NO: 297702 - DNA, 2460 bp, Cannabis indica
tcggtttgagtgagtgagttttctaggcatagtttctggtagaagttttgtgggttgtttgggttgttcttggttcgggtagaggctgtaaagaagaagagaaatatttttttaggatcccctaccttagaacctgtagcaagaaagaaaaagaaaaaaaatattagaagaaccatagaatattagttgttgtaagaagaagaaaaaataaaaaaccttacccatttttgttgctgccattagagtagagaagaggaagaaaacaagaagaagaaataaagctttagaaccctagaaaccctaagaccaaaagaagaagaagagtagagtatttgttataacccttaagagtaaaccctagaattttgctttgtgcagctgcttgagaaaagaagaagaaaatttgaattttagagaaaatagagagtggctgccgaagtgtgtagaaagctttagggtttgagtgttatatctttggcttttatattagggttagatctttagggtttgttttgtgtcttcttgggctggagacttactgggccgaaattaataataaaatgaaaaggaattgacctttgattggagagagaaagttctcttgggctgatatctttgcgaggccggtccaatcttgtgaaaaaggagagtcattaattgactcttgtgttgaccgtagcattgaatagcaaagggtgagaaggctttgattggagagagaaactctcttgggctcattctatattgggccgaacctttgtggttcctttgatgggaattggattattgtgatgctcttgctattgggctgaaataaaggttgaaagtgttaaatttaataataccaattattttgtggatgtacaaaataataaattttgaaaaataccaatttgcactattgtattaattgtttcttttaagtgtgttggttagagcaagtaatttccaacacatacaataagatttagactgaggttctgaatgaagggaaacatggtcaaagtcatgaatcaaggcttcctcttcttcagtgagttggatagtttggctagggttttcgaagttggtgttcatggttaattaaagacatgcaaggtgataagattgaaaacaataaagaagacatggataaaagagaataagaactaaataataaacccacccttaaatagttgaaaccacataggtagtacttaaaaaatatcatcaagggaagatggaaagatgccatatccgtcctagcatcccctagcccaaatcttcgccaaccaagaatcatgatgactcatatttgcctgacgacagctaataaatgttcgattagatcctagagaggagaatagctaagggttttctgaaaacacaatacataggagtctcgatctaagagaggggtagagaacattaaatgctgagtattaatttataagaaaggggcaatgatggaagaaaataaagaagaagagaaaggagtatggcatcacgttgaaagaaagaaaaactagaaggactagaacgaaagactgagagttccttaaagagttcgaaaacaagttaagaatagaataatttgtgttttgtgttgtctctaatcttctacctcttctcatttatttatttgtatttggtgttttgatttggaacactatatttaatttgtccttataagttttcactttactatctccatattttctaacatacatatacattaaaaactaatcaatatgagaggttatacatttaaaagtaaagaaggtgaattatgttgtgagccacgaatatttgtgggaaagatataaagaagtgacataatataataaaaagatgacatgggccaaagtgaagccacgaattgtgtgtgtgtgagagatagcttttttgtagatgcatatgcaactttatgttattgttatttttttcgattattattcttggtgatcgaaggaagaattattcattatggctactttttatcacagccaataaaaggacacactttattacatgaaaaataaaataaaaaccaccaagatctatataaagtgctatacgaattttaaaacgaatagaacttttttttttgtttaaatgtttagtgacaggtgatgagaaagaaaagttatatgtatatgtatatttaactttgtgaatggaacaatatttctttctggatctattatatatacatatattataaactcaactaggatttaataaagcaatatatatatataaatatattgattggatacctttgacttagtggttggatattctaacacttaatatgatttccacctacgtagagatattccaacgatgtcggcactatttattaacaacctattattatacaaatacatattaggtataaacattcttagcttgatttattattaaaatagtcagggtcggccctaaaatgtagtgggctatagggtaaaaattattttt

SEQ ID NO: 297703 - DNA, 6224 bp, Cannabis indica
aaatcaattcagggtcctatttgtactattttaaaaaatacagggtccattttgtcatttaacaaaacacaggatccaattggtaacttttgcaagggtccaaaatggtatttaccctttaaaagtcaaatcgtttcttttacaaaattcagattttacatatacaatttacagaagaagaagtaaattataatcaaaaatcaaactaaggcgaataacgagagagggtcttcgaaaacgaacggctcagattattccacgtttcaattcaagatcagagagagatcgaaatagaggcagcttgaaggagctgttgagcgcgtgagagttgattaaggagggagacgatcttcacgtggtcagcacgcgcctgatcaacagcctcagcttcgagctccccgagctgagaacagagtctctcctctgcttcttcggcgatccggagtcgctgccaagctttgagtagctcgttcctcatctcctcctctctctcgcggctctgtctcagctcttgttccaattcctcgttcctcttcttaagcgtagtggaaatctggtcttcgaaggaggacttatcagttggcttggtcaccgccattgttgtcttcttcttcttcttgaattttgttaaactgaaaattatgtatggtttattgtgtgagttgtggtaatgaataaggtagctttttatagggccaaaaaagtaagagtgtccaggttcaatgaatgtagctacacacgatttttttgcaatttcgtttcctgacgtatttgcttcttctgttattataaatataaatgaaaaaaataaaaataaaaaaataaatggaaataaattatagactaatttcctcttgaattttcacatttgttaatttttttaattgttgaaattattgaatttaagtattttattagatttaaggattattttttattagatttaaggattattaaaaatatatgttgtattgggccgtattgtattgtattatattgaatatgattatatatcatatttttatataatactatattaaattttaatttatactaaaatattatatagatgaagctcatacaattcaataccacatataattttacattaaaaatattttatgaaatacaatttaatataatactatacaatacaatacgatgtaatacggcgtaccaaacgaacccttacgagtatgatttagtagatatcaaattaaggacatgatttaatatatggacaatcgtcacatttgtaaaattaaatgaaattggacagaagttcttaaatctaataatttcaacaattcagtaaaatttttaacaacttgaaaaattttaaaaatatgatttgatatatgtcaaaattcatcgggtaaaattatatttcaattttattcttatgtttaatttttgaaataaattataggacatcgtgctcaaaataaataaataaataaattttaagacagtcttcaataaagaaccgttgctaataagaactttttagtaagttatacttatttaaggttaaggtttaaattttagagaattttacatagggttgataaaatttaaatattttattgaataagtgattgttttttcttacattgcttggtaagtaattatttaaattttattgtaaattattttttattttttaagaaaaaattataagacatctcacataattaaaatataaaaaaatttacataatagattaaaaattttaaaaaatactttaacacataattttttttttatttttacacttgttattattacattatacactttcatattacaaaaaatcaaaattaaaactattttgatcattgaaattttagaatttccaaatatatatatatatatatttttcttggataaaagtagaacgaacgtggtccactctttacgttaagttaccttatctattctatactatcaaattgttatttgtgcacaaaactttgccatgctcaaccccaacctaaccaaccatcatccatggccatgaccatgagcttaccatctccaacctcaaccacactcaaacataataacaacaacaacttttgcttcttcccaaacactacaacaaaccatctcactttcaatcaagaataataattataacaacaacttaaccttaaggtgcaaatgcaatgcattatttggagttggagatatccctcaacaattggaagaggttctccatttggatttggaccaaacttactattacttggaattagagaggattacaaaggatttgtcagaaactcaaaaatggggttttgttgtttttgctggaatcatttggatttacttgactgcaaggcctggtgtgcttttgggtgccattgattcttaccttcttgctcctcttcaattgggtttcaatagtttgattgggagaagaaatttgaagaggactgattttgttgtgggtgagaaattgggtgaagggtcttttggggttgtttatgctggtgctgttgtacctaaaaatgttactcttgaaaaaaagaggggtaaagctaaaacaaacaggttggatagtaggttcaaggaaaaagtcattcttaaaatggtaactagttctatatttctctatacttaatctaaataaattctttttattcaaatttcttgcattttatggctattttgcattgttttcggtttgtttgaaagcaactgtatatttactatgtagtgtaattattagggtggtaaaaatacaaaatgtgttggatatgaggtgtaactaatctatatttctatatacttgatttcaaataattatgcccttgatttctcaatggacttttaaagttgaaatttttaatagttatgtccaattattgaaatttcttgcaactgttgtattggaacttttagagtttatttagtatttgtttacatttcaaccaatgtttagttttggttggagagaaatgataacattagaataaaatttaaaatgtataaaaagaaaaaggttgaacaaaaatttattctttattttatcttgcattgaaatggaagtctttccgaatagtcatagtagaaagtgatatttcaatactttaaaatgcaatctgaaataaaaattgattctttttcattcattacttcaaaccgaacgcaaccttaattcctattttgagtttattacaatctatcagaacaattttttccctgatttctcagtctagttgaaatttcttgctactgggtagtgttgggatttttggagtttatttattgtttattttaactacatatccaaataggaattgtgaattgttttgtgttatttcttattagtgagaatttgcaggtaaaagttggagtgaaaggggctgatgagtgtgctgattttgaagaatggtttaactatagactctcaagagcagcacctgaaacatgtgctgaatttcttggcagttttgtttctgacaaaaccaattctcagttcacaaaaggtgggaaatggcttgtttggaaatttgaggtacattcttccatggtacataattttcctttctttttttttactcataggctaaatgataatatatttaccatttaccaaacagggtgatcaaagtctgttggattacatgagggagagaaactttccattcaacttagaatctgtcatgtttggacaagttttgcaaggagtggactcagtaaaacgcagtgcattgataatcaagcaaattatgcgtcaaattattacttccttaaagaaaatccatgacaccggcattgttcatcgcgatgtaaagccagctaacttagtggtaacgaaacgaggacagattaagctcatagatttcggtgctgcaacagatcttagaataggcaaaaattatgtccctaatcgcggcctccttgatcctgattattgtcctcctgagttatatgtcatgccggaggagacaccgagtcctcctcctgagcctattgcagccttactttctccttttctttggcaggtattgtgatttcgtaaccgttaaaagaataaataagtatttgttagagagtctcgtattactgatgtatggaaagatagtggaatatataaaatgaacgagctactcctctcattaccaattagttttaagatagaacttcattcatcttattctaaattctaacatggtatgagggcaaaaataaacaaaaaaaattcgatcgaagtagactaaaaaaaaaaggctgcttatgatcgagttgtggtgagcaaataaaatagctactatcttcaaagaatattagagaatcccacattttgagataaaacctcattcaccttatcctcaatactaacagtattttttggtagattttgtttacatcattagtaattttaccctccaaaatatgacgagtatcatattcacaatttggcgttagtaataatttagatggcaaatgtaatagttgtcataattcgaggataaaattactaattatataaggaaagtttagcattttccttatagtaatagttcagaaaaaatatttaatatggataatagttcaggaggcatgttttttttaattaaatcgagttgttaatgctttttatcatacttttgcagctgaatagtcctgatctgtttgatatgtactctgctggaattgtactgatgcaaatggcagtaccaacattaaggtcatcagctggcttaaagaacttcaattccgagctaaaaacattcaactatgatttaatccgatggagagaatacactcgtcgattgcctgatttaacgattcttgatcttgattcgggtcgaggttgggatctagcaacaaaactaatctccgaaagaggaggataccttaaaagagggcgattatcggcttctgctgcattgaggcatccttatttcttgttgggtggtgatcaagcagctgctgttctttcaaagttgagctttagcaaagactgaatatgatatggtacagatgagtacattattacattacattgcatatatacataaattatacacttttcaattctttaattaattattgtagctcttgcatatgtgatttcaagagatcaaagtgtacttttgagttcagctaataaatatataatgaaaaatagctgatgaaagctttgataatatagtgaggaaatttaaactaactttgagtatgtttttcttttgtaatttgcagtactaaattcattgagttgttccttattgataattcttaatttccacaacttaaacagtaatattgctatcatatttataagcttgtattgtattatactatagtgtgttagtaaattttttctttgatacatttcttattgttatggaatcagggccagtcctgaaaatatatgggatttaaactatgattttgaatattatgccaaacacttcagctaactaacctatggatatttgtagtttataatacacttaaattttattaaaataaaagcttaataaaagcttaataaattttttatttttttttatttttgggcttccgaaaatgttggcccttgacacagacttagcccgcctatgtatggaattgaccaaaattgtcttgtgaatcaccaagttttgaataatgtggatcttgagtgaaccacatcgatagtttaactttgctaggctgcttgtactggtttttattacagtaccaagaaaatagtaatcactccatactatatcaactaaattttgatttgggtagccattattttgaaaagttaaaagttaaattattttaaagataaaagatattataaaattttaatttttcttaatcataaatcattccatacaaaataattcataagcatagacaaatttaaacacttaaatttataggttagttcgcccaccatacacaacttcaaatttgtagatgtgacgataataaagtttaaactttttattgtatattatttttatataatatatatttaaatatttgtacaagttttagatttaatattaggctaattagtaatttttccctttgaactttgacatgtattaaatcgtgctccctgaacttttttggccgttaaaaattcctcctgaactattgagattgttaaatttaaggacttttgtttaattttagtaaaaaaaatttaacatggatgaaagttcaaggggcatgatttagtacatattaaagtttgaggggcatgattt

SEQ ID NO: 297704 - DNA, 2674 bp, Cannabis indica
caaaatgaaagtaaattttttttttttaaaattttatttttgaaaaacaaaaatgcgttctataaccgcttttgttttttaatttttaaaaacagaaaacaaaagtgtgttctgtaaagtttatttttatttttaattttttattttatttacgtcgggtctaggtccggggttggatttgggttcagatcagaggacgggttcaatgccagggtcgtgggggggatttgggtccaggtctgatcgaagtctaaaaatattgattaagaaaaaaagattgttcaaaaatatattgaaagtgtcttttttaaaaaaaaaaaaaattgattctcaattaaaatattaaaaagtaaaaacagttttacaaaacatgttttttgaaaaatattttcacttttttaattttaaaaatagaaaactgattaaaaagtgttgccaaacgctacataattatattcatttaacccaaccaaaattaatcagcaacataattgattttaaaaatatttgaaattaattttttaatagattatttttgaattaatttagagaaatatgcacttagtttgagaaataatttaagataattgatttctaagtaaaccagtttgtgttctaagtatttaattaaataaaaaattaatgtttaaattgaattttcgttaaaattcaaaatacttaaatattggataattttttatatttaattaaatgaaaaattatatttgtgttgaaaattattattttttttcaaaattaattttagaccaacataaataagaaaatttttagaatttttattttattttattttaattcagaaattttaaaaattatatatttaatttttaaatattttgagttttttaaaattaattaaatatatttatagataattaatttgagttgaaaattaattttggaccaacttaaattgagaaattttcacaatatttatttaaaatttaaactaagtgttatcctaatttttacccattggacgtgacttgttcacatagtcaaagcagaatgtaggtgatatacaacgtgtcaagaaccggacagggttatcctgaatagtccattaattgtcaaagtttcaagataatcaaccaagaataagcaaaaggagttcggcaagccatcaagactccggcaaccatgggtggctgggcaggccttgagaataagttggccagccaagaaaggctatcagaccaaggaggtctgtttgacaaaaaaggcctcgcctaacaaggaagattggtcagctaaattggagagcaaagctgtattaagcagttgtatgacaaagctggagaaagaagttgaacaatagagctgtgtggaaaaggttggtcggaccatacatggtggaccaatagaatgtcacatctcggccaggccctaaaactagggctagacgaccaacttgtgtagacaactccaaatatgttgaacggattgcgggacaattccaatagtccatgaagttgggatattccctcaagatatgagttgtatattctaggaatttaattatccttttttgtaatttaaatatgagataaaaaaagttattaatatcactatattgaaaagattactgttgggattttatgccctaaataaaactcatttcaatataatcttatttgttatcaatagaagattagaagtcatttatgtttacatgtagttttcatgtttatggtttaatgtatacaatttctgttaaatctaaaacatatagttattcacaattacagtgatgtcaacacagtggaaggtaattgtgattatatgcttcaaaagataatgtcccttaattcatcagtgcactagatttacactgatgtgatagtcagcgataaagattacttacaccttggataagtgttatgttctttccagaacattggcaaaatatgcttgtattggatgtatggagtatacattggaatgggaccgatatgatcttggtaaagatattataatcttactgttgtatcttcctaacatggttaagtttgatctcaagagtgttatttgtgttctttgagctgttagttaaagactaccatgtggtttgagtcgaacgtacagttggggaacatgatagtacaattgagtgggagcgctaaacatagatatagaatctacggcttctatactggaatctacggcttctatctggacatagaagtgaaatgatgatttccttcggtcttgatagtatgtcaagaccgatcaaaatcagaggaatgacaatagccaagacttgctacctctaccggtagacggacatctgcaagtcatcattggaggcccgcacatagctggagatttgggcaaagctcaagagaggtatgcccgaacagcacagcacgagtaagaagaagtgatcctggccgtagaagaaaggaagcctaaaatccaacgggtaggagggcctaccatcaccttcaacgatgaagacactgtcaaaatcaggtttccacacaacgacccgtttgctgtggaggtccagatagctaacaaaatggtggccagaaccatgattgataatggagcctcttccaatatcttgttcaagactacctatgaaaagatgagactccagctcaatgatctaaccccatgtctcctgtctgcctatggtttctccggccaa

SEQ ID NO: 297705 - DNA, 4018 bp, Cannabis indica
tttaaaaaaaatataattaaattacattaaatttaattttattattatttaaattaataaataagtaatgcaactgtaatgaatgttacaaatacttagtattaataaaatcttcttcatattgaaaagttatttaaatccgacatttaattaaagtagaaaatgattacatacatgtccatgtaataaatagatatttatgatggatgatcagatcaggtctccttatccttattgtagacagaaataagaaattttttgatacatttattgtacacacatggtctttccaagtgaaccaagtgccctgatttctttattccttcaaatgttgacctttctccaagttgcctgtataaatatatacacaaccaattaatatcacacttcaaaacatacccaaaatataacactatattagcacttaattggaacagaaatgctacagatagtatttattgtgtttatatatactatacactaattatatatatatatgtgtgtgttgtttgacatactgtttcatgttttgggcaagttcttgcttgaaaatctcatcattttctccccacaaaagatgaattctctgcacatacagccatagaaggcaatcacaattaatgggcaaaattttgggagagaaattttgactaatagaacatatgtattcatatataggtacctgtggaaaattgggaatggtagggtctttgctgttgacttctagagcttcaagaagttcacatctctcctttctattggtgaacataacctatatatatacacaaatcgttgtagaaaaaaatgatgaaaacagaaaaattactccaatatatatttttggaatgaaattgaaaaaaaaaaggttaaataagttgtgtaaatagcaatagtgcattttgacttattaattgttatagtgtattttttttggcacacttttctaaaagtagcaattgttgccactcatttatgtaaaatatatgctagtttaagtgaagttagttgaatatggtgtcattataaatgccacatttcatcaactcatcactctctcctattcttttcttatttattaatttcttaatattatcattattttatttgttaaaaatctataaaaaagaataaaaaaataaaacagtaattattcctttaatttaaattttcaaagttcttttttattttttttaaaaatatatatcatacaatttttgtttatgatatacttgttttgtaatatttttttaaaaattttaaaacaaaaaaaagtatcttttaaacaaaaatttaaacatttttttttcaattataatatattatattttcttttattaatattttaaatttagaccgtacctgaccttagactccggtcccaaggtccaaacttgaacctggactaggtatcgaacttgagacccagtctctcggaccttggattggactcaaactaggactccgaactagcctcagcctcggaccttgacctcagatccggaccctagccccagccccggaccccaatcatagcctcaaactcgaacccatatcaggtcctatcgacctggtcctagattcgagcctcgaccccaaaaatactggaccagaccctatcccagctcccgtcccaggccccaaactcaaaccatgtccctaatcttggacccaaacgcgaaccccgaccctagaccaggaccccatactttagactcgacttaaattaataacaaataataaaatttagaatttacacaacatttttgtttttattttttaaattttatatacaaaaataattatagaacgcatttttattttttaagaataaaatttttatttcttaaaaggaaatatatatagttttgatttgaagtgtgtatgtatgcgttgtagtaaagtatatacaataagttataaccaattaattaccaattacgaaacataaatacttctctctctctctcgaatcattgcaaaatgttccgactatataattaattaatattgtatctataatattatcactacagtatatatatgtctttatttaaaaaaaaaaaaaaaaacagtatatatatgtcactatcacaatatttttctctatatcatagattatttgttttacttatttttgtagcctttttatcactacagtatgtaatagttagtatgtctatttatccataatggtttctcatagtctttttgaatatggacactaattaatttgatcattacacaacccttttaaaatatgattcaaaaacctaatacttttcatagctattttcttaaattaaatatcgatctctacaaaaattcatgcacgtttaaatagcactaattaacaaaaaatatatatacgatactttaaattgtatttaattatttatcacattttataaaattttaatacctatagttctacataatttattttatccaaagctaagtatcaaacaaattgttttatactttatatatatacttgttaatttgaacaatttattttgtgtaaaaaattattcagatttttttttaagaaaaaaatgaaactaacaaaaggaaacataccataaatgttttccaataatggaatcactatgaaaatatttctgacagagcatattgggtgattttacactataatataaatttttttccaacacatttatatttaagacatattttgtaaataaatttataatattaaaaataataaatttgaactgcttatctcacattgaattgaacatatttttgacttgttaaaatttttaaaattttataaaatgtctttcaaaaaaggatgagtaataatagtaaatttaattagtagtaactaacctcaagataatccttatgaagacgatcaggaaaccaaagctttttataagcagcaacagacaaaagagatttaagacccttaacagaagtgggcaacaaaagctcagacgacgatgtaaacccaagcctttccattgtcgtttggctcactgaacaagtcatagccaatatagacccagaaataaccatagcctcaaccaactcaggataaagctcagccaatttaaaacacaccatccccccataactaaacccaaccagaacacatttatccactccaagcttccttaaccccgttgccaaacactccgcctggaaattcggagaccggtcactcttatcggacacggacccaccaaagaagagaagatcgggtacgtacacagaatacttcttagtcaaagcaccaacctgaaactgccacgtcacgattccctcggccgcgaaaccgtgtactaaaactactacgggcttattgggtttgctattgggcttgggcttttctccttttttgggcttgggcttgggaaatgtctcggttgggacccagaagttcattactgttccgggctctatctccaccgcgtgtggggccactccggctagcttcatgagcccatggagtaatggtttttgtgcagctactaagttcaccattgttataatagctcttcttcttctctctctacaactttctctctcttagtaagtttatgaagagtgaaatttgaagggttttaaagtgtgggaatgatcggttggttgttgtaagttgatattataataaattgtaatggtggtcacatcacaatccatatctggtattactattattattattattattattattatattgaaaaagaaaaaattagttacaatagttgttaagctaaataagctgtgttgaatttattaatagagaagatatacaatataattgatgagttgatagatagtgatcatatgggaaaagagaaatttagaattggatttacatttaatttagacaaattaattaagaattctggttgaagatggtcaccgatttcttgtaagacttttcctccctcctcacgctgaatttcaattattttagggagagaataattaagagtattttttttttcaagggaaaatattagaaaaaaatggttttttttttatt

SEQ ID NO: 297706 - DNA, 4171 bp, Cannabis indica
ccttccaattaattatttatcctgtaggaccataaattcactagtggaactataattctcatctaaatttgcacactactttctagttctagaattaacacataaagggaaccaatattcgattctttaaaaaagtcaagattctataattgtagatcatgttcctagtcatccacattattagattcacaaaacaaaagttgtaagaatcatcttctttgaaaaactttaacaagtaaatcaaagaaactaataacttgaacaagagtccatgaatacttaggatttacatcgatctactattgataatggttatgatatgaattatgtctttatagtaaacaacatgtttaataaagaaagttttgtgaagcatgtagagtggggaaatcccacaattttcccttttctttgaactttaatcatgttaaagttcccttagaatcatcaacactaacatatggggacccttacccattatgtctaacaccaactataggttttacatccacttcatagttgaccacaacaaatacctggatataccctcttaaaactaaaggtgggcacctgcaagcctttgttcaatttcaaacccttgttgaaaatcaatttgatagaaaaataggattagggtgaatatataaggcgtttagtgatctgctgatagaaaaaagaacagatttccaacacccttcctcatacatcagctcaaaatggtagatttgagaggaaacatagacaccttgttgaaatgggtttaactctcccttcttaagctaacattccacaaaaatattggtgggatgcttttcaaacctttgtgtacttaatcagtagacttccaacacttgtattaggtaatatctcaccatttgatgtattgtctggaaagaaataaaattattataagttccttaaggtttttgggtgtagttgttatccatgcctcagaccatatcaaactcataagtttcaataccactccaaaaggtgtgtcaatactagatatagtgatagccacaaagactataaatgcttgagtaataaaggtagactttatatttcaaggaatgacatcttcaatgaagatggattccctttccaatttagtttccttaatatttttcaatctaaacaacttgtacaagtctatattccttcctagtttgttgtgcttcctaatatttccactacaccttgaacccttcttctaattatccaaacttttctatctcaatctctctacagcaactcctgaagcatcacctcttattggttgtgctcttgattcatatacaatttctatctcatctggtatgtcacatctggttccatctcatcttgcttttgatttagatgatgatgatgatgttgaccaactttttgctgactcccacactgctactattatgatgttgtcattctaagacctcttattcctactcaccctatggtcattaagagaaaagcaagtgtgtttaaacccaaggtctatcttggtgaagccaagtggcatgttatctttgaggagaaaatttttctctctaaagctcttcttcacccaggctagacaaaaactatgcaagatgaaaatggttctctaattcgaaacaatacctcgattcttataccttgcacacctaaaatgaatatcattggtaacaggtgggtatttaaagtgaaaagaaatgtaaataatttatttcaaaggtacaaggctctcttggctgctaaaggattcgattaaagacctaggatagattatagtgaaacatacaaccttgcagtaaaagcttcaatagtgagacttttcttgcccattccaatgtccaaaggatgggaaattcaaaaactggacattagcaatgcattcttgaatggccagcttgaaataaagaaagtatttatgcagcaataatggggtttcattgatccaaacaaaccaagacatgtgtgttaacttctcaaatcattgtatagtctaaaccaagcaccaaaagcttgttttgagaagttgaaaaacacacttgttaggtggcaattcgttaactcaaaagcagattcctcgttgttttactaccaatataattatgatataatgctagtattgatttatgtcaatgacataatcattactggaaaccattcaaaagttgagacagcttgtagcaaaattaaatcaagaatttgctctgtaagacatgggactactggagtattttctgggcatagaagttgtacaagatgagacagttatctatttaattccagctaaatatgttcatgaaatattggagaaaaccaacatgctacacttgaaaccttgcccaactcctatgacagtagggaaaactctctatttctattggtgaattattagaaaatcctacagagtatagaagtcttattagggcccttcaatacctcactcatacaagatctgacttaagctttattgtaaataagcgaactcagattctcaaagcccaaataacagcacactggaatacagctaaacgcattctaaggtatctcaaaggaattccatttcatggactgcacatcaacatttgtgatagacttgatccaatgggattcttgatgcagattaggtaagttatcttgatgacagaagaccaaatagcagggtattatgtttatctaaatacatgacctcttggtcatctaagaaacaagttatggtgtctaggtccaacaccaagtcaaaatatggagctcttgctcaagtggctacagacataacctggattcaatccctactacaagagatcaaatttcctctggctacaacaccaatcacatggtgtgataacatgggagctaatgcattggcctccaatcatgtttatcatgctagaacaacatcaaacttgatgtgaattttgttaaagataaaatactcaacaaatagttggaagttcaatatgtcccctcacatgatcaagtagttgattgattgaccaaaagtccccctagtacacaatttcaattccttgtagacaaactaggtgtggttcaatccccacttagtttaaagggaagtgttaagaattaaaatggtaaccaatgacaagtcaccaatccaatttggcagctaaggaatatgaagtggcaccagctcatcatcattgagtaatcacatattttgagcatagcagagagtatctttctgttattacctttttgagagtattctatgttattgtaatgcattatttctgtgtaatgaggtgttcctattatagaatattcttataattgactataagtatcaatgaaatcacaaaagctctttgagttgaatttattcatttgtgtgtttgtgtaaaattttactaaaaaagtaatgtcaaaattcaaagttactatataaaaataaatattttaatatacatatttatactacaataacttactaattaacaaatcctaattattcaaaataagtactaaaattaaaaaccaatcttctatattcatagtctcgtcgtccatatcttcgtcgtttggagcatgtgtggtacagttgtggtggtagtataagccattgatattgagaagaaaatgatgatgcttaaagaaataaaagtaggaccgatttaagagtaggacagttgtgaatattgtcataaggctacatacatatattcacgaaattatttggttaacacatacataggaatatataaaaatttgttatatattattagaataatgatttagacacatcaaactgcacacatttttactatatacaatgatatgtaattgtttacccaaattttaacgacgatgacgtgtcaagagtagcaacacgtggcacaaaaataccgagactaaattaatgaagaatatgtaaagtcatgaccgttaatcatgaagggtggtctgaccgttagaatgaaagtcagatggtcactcttacccctagcttgagtaaggtgggtgtctccaagaaggaaaaacgacggactaacaccttcgtaagcggaatgaacaatgaccacgcacccacatgccaagttaatctagggggtatatactactactcctacctcaaatgcaatgatctccatggggttagtctagcggtgcaccccttaacccctaaaaggttagtctaggggtataccccttacccctagag

SEQ ID NO: 297707 - DNA, 4239 bp, Cannabis indica
acatatggcaataatcaaacattttttcaatagtacaataatataaaaatatatatttatatatatgccatgatgaacatttttcatcaggcaaaaataagagattaatcatatctcaattcattataacgatccccaataagaatagcatacacgacttgaattttttttttttaacaaaatcgaatgattaattatatcaaagaaaaataaatcaattttgcctatgattgtcatttatgatatatttactatagtaatcacatttagtactgcattaaatgttaagcatcccacacgttgtgattaattaagtagtccattattattatatatccaacctctcataataataattaatttacaatttgagtggaatcttactctcgtttgatgtcattagtgaagaaacaattacgtaattaatcaaggttaaaaataaaaattactacaatataaatatatatatatgtgtgtctataattaaagaaaaaaacaaaaaaagttagtgtggtaattattttcagtacagttaatgatcgaaacattaatggtgggatcaacaaaaaaacgactacttgatggatcaagttggattatttcatgaaaagattaacaaaaagatcgatcagttagttaaatcttatgattatatatgtgtatatatatatatgtgatgtttctcaaatagtatgatgatgtgttgtaaagctatacagttaattttaattttgatttacttgatgatgttatttctatttgttttttccaagccacctattaaaatttgttggattggttcattttaatttcttacatatacagtacttaaataaaagtaaacttcaaaatattaatgttgaattttgagatcttctaggatgcatttagaaattagttactgtgtatttaaaattgagtttaattctgagtaataacaaaatttggcacgtgtagtaattacgtaagtggaggtaataattaaagagtctcaattacattttctaatttttacagtggatctcataagaattaagtgtaattacaaaatattacttttttttaaataattaatgtcactaaattgtttagtactaactcattttgtcaaacatgaaaaataaaaattcatatgcaattatttttttaacatctgaacacaaaatattttaaaataagtgtaattacgctaatatgtaattatttccaaacgcacttttaatgtaatcaaaaaatttatattttttttttgtaaaagcatactaatattattgaaaattaaataatatcatacgtacagactaaaggactatgcatttcaaaagaaaaaagaaaaattatctagtcgaacaagttgtccatccatctaaagagtgtgtacaactaatcatctaacttagttaacaaatttaaaacaaaaaagaagtacatataactgatattacgcaaaattagagcactcgtacaacaccttctctaaattagagaaaccttaaaatatttaaagaaacatactaaaaacacactacagtagaaactctaaattacttcttaaagtttgtttaaaattaattccatatttatagaatagctttaattattctaaacatgttttagtaattgttttagattttaataattatttttatatttggatatattaatattatacatttgaaataaataaaatatattaaaatttttaaaaaaatagagttttggtgatgtattttaaagaagttaatgtatggtgtaatataaaaatgttgtgaaataaagaaaataaaattttagtgatatattttaaaagatgtatagaatagaaaatttgttgggagtgttcttagacatttcatttcagtcattgatccacatgaaaaaacaaaaaaaaaaaaaaacttggtaacatgttaccaaaactgctagtaaaaatttgacaaatactcaaacaaagaaaccaattcaatctcacgatagtcctcaaaataaggataatttggttagtggacctagaaatttaaatgttgaaatggcctttacatttgggaagggtttttttgaaaaaaaaaaacaaaagaagtttcaaaacaacggatctttggtgggctatggtttcctactgtcaattatgagtttcttaagctggaattttcgtgggcttggaaactcatagacttttcaattccttacgaatcttgtgagccaaaagaaacctgattttgtttttattgtgaaaccttgagttgtcaaggcacccttgagcgtttgataggtctctacggagaacctaatcactctctttcctcataaaactttgggacttgcttcgtatgttgtcgatggattcttcattaccttagtgtatcattggtgatttaaataatgtcctatcttagagtgaaaaaacatggaggtaatccttacccgcaatggctaattaatggattttgtaaggctctaaatgattgtaatcttcatgacttggatttgtctggttatcaatttacttgggactgtggtcgtggtagtgattcctgggtagaagtctgtcttgatcgtgctctggttagttcttcttggctccagcaatttaattttacgcaattgttcaatcttgaagtctctgtctcgaaccatagccccatccttctcgttatctccttatcttttccttctttgcgctgagagtttctcgtctttgatcagtcaatttgtaagaatgggtctcctaaagggttataaagtggctaactgggctcctaccgttttccacttacttttcgatgataatagttatgtttattgtagagcaacgaaagaagaagcgactaatgtacttcaaatgcttcatttgtttaagcttgcctctcgccaaaaggttaattttgctaagttttctatcctttttagccttaatactcgtgatgacatgcaaagttgaatttgttctagtttaggtatgcaactagctgattagaattctatgtatttgggtcttccatgtataatgggacgcgaaatgataggtattttgggacttttgaaggaaaaaatgtgaaagagaattgagagtggggagggtcatttcttctcgcaagctggtcgtgagattctcttgaagtcaatggcccaagcattacccagctatgctatgtttgtcgttcgtcttcctgttgaaacttgtcatgaggttgaaggattgatgtctaaatactggtggcacacgcacactgcttctaatcgttcaaaaaggataaattggatgagttggaaccgtttatgtgagcataaagattttggaggaattggttatctcaagtcttcgtgattataatttatctttactctccaaataaggttggcgactacttttttatgactctcttctctagttaggcgtatttacaaggctcgttattatcctcaagactcttttcttagtgctactttgggccataattctaattttatatggcgtagcatttttaaactcaagggcttgtttgaaatggtgcccgtattagaatggaatcgatacccccaatgctccatggcttccaaatcctattaatccctttgttatttctaatcatcctttcacttgttgggtctaaggtcagttattgctgctttttttgacttcggaagattggaaaaagttttggaagattttggttccccctaaaactctccattttgcttggagagcaatcactggttgtctccctacttgttctgaacttaaacagaaacatgtccatgttgaacaacattgtgttttttgctgtcaggagaaggaaactatcctccatgtgcttgtgaccagtccttttgctcagtcagtttggacagatcatgtgtggatgtgggcattgcttcctaacctgattttacatgttggtttttgttggttgccatgtccatttgcgaggctcggaataacttgctttggaataaaaaagattatgttgttgttgtggttatctttgttgcacgtatggttcttgatcaattgagatctgctcgttctcgtcgtttcgagctacttttagtccttgctggtactaatagtgtttgcgagcattgaacttaacccgctttaaataaaatcaagatcaatgtggatggaattatctttgcatcaattcaatcttatggtgtcgtttgtaggggtgttcacaaagtatccgatccaatccaatcagcacgatccaatccgcaaaatgcggatatccgcac

SEQ ID NO: 297708 - DNA, 5070 bp, Cannabis indica
aagccaaatgagtacagaaaaaaaatgtggcacatttacctaacgagaaaataccaccatatagggtgagcatcaatgatgtgatgcatttcaatttttacaaaatacatttttttgaaaattagtttggagctgcacttataaaaagttgcctacgtaccctattccttaatagggatagggatcaagctccacgtagttcttaggacctgcaaaataattaaattagtaataagtcagcaagataaacatgaataaaatggaaaaaaccaagagaaagtatactcagtcaaaaaaagagcaagcatactcagtactaaaaacatttaaaagatctcgtaatacaaaacaaaattacattgtattgacttcaaaatataaaaataaatatttttaactaaaaaaatgagtcgtttatccaaaacacataaactattatatttctaaaatctaataaacagtttttaaaataagccaacacagaatataaaatctaaccactgaagacaccacaaattatttgaaaatagtgatgtaattcgagcaaaaacaaatcagttgattaaactttgttagagccatcataaaaaaccttaaccacaagttagagccataaaagtagatattacaaaatcaaatgattaaaatataaccgtacaccaaacacagatatgcaatgtaaaacaagacaaatttcattgatatcaacaatataagacctttaaacatgaagtgtggaccacaaaaatacatgtttcaattttttgaataatttaacacaaagtgtcacagatgtccaaaaactgcctccaaaactataataaacataaccactgctgcaaatgaccatatatctatagagcttccaaaaccgacaaacaatgagaatgcgaggacacgtcagcacaaaatacttggaagcagaaaaagagagccaaaaaagtaactcaaagtgacatacttgtcaattaccaaaacctgaaaattcaccaactggttttcttgagaaaaagcagaaaatctaataatccattgaacacaacaaagcacaaacaagacatgaacaaataagtcattaaagaaaatactacaacaagctaactcccttccaagatggcatgtttagatgggaatatcggagcaagtcaaaccattttccatcacctattaaaccaaaatccaaacaatgttaaagatcttgctgacaacaaatgataaaatgacaattagtatttagaaaaataaatgacaattgcctaatgagaaaataccaacatacaatgtgagagacaggacagtctatctaaaagtagagaacaatataaaactaaaacgagagagaatataaaacagcgtcatatattttcacaaaatagtttggttggatgaagtccaatgtaaactcttttgcttctccatcaaaactgcatgtttgaagtccaaacaagaaaattcaagaaaaactaaaccgcaagagtatgaggcaaaaatagtgagaagggaagctaacacccttcctaggtgcttgtaggtgggaatattgatgcaagtattcttggaattatcaagcacatgcgtatgcgaagatagccttgaaccattttctatcacctacaaaaagcctcgaacgaagagaaataaatgtatgatcaaagatcttcccttataacatttttaagaagaaaagttcagtgacaacaaaaccacaatttcactcaacttgaaagcacatgatagttatttttagtttacatttttcaaacaaaaatggacatgataatttctttaaaagtacaaataaaaattacgctgaagacttcagattacaaaaatgcgtgatcaatgccaaagaggtcaaaaaaaattgtgtaagccgtataagataatttttttttgttgaattcagtatattatgttttcgaggagagaaattcataattattgaattatatattaattataccttcagcagcagaaatactattttcatatggtcaacattataacataatttcagtgtgaatgattgctatgcaaacaaaataacagctaaaataatctttgaattgcatacgttttttcttcttttttttttccttattgggtcaacattgcatagcttggttattgtaggtgctttaaggaggctttttttaaaaataaaataaaaaatacaaactttagggctaggcttttaggatcattcttgttttcagcctaatatttgtttactagacttcaaattatgtcaagacttggcttaaattctataaatttctaaaaatatgtcagccaaaaatgtcattaagtatagttcgtgactagccaagtataaaatgcccaaaaaaggtatgctatatataaatggtagatcaacacacaaaaagtaacaattgtcttaaaagatctatatcgctaacaaagaaaacattctcagaagaatacaattagttatgacaagagcaatatgagattaaattagacattaacgtacaaaaagaatcaaaatacaaaattttattatgaaaaaacatgggtacatttcttgtaagagataaactttcaaagtcatgaaacagcaccaaacatcaaatgtgctctcacagaaattgaatccacataaaaatcacaagacaacttcaaacgtcaaatgtgtatcgcacgaagtgtttgatcaaataagatgactgtcaacgattgtcccagaccaaatatataccagatacattcaaccaagccattcagagacagatcaaagaatacacaacagaataccaccaccctctcacaataaagtataaccaaagagaaatcaccaccaaactggtatatcctaccatgagcattcaaagatagaatatcagagagaaatgcaacttgcagactatcacaccctaaaaggaagtccaaaccaaaacaaggataccatcacagattgaaactcttaaacaccaggccaccatcccgttaacatacttaaaaaagagcttgatcagaaatcaaattaatcttccaaaggattataaatacgacataaacgtatccacattcccacacattaagataaacatgaaacatccccattgtaaatcagcggttggcggagcataacaggttgagtggcaataacagtagataatgataaaaccaaaggcctaacctcataccaagaaatagttggccgagcataacatgttggggagaaataacagtagataatgacaaaagccaacaaccatcattgtgaattcaatcaaacgatgtcttgctctgcataaatcaacagttacggccaataaactaagatatctcaaccaagtaccaaatccttgaccatataccaataaacatctgacatacaacatcccaccaaacaagtccacagaagtggataccatctaaagcgaaagtcgacttataattgagtacgtaaaaagaaaatccttatttttcagaaaataggtcggttctaggaactccaatcaagacactagagcttgtgaaaccatgcttgatatatccatgagaactgcaatgttattgttagtccgaaacagaaacattcaagaaaggaaaactacaaaactatacacaaaagtagtaaaaatagatataagggaacattgactaacaccacttgtgcaatgttgttccagaaccacgacgactattgctcgccagatttagttaagagttctatccaatcaaagtccaataagtactgaaagaggaaacatatggagaggaggtgacaatcattttgaaataaggtcagtacaaaagatgaaattcttaattttcatagaacaggtaggttttaggaaatccagagttgactatgataaaccatggcagctgtctccgtaagctggaaaaaaagtgtttgcctaatgagaaaattccatcatacaggaagaaaggaattagacaatgagaagtacataaaactttgaaactccaaccatgactctgaaaccatgcatgccatcttatctccataagaactgcaatgtggttcaaagtccaaaataagaaaattcaaggaacaaaaatagaattatacaaatagaaaaaggggagagatgactatgataccaccaatacaatgttcccaaacaccaccaccattagaacagctttgactagttcattaagaattctatccagtcaaaagtcacaaaagtactgaaaagaaaaaaaaaacatttttccaaatgagaaaaaacatacagggagagaaggagacaatcaatttgaaaaggataagtatgtaaagctgaatttcttatttttcaagatatgtaggttgcaagtaatccagtgtcgattaagtgaaaccatggcataagccgaagaaaccaaagattcatttacctaataaaaaaataccatcatatagggagagaggaagtcaattagacaatgagtaaataaaaaaagtcttatcacaaaataggtcaggtgtaggaactcccatcatgagcccataaccatgcttgctatccccataagaactgcaatgatgtaagaaggcaaaaacaagaaattaaagaggaaagaaaagtaaacaaaatgttacacaaggaagtacaaatagtaaaacagaaacaatgacaatgataccacaaatgcaatgtcgctcccttcccaaaacacaaccaccactgcaaaccagcgcaactttatttcacaagagtactatccagtccaaagtcaaattaagtactgaaaagaacaacacatttagtgaatgaaaaatgtgatataggagagtatatatgtatgtattttgtgttgtattgaatatgtattgtgtgtatatatattgtgaatgagaaatgtgatataggagagtattttatatattgtatatgtatatattgagtattttaaagtttaaactaatagttttgttaattaaatattgtgatgagaatgagataggagagtattaaaataaaagtttagaaattaatttctataaaattagtttagaaacaaaaatttagaaattaactatattttgtattaatttttttttctattttcaattttattcatgtgttttta

SEQ ID NO: 297709 - DNA, 3759 bp, Cannabis indica
cgctaaagctccaatcgaagttaatgccaagattgaagttgtcatcaaacaaagggtgaaggagtctttggacaaggtcattgctcatgagaaaaaggaaaataaggttgagagagcatgaagacaaatataatgagttctatactcaggctcaatctcggatcagcgatttagagtagaacttgaaaaaagccaaagaggaccttaaagacttggttggagtataattaagtacaattctttatcccaggagtataacaatgatactctcactttgaacaacaagatcgtctctactgccactcttgagaaacagataaaacactatttggaattacaacagattgtggagcaaacagagaaagatgttctgaaaaagatggagggtgttgaagtcaaattaagtactactaaggaagcctttgagaaatccaagaataaagcttcggagttggagaaccaaaaccaataaagggctcaggagaagtatgatcatgaggttaagatgttgtagattgaagcaggatttcatgttctctccattacactttggaaactcaataagtctataatggagttcctggatgatgatgatgacaaagaacagattatgcctcaaatcctcaagctagatgaagcataagaagtcacaaaggcaactagagcatctggggagttgctctagaactgacctcttggaaggcgagaacttggaagattcaacccttccaattgctgatgctcctcctttggttgactcttcagctctggaggcccctaacgacagccagccagattttacccaaccaccgactgatccatctttgccttgattttttttatcaaactaataatattttttctttttggttttctttgggggacaaaggtccctctttttgcaaatgcaaagaaaatttttatgcccttgcaacgggacttctatgtatgtaattcgctttgaatatttgcacacttttatctttaaattcatgtagtatttagtgtatacctcctaaattttgctaagtaagcttacttccaaatccttgaggttctgattccaacagcccgagcctttaggattttaactacatgtttagactttacgttttctttttagcaagttacctcctatgactttgagttcttcctgcaggctggtgggttttaaggactatgtccttattgggcggaacttcatcgacctttgaccgtttggatgaagatatctgactagaggcatcgcccgacctcttctttaaagcacgcaacaccttctgagacatagctacacacgaataaaacaagaagttcaaaagaagtagtattttggtccattagttttgggtcaattaatattgggccttgatctttgggctttactaacaaaatgtctaataaaaaaatatacataattaaaaagtagtatttttcttttttggaggaaatataaaaagtataaattaatataaatactttaggaatatcatagctaagctataccgaaccatagagaagtcctaccttaactcggttgggcatgaatattcaagatcagtgttataatacataaactatatggttctagtgtcttctactccaaactaaaatgaattaaattaacatagaccaattccagaatcttcatagaaccttctcatacaccgttggattactcatcatgacacgtgtaggacaaagaggccaagatccttcacaagtggttgatcactttttctcgtaatccattttcattctcctgcttatttaagcacctcgccacttctcataattccccaaccaaaaaccatttcacaaacacttacaaagcactttaaagctctctctctctctctagtgctcgttctcgctcgtttaatctctccaagaaaaaagctctccttcgccttaaaacatggctccaccggaacttgtcccaacctcggttaaaaccgctccgtttaccaaacccgcaaccctacccagacgggcatacgtgactttcttagcgggtaacggtgactacgtgaaaggcgttgttggtttagcgaaagggttaaggaaggttaaatcggcgtaccctttagtggtggccgtactacccgacgtaccggaggatcaccgtcggattctagaatcacaagggtgtatagtccgagagatcgaacccgtttacccacccgagaaccagacccaattcgccatggcatattacgtcatcaactactccaagctccgtatatgggaggtacgtagtaggtagttactacttacgtcgtttgattacgtggcagtcttatagtttgcatgtagacatgaattgacgaaattaccctttttaattttttttgtacagttcgtagagtatagtaagatgatatacttggatggagatattcaggtatacgacaacatagaccacctcttcgatttggccgaggggaatttctacgctgttatggactgtttttgcgagaagacatggtctcacactcctcagtataaggtaggctactgccagcaatgccctgagagagtgaagtggcccacagccgagttgggtccacctccggccctttacttcaacgctggcatgtttgtctttgagccaaatctctctacttatcatgatctcttaagaactttgaaagtcacaactccaacctcatttgctgaacaggtatgtaatgtatgcaatatataactttataatattgatacgctttgtctatatatgtgtatatgtagttgttcttatagcttaataattatttgatttgtgtatgcaggactttttgaacatgtactttaaaaacatttataagcctattccacttgtttacaatcttgtattggctatgttatggcgtcatccggagaatgttgagcttgacaaggtcaaagtggtgcactactgtgcaacggtaagtatatatataataatagctagctaggtccaataaatatatatatatatacgacaatatattggttgggttagttaaataaaaatgaaataattaatgttgttatcagggatcaaagccatggaggtacacaggaaaagaggagaatatgcagagagatgatattaagatgttgataaagaaatggtgggacatttacaacgatgagtccctagactataagaaaccgattggatccgccgtgggaggtgtccaagccgaggcggtgaatatgcagcccttcattgatgctctctccaaagctgccggtagggttaagtatgtaacagctccatctgcagcttgaggcatttcggtacatttgggttttgtaatgatcgatgattcgtatatatatatcatctttttcttaattgataagtctgtcccaaactgatttggagactagtgtgttattgaatcaataatataatcaagatttgtaatttagcgcaattgaaattgtagtgcttatccatatattaatacatagctaacatttgtcagttcttttttcagtgaataattattatttataattggttatatgaatttatatatctatatattggtctactcgtcggtatattgttttttacaattacctcaaattttattggcatctgcttatatataaacttctgtcacaaagaattacataaaaaatcttcaaaactaatactcttaaaatgagacaattgagtgaaatgagccattactaattgaaaacaattacattataaaaaaaattctctaaaacttatatatagtgagtagaatttcaccaaag

SEQ ID NO: 297710 - DNA, 1372 bp, Cannabis indica
caaaatattttacttttagccacaacaaaatttgtgactaaaactgaaaaaattgtgactaattataaatcatataattcctatgttgtgactaaaaggtccgtgactaaaagtattagtcacaaaaattgcaatttgttgtgactaaatgtatttttagtcataatacttattgtgactaaaattaaattagtgacaacttgtaactaaatactatattttaatcacaagtaatattttgttgtgactaaaagtcacatttaatcataaaaaactatgttgtgactaaaaagttgtcagtaaaagtaacagttttttgtagtgaaagatgagaaattatcttaacgatgtcgaagggatatggcctatggcgatggtggaaactccaacgagtaagccgacgacgcactccttgtgaccgaaagtgtcccccatctcaagaggatgtttatatgagttatatgattcactgctgctgctatcatggtctcctcctcttcctcctccaatatggaagatgaaaaaaattgaccatgcacgcctgtttcaattcaatagggtgatttgtaatagatggatgagacttgagagtgaagcttgatcaaataaaaagtggactattatatatttacatgagcaattgagcaaagattaaaaagtatgtcaataattacttaattccaaagcaactttttttttttgctaaattagtagtaagattaaattttaccaaaacaaacacatatagagcctaatagcaataaattaatggcttgaaagtaacaaaactataatccttttacaaagactctcaccaaactatatcctttctatttttttttttttggcaaaatcatacacaacctattaacatcctattgtattctatgtataccagtactaaggatgggtaatttagattcctaaaaaaccaagtttcggctcctccaaatatgataaaccacaacagccaaaatcaaagaaaaaatttgcttcttgaaaggagaaaattggttctgctttagccaactcaacaacaaattcaggttggattcctcaatatcccaacccaccctatctttaatagattggatacatcttttcctataaaggcattcgaaaaataaatgtttcgaatctgataataaagatgcaggtgacagaaggtggaggagggggacactggtgtacactataggaggctgagggagtggtggaggtggtggaggtgtaggcattgtgggagatatgaccgaggaaggtaaaggaataatagactcgccagaacatgtatcaggcacagatgatatgacagaatataccaacaaatcatcatcctccctctaaaaaagtaggagtagttgaagatgaa

SEQ ID NO: 297711 - DNA, 6190 bp, Cannabis indica
agcatacctcttcattacatataggtttgatcgtataagtatgacttttggctcataaatgcaagtgcaacatatcaaagattagttaatataatgtttgcagaattgctaggaaaacaatggaagtaaatgttgacaatatgctccaaaaatatcaacatgtgactgaccatatcacccgtctaagctcgatgttcaaattcttgcgctaatacaagatgtggctcaacccgctaaaatgcgtctttagcgtaggaacaggaaaatttcacagcttcatggtgaactagcaaggaattgaagctaaccccagaaaaatcaaagccttagtagagatgtgatctcctactaatcccaaagaagtgcagagcctcactggcaaggtccctgccttaaatcattttgttttgcgttcctttgacaaatttagagaattctttcagattctaaaaggtaatgaaaaatttcaatggagtgacatatgtgaagaagcttttcaagctctaaaaaagcacttggggcaacccccaatactttccaagccgctgcctagagaaatacaatcaatctacctcacagtgtctaataatgtaattagttcagtgcttatttgcaaagaccagggcaggtaacaccccatatattatgtaagtaagtacttactagatgcaaaatcacataactcgcaggtggaacgtttggcattcgccttagtcatagcttcacgaaagttgtgaccttgttttcaggcccacaaaattgaggtactaactaattatcccctgcgacaagtattgcccaagtccaatacatctagataccttctttagtggtcaatcaaactaagtcaattcgatatacggtacaaactaggatcagtaattcaagcccaagcccttgctgacattaaccttaaatttccacatgaacaggtagctgccataactaaagagcgagttgatccagatgtactagaaggtgaaggttggaccttgtatgcaatggggcctcaaacaataaagggtcaggtcgaggaataatgcttatcagtactaataagttcaaagttcatgcatccttaagattcaggttcaatgcctctagtaatgaagtcgagtatgaagctttaattgcaaaattaaaacttgcacttgaaatgaaagtcaaatacttagaagcttttagtgactcatagatcatggtttgtcaggttaatcgagaatacttggctcgaggaaggcgaatagccaaatacctcacttatacttgtgagttactatctaaatttaagaaaattattgttagtataatacctcgtgcttataactcccatgtagatgttttggcccaaaagtcctcaactagagaagtagaattactcgatgtaattcttgtagacatactcgaccaacccaccatcaatcgagaagaagttatgtagatagatgttgttgaacaaaccacatggatcactccaatcatcagttatctaaaaactgacaaacttcctaaaaataagcttgaggccaaaagataacgatataaagttgcttgatgcgttatctatgatgacaaattataccacagaagttttaatcaacaactttcgaagtgcatcgatgttaatgaatgcaactatatcctcccaaagatgtatgggggtgtatgcggtaacaatactggtggaaactctttagccctaaagttcatgcaacaagtgtattatttgcaaactctgcatgtagacgcaagtagttttgtaaaaagctgcgataaatgtcagtgcactactacatatgttaatagtccgccaaacaatatgagttccatcaccagctcatggctattggtagtctatggcatagatttaattggtgaactaccaaaggatagaggagtgaagtatgcaatagtcgtcgtggactattttactaaatgggtagaggctgaggcacttgctaccatcacagcttcaaactccacgagttagtgtatcgggctatcatatgcaggtttggtataccataaaaaataattttagacaatggtaagcaggtagattgtaaggagatctggtcattattagatgacttttggatacaaaagccttttctgcagtcgcatatccctagagtaattggcagaccgatgtagtcaacaaaatcaccaagcacaccatcaaagggaggcttgaagagaaaaaaggcatttggccagaggaataatggtcatacaatactacaccgtgatgaactactagcgatatccctttctcgctctcttatgggtgcgaagccatgttcccagttgaggtaggagcaggttcccttcatcgcaatatttttaacattgaggacaatgagcaaggacaacttctccattcagatttattggaaggatggcgcaaccaagatcaggtaaaaaatgcagcctatcaatagcatacaacgcgctactttaattcaaaggttaaagaaagaagcctacaagtaggagatttagtatgacacaaagtcatgcctaataccgcaattcgactcaaagagtttttggcgataactgggagggaccctacctcatcactaaaaaaattaggaatgcaacataccgactctctgatcgcatgtgcatactttgtcaatttcagttttcaattatctaagtatgggggatacatgtattattattatcattaataaattgtactactaattgctcatgattattgcataaattttaaatgtagaggcaacatttcatttatttacttagaaatactatttaaattatgaactctgagatgttcataaatcgcatcgtaaattgcaactataattagttgtaccaagctgcaataataaatcgcataaataaagatcacacaaggctacaataataattgtgaaaaatgctcagttataaatgcagcaagttgcatttataatagcatgaaaagcatcaaccgaatataaaatacttagaaaatattttagataattatccccaaaggatatattgttcaaatattgcaaaaaaaatgcaaaaggtgcaaagtacaatagtctcaaaactgattataaaatgcgagtacccatctactgctataaaaaatattctaaggagaaggggcattaacgttctctctgaccttctcgatggcatcaacaactttagctgctgcagggccatcttcaggaaaatgattgttggccaggacttaagtctcatttggagacatggtgcgaaaattgtaagccatcttgatcccttctggaccaaaaatggtgaaataaaactcaagcagtatggttagggtggtgtagatgtaatctctgatagtcaggtcttaagccttctacttctcctctctttcaatgttcaagtgacgaaataaagtgacgatttgttcctccaactttttgaccatctcacctgcttgacttttggcattgccgagatcctcgatttcattatccttactagctagatcaagcttagcatttttttagaccttcttgaaggggagagttttgtttcttcaaaatcttaagttctttgagagcctgtttattcgtagtaatagcccaagaatatatagtcatcccctagatcatgaatttagaggaacgggaacaaatgtcttcgacaggtggtataaagtcatcacttacgtagttcttgcaaagtaatcaggtcgcgagccttagtcaccggctccatcatttgtttcttccccttctattgtgaaactttctaatgtctcttagataagtcaatgaccgaaggattgacagaatcatttttcctcttctggggaggattcacagaagaaggactcacgagctctttgttagtcttcgacttgcaattaaggaccggagcactcttcagaaaagtcatgtctacaaaagaacaaaatatatgcactaactataagttatcgtatgaatttgcagaatattattagctaaaataaaaagcatcatacctgcgattttctttaggtctgtttgaaaagatgtttttcaatcttaatattctacttctcagaaggctctttgtaaacttgctatcgttgaagtctagtgtaggctcaaatcaatttttattctcacagtttagcagaagtacaaagaagatgctaatcttgatctctggctggaagactgctcagaagctctataatttccacacgatcttgagttaacttagaacaagctggtctacctacgagtgtaaatgaatgttagtgttcataaaataaaatgaataaaaaaagccactaagtataaaagtatgcattgcacgaggatagcgattaaagtctattctaactccagggagtgtgaacgcataaaaccatttcgacttccaatctcccatattggaaaccgtgccttctactccattgacttcagaattggcccatttactaaagaagtaaaaatcattgtcatgaacaatgttctttatgtcgtagagtagcaaaaatcctcgatcgtaggttccccttgcgtatattctatatacatcgcatagaatccaaggacaatcctataactattaggagtaatctagaaaggagaaacatcatatcatgaagagaattgcgagtccacattgaataatgggaatcgagagcatcgtgacttgattcagaataattcataggattggcaaaaggaagatgaggacactggattgatattgtttttgtacaacaagtaataactaattttaatatttggaaccttgtcaaaccagactttctaacccatgagactaagtccttgcaggaaaatggctaatcaaaaggagcattttctatggagtttgcgtcatcttcctcatcgtgtccttcatctctgcaggtgggcaattgaaattcttcccccatttctttaacctctacatctagagcagcccatggatgaatgaagctcccttgagcagatatagtggactcgcttcctcgtatctttatagcaattggtgccttcaactcttggaccatgcgacttatctcaccggtaaaccacgagtcttgtcaatctacccttgctggaactttgtcctccgataaagacgtggggataaagctattactgtaaagaccgcttagctttagtttgggaattagcagataattagggcttaataataaaaattatttatttatgattatttatatgaattccgaatgcattttatgtgtctttaatagaaatttcataattttgcatgttttgtgttcggcaatattggaacgcggtgtatggctattagaatcacatcttagtatttttagtatagcgggacaatatagttagacattggaaatgtggagaatagtcaggattttaggatttcccaaaatacccctaagtgcccttttatgttgttttagtgtggggagggccttatattcagatttttataattatccttagctgatttatttcaaataaaatttttacaaaaataagaaaaaaaaggcaaaattttcacaacttttctccttcaactctctctctctctccaaaattcctagagcagctagggttgatattttcttcagcatttcaagtagaattcaggaagttctaagtgatttcaagctctaggtaagttcccaacactttgcctttttgtttcttgaattttaagttagagatttttgtatgaatttgagatagttgttgttgttgttgctgtagttgtttgatgttattttctgaggttaaaatatgtttagaaatgttgttttgagcatgaattaagggctgttagtaagtttaaccaagctttaagttttagaactcaaacttggagctttaatggtgattttggagtttgagcttgggtaactgttttgttgcttggaaatggtttattggggtaaaatatgcaggtctggaaggtttgagttggtttggaatcgatttggttgagctttgaaattttttgggtttcctacagaaaattggctaaccagttttacaagtacctttaaaatcgggtaaccggctttgcaatagggttccccaaaaatttcacctcgtcgattcgtcctagtttcaggtttctggttggttgattccctgctagtttagggtatttccatattaagttgttgtagataggtttttggtttaaaacctaagtcgcggttgtgatttagcgagtcact

SEQ ID NO: 297712 - DNA, 2736 bp, Cannabis indica
agtgttaccaaacgccacctaggttagtgaagcgcgcatttattaatataattttattttttatatacgcggaaatatgtactatatttgcctatcattatatgaaattgttgttgtgatatatattaattgtttggctcataggccctgaactatattctttctatatataattaaactttctaaattaatttcataattaattatcatgggacgtaaactctcgagcatcacctatatatagctagccctataaatacctatacatagctagagctagtggtggccttagtacttgagcatatagccatgcaaagcactattagagattatataaaagtacaatctttccaacgaattgttatgatatgacatgagaggacccaatttaaaaaaatcaataatattcccaagtcgcattattaatgttgtattatcgtttttctattttatggcaacaaaattgttgaatatattggacaacccattttggagtattattaatagaaatgaaactgatgtgatcataataagaacaattttgtaagaagaaaatgagttgttgctatctttaacttagagacctaactcatgtaatacgtacgaactagtgggcaacccatagctagaataataatgtactaatgtcactaacccaccatgcaaaaatcactggcgcatattaatttctcaaaagccattttgtatatgacacacatgtggcttgctacgtacatattaacatataaacacatagaattataattgtaggacctaataatttctactctattttgggttctagtctttaccacaaatagctcttatggtgtctcaatatgtccttatagaagggtgcacaaatgggtatatctacacactagagccacttgtccaaagagatcatatacatatataatagtgccttaattttggtatatctatcaagctctcaattcgaaaattttgctaatggcttacacgtactcttttcaataatttgacacatatattaaatctgaggcaagaaaggagatcggtcttaattttcttggttgtcatactactctccatccacacaattttttacacataatcataaacctttttttttcttttgatcatgcatatactatgatttgtcctgtgcaataatttgcaagcacaagataagacccggataatatccccatttatttgttttctttcccatctttaattgacatttttaatttatacaattaaattatttatgagtggggtccaaaattgctgctaagcccagctaaaacactgccaccaaagcgtaggggccgtaagtccttagccgtagtagaactagtagttcacataaacacacttggaattttggacttggaacttggaagccagttccatacagtggcctttttctttttctttatttttttttttttttttttgggttcttcgatccatcgcacgtgatgaggatgaggtgggccatgatgttgcagacctgtcgcgcatgcacacgtgtgctcttcctccacggatccccgtaagatccgctgtcaaacaggaacacaaaatatcataattcattctcacactaaaagttattattaagtgagtgagtgagtatagatataaggaggggaccgtttttagacacaccccttctctttgattaccattgcaaattgcccccttactacctagcatcaaatcaccaccactcataatccgacacgtgtgctgctcttgccacgtttttatgcgttaatatttcttggtccaagttaataccaatttgacctatggagtttgtattggggaattatctttagtaatgggtagttttgggattaatgtgaaagtggtttatggattaaaaaaataaattaataaaaaagagtagtagagagaggtggggttagggggacaaggcagctttagtaaaagaaaagaaggtgtggtgtggtggtgttggtgtgtgtgtgtgagagagtgaaaaagagattaaagtgggtactaataggatcagaggaattttatttttggtgatcccaaatcccaagaagattgcaaatagttaaacttgttcaaacggagagattttttttttttttttgcagcttttcctttttgcctggggatgcataatagtgtatgagaaagagacattagattccaaaggccactgcacatgagaatcaaaagggtttcttcttcttattaatattatcagtacacttacacactactcttcttttgaagaaaattttgaatatatagtatactactagctagagaacatctataagaaataaagaaactgtctttgtttctatatcgatccaaataatgattccaattttcaattctataaaaagttaaagggatctgactagctagctagctatataggtgaaggcctataaagctaataataatgtgaataaaatctacaatttatatatatataggcatagctattgtcattgttgcgtgataaagatttctctacagatcgaagtcgtcatgctcataccaaatgtatatatatattatatacgtacgtgtcatcattatattaatgaggttaagcttgtacaaataatgacaatgacatgtaatgtaataagtttaaaaagaatctatttgaaatgtaagtttcattaaaaagaaattttgacatgagaaacacccggcctagtgcggaagagaaactttttttttcttgttctttcacaa

SEQ ID NO: 297713 - DNA, 4946 bp, Cannabis indica
aaatatagtaaaaaagtaaaaaataccgcctgacagtatttttgtaaaaaaatggcaaaagttagtataacatctaaatttcccaatattattatttatctcaatggtttgggccgaagcctttcctgttgacattgaagtatggcccaatttgaacataatttccaaaaaaagaaaaaagaaaaagaacagagaaaacgaaaaaaaggaacgaagttcattgattctttctgatagtagtactggaaggggaaggggttttgattagggttttttcacccctaaaatctcacttgtcgatacgaagattagggttttattcaatccacagagtcgtttctcttgtaatttctgattggtttcattcatttcgtctaaagaagaagaagcagctgcaacaatgggtgctcagaagaaaggtgcatccagggtatcagaggatcctgacgaattgacacgtgtccccttgcaggccattcttcttgctgatagttttgctaccactttcagacctatcacccttgaacgccccaaggtccctcacttctttcactctgggtttgatatattttgtactgtatattatactagtactctgattttctttgattggaagtatcgaagtacatgaatggatgcgtgcctgtgcgtttttgtgtttgtgtctatatatatattattcatatttgttgctgctaacagaaatgctttcagatataaataatctatataagctttttgtatgggttgcaatagatttttcagtagatatatggtgagaacctatttttagattctctggggaagtttgcaaactcaattttctttttggtgcaatgttatgaaacttaataatagttttgttcttgaaggtacttttaccattagtaaatgtcccaatgatcaattacaccttagcgtggcttgaatcagctggtgttgaggaagtctttgttttctgctgtgctcattccaagcaagtgattcattacttggagagtactgaatggttctcccaaccaaatttctctgtccaaacaatagagtcgcacaactcagttagtgctggagacgctttgcggttcgtatatgagcgcaatgtggtatgttgctggtctttcgacttctatcgattcatttttctgtataattttcttaatgtatgtatatgttcaaaatctgtcagcatttgaacaatgataaggtcacgatattcagttttgtttaaattcaaattaatttttagatgaaattgttgaatttgctttcccttattattatttgaagttctcccttctaatgtaattgcatattcattcatttactgacattttgactatattatgtttcatctgaagatacatggagattttgtcttaattagtggagatactgtgagcaacatgtcgcttactcaggcacttcaagaacataaggatagaaagaaaaaagatagtaacgctgtaatgacaatggtgatcaaacggtcaaagccttctgtgatcactcgtcaatcccgacttggtactgatgaactttttatggcaatagatcctagtacaaagcagctattatattatgaggacaagtcagacaatttaaaaggagttatgtatttggataaattgttgcttggtgataatacttcactttcactgcacaatgacaaacaggtatatcctctaacttgtttattgtagtaattaatcttatatgagaagtcaatagattgcattagtttcattacaataaaatctattgttggcttttatggtggttagacttatattatttgtagataaatatagaacggtcttctttaatactcttaatgtgcatagtttagttaactaaaaagatttttttttaaaataaaaatttatgactttttttctataagagccattttggctgtttatttacactacaatactaatgatgtacattttctgcaggattgctatattgacatatgctctccagaggtcctcagtcttttcacggacaattttgattatcaacatttacgacgtcattttgttaagggcttgcttcttgatgatgtatgtgtttcttaaaatacatctcatgttagctactatatttattttgtggtggtgcacatgggaacacacatgtttgtcctccaacaaacatataatatgggccttttcttttaagcattgcattaaaatccacacagagctttgtttactaagaaaagtttaaaggaattattacaccctataattgtccagaaacttgtctgattgtgtgtgctaaagtgtggttgacttgactgtaaggaatacaattccagtatttttttttgtgttaaaaaatgggaatagtggtttagggtgacagtgggattcttgaacgtgtctaatgtagaaattttgttacttatatttgtgattttttgagaataaggggagcttgcattaaaaattttaagagatagaagaagttttttttttttttgatcttaagagatggaagaagttggtgtttaatgtttacatccttatgttagaaaaatgcaccaactgtataggtaaagtagttctattgggaccttgggattttttcaatacattaactaacttaactgtttgtttgattatgtataatagtttacagtatggagctccaaatatgtttttctaaatttttctctttttttttcggctatattggtggtaaaatttagtattgaatgttatcatttaatatttctgatacttcgtcactcctgtcttagtaccatgcattgtacgtatgtattctgttgattttgcacatctgctttcatatttatttttgttttgcaatttttctaaggtgatcatctatccattcagattatggggtacaaaattttcacacatgaaattcattcgagttatgcggctaggattgacaactttcggagctatgatactgtcagtaaagatataattcagcgctggacttacccattggtccctgatgttatgttctttggaagctctgtaactaaattagaaagacaagtaatgtatcgagcatcaggtaaaaatgaaagtcaatttctatggataggttatgatctgttaagttgcttggagagctggaaaatctgatagcttttgattcccttatttcttgtattcatctgaaatagggcaatcatgttctgcgcatatcgatccattttctgttattggagagggcactaaagttgggaacaacaccagtatttcacattcagttattgggaaagggtgcactataggatccaatatttctatagaaggttcctatgtgtgggataatgttattattgaagatggctgcaagctaagccatgccatagtatgtgatggagtggtaatgaaatctggatccgttttgcaaccaggtgtagtcctgtcatttaaggtacacattctttaacactgtaacctggattttagtctttactctttgctgatgtgtggtcttagacttagacccttctcatatagttatatgttgtaattctatcatatataggacaccgtgcctagtaatttgttgattgaaattcaccttggattagaatataaattgccgaggggttatatttgatattttatgctacttacattgttgagaaattctgtcggtacaatacttgtctttgtaggacctgaattaaatgaattatcttctcatttagctcactttaggtgtcaattattgcatattagtaagaggtagtgtttgttgatttttgttctcctatgtgagtgcatcaaaattgaataattatatgcttgggacttctgctgcgttagccttgaaactttttgtttgcttatttgttaatttcttacttagtgtcaccattgagtttgtaactgcaacatatttttctgattcattgatacttattttttcttttatatttttcttgtttacaggttgtaattggaccacaatttgttgttccttcatactcaaaagtatcgttatttcaacagcctactacgctagacagtgatgaagagctggaatatgctgacagtggcattgttgaagctccatgtaacttattctatctcttgcaccaaattttggctctttgttaatttgatttggaccttattttaatttttttttctccgaatggatgaaagaaatcaccatgcagtgagcatcatttttgcatatcatcattaggctacttatgcgtactatcaaaatatcaagacaccaaaacatatcacagtgcttaacataaactgtagttttttgcaattgtttgtgggattcacatttcttttcagatactgtaactatgtgattgctttaatgattactactaaattatccattttcagttgacattatgtgtgtttactttcaattactgtttttcaacaaagtaatggggtttttttggctatgagtactttgttaggatcaagcgcgaaaatattaatgtcaccatccagttcttgctagtagttaggtgatcggagatttgtaagtattttcaataactgtctttactgtttcttttttcttgttaatgtgcagcagttgatggtcctatggataattcaaatggggaaataacatctgaaataaagactgagcgctggcctacttcacaagttaacttcttttccatttacttttatagtcttaatagaacttcttttatccctcttccctccccaagtttttctttcttctcttttgaaattgtgtatgaattcacctctcagatcatgcttttacctgctttatgattgtgtgtgagctgagggcacaaaaggtatacttttatgctaactgggtgtgagcttagtttatgtgggttgtaagatgttaacttttcctttttgttgcttgatattaaattttcgattctttaaaatctaaagtgcaagaaaaggtgggtgttatattttcat

SEQ ID NO: 297714 - DNA, 3437 bp, Cannabis indica
tgtacattcgccgttcagctctccttctcatggttgattagaaacagctttaccctttcctgcacagtagagcacatgtgagccaagcctagcaagacagtataatatatcaataacatgtttatcacattatataaacagtaatgccattcacatatgcctatatgatacagacctgcatgttacgctcacatgcctatttatgtctacgtagcgtagacctacgtgttgtgctcacacatctatttacaataaggcctttgaatggttcatctcagttttagttaccgagtccaacctggttatgccttgaacacataaccctaaatcttaacatactcatatactcatatatatcatggcatagcattcatacaacatatatcactagggtaataaccctaggctattaaatcgttcatgttagggtaataaccctaatcctagttactaattactcacatataccatttccaatataagctccaccgcagataactctacgtgctaactactgtcttacatgatgtcccgcaatagtagagattccaaatcctcgagtgctcctgaccaggtgccgctaatcctagtcacaatattgggattttacacaactagggttaaccactaattccacattcataaaaaatatattcatggaatttaaaatttagataaccacatagagctcggaacgagattttcaacgatatatagaactcccaaaacggagttcggatcacaaagttatgcattttcaaagttggaactcaaatctgcccaaaaactcgagggcgggctccggcatgcaaaagccatgccgcggcacctgggttcaaaacccagaaaccagcaagcattttcacgaatttcaacatccaaactcaaccaaatcatgccaaaaaccaaccaaaacttaaagtcaaacaatagattttctaataatcatatagggagtttagagtacattttcaagcattaaaatctaacaataaaccccatatttaatattatcaccaataaataaaatgccaacattcaatcccaaattatatttgggcccaaacccagtttggcccgaaataccctgttgtgactataccgcgccaacctgtctgaacacacctaaaatggataacacaggcacactatataataatatagctccataagcacacaaataaattaatttcactattttacccttctcgggtcacaattactaaaatgcccctagctccccaacggggtcttaacatggcataaatcatataaattctcatatattaaattatataataatataatttctcaaaaatacataattatctaattagggtttcgctaatccattttataatcctagggtgttacaacttcactctttttctcaagttaataaaacaaaaaagggagtaggttattaccattttcacggggccgaacctctaaaaaaatctggtgctctttctaccttgttgttttttgatttctattatttattttatctaattattttattgtaattcactgtcgttggctagaatcgaggtcaacaaagctcaagattgagcttgaaggaagaagacgatgaagtcctctctgctagggttttggggttgaatcaaaagtgttttggattttcgtatctgttgagacagttttttgttatttcggttagcttttctttttcggttgtaagttgaggttctcctttttaaaggcttacctccactgctatttaataaattcattccaatatttttcttcaataaaaaagattcttctttttcttaatatggtatcagagcaagaaagataagctttcctgtccgatccttcagcaagttgtgtcttcttctccagtgaagctttgtttttctcaatcaccttctccgactgctcttctctctttactgtgtccattgagaccttccaatggctacagacaatgatcaaaccagagtgcctactgccattacagatccttacaatccttctgttcaagctaatcaaggccttcaaatcgcatcaaccaagaatccactagaagatcctgcaagtccgtactttcttcatcatggagataatcgtgagaatgcattggtgtctcagcctctcacaggacaagataattacgcctcttagaccagagcaatgcagctcgtgatctctctgaaaagaacaaaattggatttctcgacggttccattactaaactctctatttctgatcaaaatatataatgcttggaatcgcaacaataatattgttatttcttggatcttaaattctgtttcaaaagaaatttcatctagtattctttatgatgaatgtgcttctacaatttagaacgatttaaagattcgattccaccagaaaaatgaccctcttatatacaattcaaggaaagatcttatgaatcttaaataagaaaaccaaaccataagcatgtattttactagagtgaaaactatatgtgaagaactaaccaattacaagccttcatgcacatgtaacggatgtacatgtggaggagtcaagaaactccaagatcatcatcacatagagtacattatatccttcttgatgggactcttagattcttactcacaagttcgtggaagcattcttcttatggaccctttactagaagtaaacagagtgtttcatcttgttactcaagaataacatcaaagaggtactgcttccaattccaacaatcctaactctgctatggccttttcttttcaaggtgacaaaagaaggaaccaaaagtatgacaatcaagcaacaaaatcacacaccctccaaggagaaacaaaccctttttgcactcattgcaacattcttaaacatacaataaataaatgctacaaaatctatggctatcctcttggatttaataagtaaaaaaagtctaaagatgatgcagcaaatcaagttcaaactagtgagaaaagcaatcctcaactgtcaacggctcaatatcaacaactactgaatttacttacctcacaacaaaatggtatgaatgcccctgatcctagtacctctatagataacacaagtatcatcttgtcacataattctacacttcccctgcataattcttggattattgacactggagcaacaagacacatatgttctaatgtcaatctttttcaatgtatatgtaagataccttcaactaaactcatactccctaacaatcattgtttaatcgttaatgaaagaggaaaatttagtttaaagaatgacattgttctaaccaatgttttgtatgctcctactttcaaatacaacattgtatctgtcagctatctcactaacagtgcacctatctctatgtatttcacttctaattgattcactatgcagaacaatgtcagtaagaagacaattggaagaggtaattgttggaattattttac

SEQ ID NO: 297715 - DNA, 1329 bp, Cannabis indica
taatttttccatatttataaaatttaaggaaaaaaatgacatattctcgtaatttcctgtatcaaaaattctccttgtttagccgtgtttggttaaagtgtactaaagatctaaagcccatacccccttattgcttagatttgcatcgtgtaaatactacggtagtatatttttttctttctttttacatgtaacacagttaaacggacacgaaagttggattcagataaatatttttttaaaaaaaaaaaatcacatataaacggcatcttgattcatatccaagtccatagtgaactcgggatttagtccaaaatatggcttgaactttctgagtctctcgaaataagaaaccttcaatccatgccttcttccaatctccgatctcacccaactcggtgaaccacccacttcgcctgccacaattacggccgtgttttctccagcgaagttggccaataccaccatcgcctccggctcgatgccgtaagaagcgtccaccataaaaatgtgactgaagtgctccacaggcagtccttctttatggagacgaaagctactcatgaatgtcgaaaatatcactttgaattctcgaagctttgctatcggaggacaaccgaagcactcttcttcgataaaacacgaggacaggatatcttcaggcacgtcctctctctctcgaaaagctgcgttcactctagacatggctgaaacagggattgagttcttcagacttctcattagaacatcgcaggcgctatttgtaggcgcacagatcaatatccggcaattcggtgaggttttgtatatttggaccacggattctcggatgatggctcccgtacgtgatggttctcgcaggtgagaggcggctttcgtttgagaggcgcatctaggaccggagatcagataaggcggtgagcaatgcacggctaagattttggtaactgcagtggcggtttgttgatcgaggttgggaggtggttttggtggagtggtgatggtcttgcgagttggagaagtggggaagagaaagttttcgaggagggaatcagagatggaattgagagcttggtgagctcttttgagattgactctgttgaatgagaaactgatgtcgtaccttttgtttgggtgatactgcctgttgaagttgtcgttgaattcgactagcactgtattgctatgcttcactcgataaattgttccctggacaacgttgtaaagttcatgtcattgatggagaaagcatatacatatactagtgtttgtatagagccacacttctataaaaagtaatatgaaataattacaaacacaaacacattt

SEQ ID NO: 297716 - DNA, 7040 bp, Cannabis indica
attaaaaataaaaaaatattaaaccattttaatattatatgtttattaaaccattaccttattgaaaaatcattctctatataatgataataacaaaaccctttcgagactcttcttttgctctctctccatgcaaagtataaacatggattcttcttcttctccagtgcgttcacacctttcccccatgattttccacagagtgaaatcgatgccaagccccagatctgctgatcaaggtggctccaactcctcctccaacgaatcccagagtagctcgattcatccgagccactccagccgcaccagacggactcgactcaaccactccagtcgaatcaacattaactccggcctcctccccaaatcgtcgatccgtacagatattaataagccccttacaggtattcaatttcccttccaatctcccctattcactgtcaaatcggtgtagagaaaagagttttttattgaacaatttagatacatatttggtatcccaattaaattacagtatgactttcgtactttgaaagggtttttgggtaatgggtatcatttcaaatatgttttcagaaggggtttaattccttttgtcaaaatgggtttaaatgtctcattaatttaaatctatatgtgtaatctgcctagtactacatacaaatcctttatgtagcatctctgttctgcattaaatgctatagaagtgatagttaccaaatcggtttgccttagctctcagaggaatttctatttaaaggcaggctgagacgatacccctgcatagcaaaatttctaggtcttactctcttcttagttgtcctttacattaccatctctcatacactaccaaccatacacagcctatagttatccctcgccctacaagtattgttggttttccctggatagtcaccctgtgcacacaccaagtctcgttgctgcctagtaattttagttcttattttctattgcatctcattctgtcttgcttcctgttgtggtactttttagtctttctaattactattattcatctcttgggtcattgttgcatctttagtccactattgcactcactcggtcaaactctttccacctttgcactgcagccgattcattgttgcatctgtagttcactgttgcactcactcagtcaaacacattccatctacgcactgcacctggctcattgttgttcaattcatacacaccctgcagttaaagttcaatcgcatcttggtcaacttttgcttttggttcatctgtggtgtagtattatccaatcttattttatttttctcttcccaaaccatttagctcttactttgtcattagcttatcgttatacacagtcggcccattcaatggatgacttaacaaactccctttctattgctcttaacctcatagaaactgagtgcactattcaaacgctccatgatccttcccccacaaatgctttcgataccgagattcagcccgtcccactctacttggttgttaaagttcatacggttaaatcttttaaccgtaagaactttatagagaaaatgaccaaaaattggaatcacatttctcggagtcccatgactattactgaccgttccaacggtctcttcctggttgagtttggttgtgatggagataggcgtcgcgttttgctgcaacaaccttggacctatctcaaccaagctatcctaatggacatcccaaactccttggatgttctcaatggtgatatcctactcaaaatccctctttgggttcaagtgtttaacactccgttccttaaacgctcggaagaactagctgtccttgtttcttcctccctcggtcatctcttggagatttaccggccatcttttcacgagacttgggggccctattttcgacttagggtcatgtttgaagttgctcagcctcttcctcgaggcatgccggtccatttctcgggtataaataaagttgtctggcttgaattgaagaacgagaatcttccagatatttgctttttcagcagccgaatgggacatagttacaacaaagggtgcatggattacatgaaagcatgtgacgaagccccgttccctccagaactaaggtatgacatcaaaaccatcatgggtaaagttaaagttaccactaatgctttgttgtgccctgaacagctcaactttgccaaccctccggtggcttcctttatgaccactaatccggctagtgcgatgtgtgttgctccccccgacaacatgctaccatttcccacatatggctcccaaggtcattgctctcctcacggccaaacccaacaagtgggtttatacaagtctggcccatcaacctacacacaagaacacccccaaatgacccaagccgaggcccacaccaccacaatcacccccatcaaccccacaatcccccacccgagaccatcacaccatcctataccgcccttctcaatgccacgatgagtaacacgagcgtccaaaaagcctctcctatttccaacccgagccaggccatcaccccccaaaattctaccatctcccactccactagctcaaaatactgtcaagtgcctttaccagaaaatatcccacttctggatactagtaaaagacttgaagccatgaatctcacttaccagccaggtgttgcaactcccacgggctcaaaggcttcgaggaaaaggaacaagcctgactccaaggacaaattcaaaaggcaagctgaaatggtcattggggagctccgtcatcaaatcaagcgatcccgctctgacaatcctcctgtcactgaagcctctcctggaagtgcaggcctagccactaagcaagcctgcctgccgccatgaagcttgtgagctggaatggacgtgaacttgggagtgacagtgcattccggaatctcttccgtttagtgtcttcatgtaatcctactattttatttgttatggaatctcggcttgttaaaaatgctatcgatcatattaagatcaagctccattttgattcgggcttagaaatacctagggtaggtagaagtgggggcttgcttttgtttatggactaatgatgtcactgttactttacgttcccaatctaatagtcattttgattgttatgtgtcgtgtgctctcactaatgtctctttccaccttacctgtttttatggctctcctattgcatcgctcaggccccatacctggcaaattttgaaaaggataggtagggataaccctggtcacccttggattatcatgggggattttaacgcttttcttttttcgcaagataaacaaggtggtaatcctgataggggcccctcgcctaattttaggcatctcttggactcttttaaccttttcccgctcgagcccgcgggtcccctgctcacctggaataacagtgtggctgcccccagaaacatccaagagcgattagactggggaatcactaataattcttggatagatatcttccttgaggccactctttctcatttgggtttctttggatctgaccacccagccttggaattagtcacttccccccctccgggctctcggatgaaggataaaagtaaacgctttcactttgaaaatgtttggttaaaggaccctagttggagccaagtgtttgatcaatcctggactggcccctcggcccacctcgaggccatccccaatctcattgcaacacacgccatgtgcgctagaagtcttagcaattggaatcacaaaaaagatttcaatttcaaaaagcacataagtaagattgagaaagatctggaaagggcccgctcaactcctttttgggatgatcgaactatagcaaatatcaaagacctctaatccaaacttgaggctcttttgtacaaggaggaaacttactggaaacagcgcgttaggactcaatggctggctcagggggacaagaacacaaaattttttcaccaatacgcctctcatcagaaaaagatcaacaaaattcataaactccattcgccaaatggtggcattatctctgatgaggtgggtatcactcgggagattgaatctcattttgaccaacttttctcttcctcgcaccccgctgaagaggatatgcatagagcactgaaaggcatttcgtgttctttatccgacttggataaagctcttctgactgaagagtttgcccctgacgaaattgaaaaagcattttttcaacttcccctagacaaagcccctggcccggacagattcaactctaacttctacaaggctacctggtcaactgtcaggaatgacatccttaacgcagcctcaagttttctcaatggcaacgacgatgtggcttccctgaacaccactctcatcacgctcattcctaaagtcaagcaacccacatctatttctgagtaccgacctattagcctttgcaacatagtttataaaattatctcgaagacaatcgccaatagactcaaactcgtcctcaacagcttgatctcgcgcaatcagagcgcgtttctccctggtaggctcatatcggacaacatcattattgcccaggaggtagcgcactccatcaagcttaagtccagagggaaatcaggatggatgacgttaaactcgatatggccaaagcctttgacagagtggagtgggcatttatagtggccatactccgaaaattccaatttccccaccgtttcattcgattgatctttgcctgtatctccacaggcacgtttcaatttaatcttaatggcaaagtcgttggtaatgtcattccttctagaggtatttgccagggtgaccccctttccccttacctctttctattgtgtgcggaaggattctcctccctcctgcaccagcaagaaagaaataaaactcttgtggattttaaagttgctagacgggcccccacaatctctcatctcctgtttgcggatgacagttttcttttctgtcaagcttctatcagctcttgtaacaccatcaaagatgtcctggaagtgtatgagagggccaccggtcagaaggtgaatttccaaaagtcctcactctacttctccccagatgtcgagctcagagatcaaactttaattttagattttttgcgaatcccggtccgttcctcctttgaaaaattgggactcccccagcacattgggcgaacggaaaagcaattattctattatcttcatgacaaggtctagggccaccttcacaactggaagaataaagtattttcaaaaggaggcaaagaaatccttctcaaatccgtcattcaggccatcccaacgtattctatggcttgttttcgcctccctgtagccacatgccattctcttgagtccattatggccaacttttggtggggtgtcaacgaaaataaccgccccaagactcacttgcaaagctggaaaaagctttgcgaatccaaaagggatggcgggttaggatttcgttcgctggtacactttaatcaagctttgcttgcaaagcaagcctggcgcatcttaaaacaaccaaactcaacagtgtcaaaaattttgtccgctaggtattaccctcattcatcttttctcgatagctctccaggacactctccatccttcgtttggcgtagcatttgctggggaaaagagctgctgcacaaaggaattatatcaaaaataggtaatgggcagaacacatccacaacccgcgatcattggataccgggcatccgtcaggttacccccatttcccccgtccctgacaaagttgaatcgttcatcactaattctatgacttgggatataaccaccttaaacagattctacccgcctcatgtggttgagcaaattcttgctattcccctccctctttccccttctcctgatgatcagatttgggaattttcaaaatctggagcgtactcagtcagatctggttatcatcttagcctttcctctacttccccctagatattccctcttcttcctccccctcaccttggtggaaaaccctttggcatcttaatcttcttgccaaggtgaaacactttgcttttcgagccacaaactcaaccctccccaccgcaaaaaacctagcctatagaaaaatcattcactccccgggttgtgaccgttgtggaaatttagaagaatcggtgtctcacgctttgttctactgtcagagtattagaagagtctggaaagatacgcaattttatccttacatttttccttcctcttctgagattatgtttcatgatatagctgatatgatatacacctctctaaccaaaaaagaagtagaattgtttctttgcactgcttggttcatttggtttaacaggaacaaagcgctaaaaggtcaagctcaagatcaggctcatgcaattctcaacctggcgcattcctacctggctgagtttaattcttctctatcggcttcagcacccacctccagaccacaacattctatagccaccacaacttggtctcctccggcctcaggtcttctcaagctcaatgtggacgcagcagtttctaagatagacggaaaagcgggttttggcggtgttatcagaaatagtgaaggtttggtagttgcagccctggcccagccttacatcgggggaggagccgtcctactcttgaagctaaattcctcctctctatgctgcgttggtgcatcgacgaacatttcctggtccaagaggtagaaacggactgcaaagccattaccgacacactgtcccataataaggaagattttacagttttcggagaccttatttgtcaaattaaggaagctttatctctcatccctaacgcccggctctctcatgtcactcgcggtgccaactactttgctgataaactggcacatcgggctttggggttagatgaagttgcaatctggataggcgatgacccctgtcaccccatagagagtctctctctcttagcggctccctttctctcaaatatatatatatatatatattaaaccattttaattgtatatgtttattaaaccattttaattgtatatg

SEQ ID NO: 297717 - DNA, 1238 bp, Cannabis indica
aactaaataaaaaaataaaataaaaattgtttccatttcattttaccggccaccttaatttcacacaataataaactatgtcatacctaaatacttcctctttcaaaataaataaataaataaatacaattgttataccacatttgctcatacatatagcaaaatatagttttaataataatggttatgtttacacgagtagcatctaatactattaagaaaattattaatcactcataaaggttcacttcatagtggtaataccaatgctctatagaaatattttgtgatcaaagtggcttttgataaagaaagagttctatacaaagacaaaaaaaaaactaaaagttcaaacagaagttaaaagaaaatcaggatggatctcatcatcttctactatttcctcagttgccaatgtttgaaagatattatccccaaaatccactaaactctcttccatttttcttgtactgcaatgtggcgggacgtcatcttcttcgattaagtagctactccattttgaagaagactctcttccctttccctttgttcttctcttttggttacattcttttgatttataactagattctgaggtatcttccatggcagatttcaagtcatgattcatcattggcttctccttgtctacaacattatcaatcagtcaagtattataaaatccaagattgactaagaaaatcactaaagagcattggttatagtcaatactatttaaacataatttattgttattagtgtaatttaataccgactaagctaaacatttaaattaacaattattatcaaaaaccattaatcacttatagaatgacgacttatgatagtgttaggcatcattattgctaaacaaaagaactatgctcttccactccttgtgactagttcaaatctatgacaccataaacgttccaaatctcaaatttaacaaaactaattcttctgctacacctaagaaaaataaaataaaacacacacaaattgaataatgattgtcatctaaaatgttctgcgaattattaacaaaacaatttgctaaattaactatttcaaatactaaaatttacaaaataacttcacttaatttactctatgcgaccatgatagtcgcacaatataaatttatggtcgttttgcaattataataatcatttatggtcgcacagtataattcataattgtttttgcgacaacaaaaaattattttactaataaaa

SEQ ID NO: 297718 - DNA, 2575 bp, Cannabis indica
aaatatatatttaattttttaaaggatatttgtgtaaatttttattcatttatatgttaagtatgtgcatatatatatgtatatcctcttccccccaaatttgcaagattaattttagaggttaggagggatacctaggttgatctatttctcctctccctcttatcttctttcctacaaacaaatgatttttgttccccctcatcctttgtgctcctacggtaccctctccatccctccaaaatcatggaaaacatagtgtaaccctgtattagaattggaatcttagaaacttagacaataacttcacgatatgactactggtcaagagccctaattcctattccatggatatatatgcttctgaattttgcattctgatgtgctttttctgttcagtatgctcgtatcattcagaaacttgggtttgcggcaaagtttaaggtattatctttatctttcctttgtttttattcttacttttaatttttgctggtttaattttgtagtttaggcctcatgttgatttatttccttttgtgcaggattttaaaatccaaaatatagtaggctcttgcgatgttaagtttcccattaggcttgaaggacttgcatattcacatggtgctttctcaagtgtaagcgtcatccgtatgtttatatctataacttagttgactgatgccttattaagtattgtacatatttggtatttgaaacttatagttacttagagctcatcttgtgaccaatttggaacaagtctggccaatgcgaagattttgaaagtattgttgatccataaagttttatgtgaatgttcttctattaatgatgagtttttttcactttttcagtatgaaccagaattatttccaggcttgatttaccggatgaagcaaccgaaaattgtgctacttatatttgtctctggaaaaattgttcttacaggagcaaaggtagacatgttatattactttcctttagaattcattgtctgtctagtctgtttctgctactgatcaacatcactatattgtttccttaactttccggcctactttaggtgagggaagagacctacactgcctttgagaacatttaccctgtcctgacagagttcaggaaaaaccagcaatgatgggattgtagaagactcaaccgtattgttcttgtattaaatttttggcatttgtgtttttagtcttatatagtatgaaaagtgcatccttacctatggcactccttgcaatgttcgacttctagaagtttttgtattcagttcttttggcagatagagcaaccaaagacaatttgcttgcaaaaggtttgcagtgaagcactgtcgctgtggcaactgctgcacctgggttgaattgtagatatgaaaatggttgttgtcaccgttgactgatttgcttaaccattagaccaaaaatttgctaatgggttatttggtgtaaaattgtgtgaacaacatctgccaagtccttgaaacagaaatggaaaatggaggaatgaaaaaacttacttttaaacttatggttgaccttcaacttctttcttacttagaaattttattattttttattctgtttgcattataaatacgagtgtattatgttcatttagcaatttcttgtggtaataatggtctataatactttggtcgtatatattttgtttccgatagttggtgtttgatgatttaggtgaaaattggaaaacctggcactttcactattcgatacccactaaaaactgtttcttaacaattttgagcagaaagttgtactagaatagaatggagaagggagaggattcttgaacgggtgatggactatctattgttgaattgctttgtttttgtttaaaattctttgacatagccaattagcacgctagtgcatctttttccgtattggggtgttaggaaagtggctggtaagcatttgttaggacaagaaaacacggagtgaatgtaatgaagaaaacgcattttacattgaataattttcagttgttccgctcagatttgacggatgaatacttaaaagtatttaatagctatttttatttatttatttatatttttatggatatcttttcagtatttttatttatattgttttaggaaacattattgttttcaatttgtgcaaacacatgatgtggcagcaattagggctgtttatataaggttccaaacttcaactaattcaagccaaattatttgagaccgtactaaatgaatctagtgtaaatgatttgatcaatcttgaacgttttaaattttttggttctgtcatagttttaataatttcggtagctgttcaaaccaaaccaattcgtataattattttataagtatttaatatattttttttttggacgaaatgttatattttgaaacaatttttggtagaatattgatattgattttatattgttatgataataattctttattattatttatgtattataaacttattaaaaataaacaaaattacttatgtgtcgtttggtaacacttttgttttctaattttttaattacaaaataaaagtaaaat

SEQ ID NO: 297719 - DNA, 1399 bp, Cannabis indica
tgaacatcggtatggtgtgtgcaattattaaaaaaaaacggcattaatatagaagagggcattcatacaattatttttaaatgcacgtatttctgtgcaaatatctcttaaattttcttatccatttatttcaatctcttttgggtcacaaaggcttgttgaagagtgttagaaatattatgtatgttaattagttgtaatgtttgttacgataattgttgtgtatttgtaactaattatggccctaactaactaatatcctctttatatttattgactatatatagtcaataactctattcactcagcaataaggttgccctatgttcattcaatttttctttcattactctttcttctgtctttttcttttttatctgcttcactttctttttctctaattcaacaatggcaagaggtttaacatggtattagagtcatttcatccattgacaacaaacatggcaaacattagaacaggcaccgatgtaaatcagaatagcttcaacatcagtaggccatcaaaccagcaaaatggagcctcaaacctcaatcgatcgagaaacaacttagatgagctcaatctagtatatttcaatcataacatgtcgattaggctaaatgatcacatttttttttttgtagaaacaacaggttcttgttgcaatttgaggaaacaggttacagaaagtcatccaagatcgagatccaccacctcagttcttgagtgatgcagatcaagccccaaacacttttgttatcccaaattttttcctcatggcgtggcatgcttacgtggacaaaacttgtgccatgtaacagtacaactcactaaaataaagggctagttagcacccgagctaagggagaccccgacactcaaccagggatcaagtgactagccgcccctggacggtcccatgacctgctagcccagtgacatcatcatggccgaccagcctggccagcacgaagccttgactagccaaggattacactgtaggccccacaggacactcttacatgtgggcatcaaaggtgggctgcaaattgggccctcaaaacccaacagaatagctgaataatatatctagaatcaatgtcatttttggtcctttgtaaatatctaactaattatactatttttaaggatttgaattatacacctagggtttaaggcttcctatataaatgccttaacctctagctgaaaactttagttgcttaagccgcctctaagctaaaaacctcacactctctaagtgttagactctctctctcttccttactattgggctttatgccctaaataaaactctatttcaatgtaatctctatcgtttaattatcaataaagagacagaagtattttcatcacttatttaatatgtcatttggt

SEQ ID NO: 297720 - DNA, 2172 bp, Cannabis indica
aaaaaaaaactaaaaaaatattctacacaacctcaatacccaatacaataacaattatatttgcaagcccaatcttaaaatatcagaacaaaaaaactactaaaacaataccaaaacaaatgtaaaacaataagcagatataaccacttagaaaaatataaaagaaccacacacttaaaaactttttttctagtgagctcgtcaaatgttattttaggagaactaaaataaaaaaaaataaccacaaaataaccatagagaaggaagaagacatgtattttatagcctcaatcttccacacccactgatagaaccaccacagcaccacgagaacacccagaaaacaatcattaattccagtaaaatggagcaagaacagtgcaatcgacgttaaaaaaaataaattataaaaaataaccgtaaaaaaatactaaaacaaaccaaaaaaactaaaaaaaataaacacagtatactgcagtatgaaacttataaaaatacagagtaaaaagtgttaacgcagtactggctagaggtggagaactttgccgacactgtgatgaataactggaaccgacctattgcaggaaatggtctattcagaattcttgggaagttaaatagactcaaatactgcctaaagaaccttaatgccaagagtgtaggggatgttgctgtggactaccattcgaagaagagcagttttagcgactgatccttccaacactagattgcaagagaaggagttggctgccagtatcaactattctgttgctactaaaatgtatgccaactatgttttgcaaattagtaagataacttggctccgttatggggatgaaaatgccattttttttcatgcgagtattaaaaagagaaaagagcaaaatagaatcactaccttcatggaggatggtacagtggttgatgattacttaagagttgtggcccattacttagatcactttcgaaacatcctggggaaaaagagtagcgcttccaagaatctaaatttggattgctggtcctttggttctaagttgaacttacaacagtagctcaacttaataaggcctttttcggcaaaagatgtcaaagatgctctatttagtattcattccacgaagagccccggcccggatggttatggagcagcttttttcaagggattatggtcacatattggcttggatatctcctcagtcgttctgtcttttttcaaggatggaattattcctaaagagctcaacaagaccctgatttctctaatccctaaatctgactctcctacttcagcggtggactagcgttttgcaatacactttacaaatgtatctcaaagttactttgctcaagactgagtgaagtccttctggggttagtgcaccataattagggagctttcattaagaacagaatgctggctcataatattttaatttttcaagacttactcaaaggttataccaggaagaatatctcagctcagtgtctaatgaagatagatctcagcaaggcttatgatactgttgactgggactttgtggctgatttgttgaagggtctttgcttcccttctagattaatcaactggatcttggtttgcctcagaggaacgtcatattcgttgatgctcaatggtcgagttcatggctccttcaagagcgaaaaagggcttaggcaaggagaccctatatctcctttactttttgttctggtgatggagtatcttactagactgcttatacaggctttcacagtgaaaggttttgggtttcaccccctatgtaagtccttgaaccttgtcaatctttgcttcactgatgatcttgttatattttgcaaaggcaatcctacttccctaaatattgttcaaaaagcttttgaggatttttgttgctctactggcttagcggctaacatgtcaaagtcttctatttactttggtggtgttgacatgagatgtaagaagctgatgttagatacctcaaagttgactgaaggttcctttccgctaaagtaccttgaagttaacttgaggccaaccaagtggaaagactcggattgtggaggtatagtggagaagattcgtaagaagattcatggatggatgagttgtgtaaagcccgcttagttaatttggaaattagctgttgtttatgtttaattatgaaa

SEQ ID NO: 297721 - DNA, 7984 bp, Cannabis indica
tttttaaagtaaataattttgaagttaaaaaatcaaacaccatgttagctttatatactatatatacaggtgtgacactacataatacactagtaattttcttttctagtttatttattaaattaaattgtacaagattcgatattaaaatatatcttattataagagtatgtcacaatttataatacttaacaacttgaggtgtccttagcatttttcttccccttaatcaagttgaacaacatgcctattcccttattgaagcatatggattatttgtatggaagagtgttatgatatcattgttgtttacatcaaattagcatgcatgcatacaagttgtgcaactaaattagaaatatgtatatacttaaattttataattaagctaatatataatggtcacaatctatgtttggttgtcttattttaactgtgttttagaagctcaagtctcatcaaataaataatattgacctatagtcactttttgaccaatcaactaggcatgattaattataatgaaggccatttattctaaaattagattttgagtttgaggtttattaaactcttcactatcttcataagccatgtttgtcaattttcttcattttcgccacataaatatatatattaatattgttttttcttgttcatttatatgatatgaatgcaaaattcttcattatattatatgttttctatttttgtaaccaagatggtttgatcttgtctaacatatatagtacttatcattattattatttatttaattttcctatttgtgaggaagaattagaaagttgttgtatatatataatattgatataaatatatcatagcttagctagctaggcaaattataggctcttgcttgatcttaaaagacaagtgtctctcatgtcctactcaaatgtccatggtggatgaattgatgatgatttttgaacacccatgattattacaattttattattttgtgatctaagtttgagtttttatatctatttattttgtttattaataaaaaaagaagtaaagatggttatagttacaagagagagtttggatctataatcttaaaatttgaactccattttttttaagaaataattttaaattttccatagtaaattttttcttctcctcgttctcattcctatctttgtccatacaattagagtagattgagatagaactctggatggatgtttgcctcccccaaaaaaatgtatattaattaataataatgtacatatgtaaaattaataaatattatcaagaattagctttaatttgatggttaagctacttctatatgttcagaataccaaggttcaaattctaactaaagcactttgagtaattattttttttttagaaaaaagaatttattcaatttggttaattaaaattttaatttgcatttatagcaaaataacacaaaaatataatttaaaattaattaaatgtatattatatatacttcaagggcatgagaagagtttttcaagtgtgtctccctcttctacagagactattcagtggtgtttagcatcttttagacgtgtcgctttgcgatcggtaagggatatactctataaaaattattatattaaactatatgaaacacgatacttaattgcactaatagcaatattaacacgtgagaaagtgctaattactaataatgttctttaacatgttaagtctataataaccttaaaaagcaagtaaaaaagaatagtagcaataataataaggacaaaaacctataatatttaataataaacactaagatcaaggaatcattgaaactatatatgagctagaaatgtgatactactttgtctactaatttcaatttcggaatctcaaatctcaatgttaatgtttaatgattgtttaataaccaaactaagtagtacatatattatatatcttccctctttccaaaacctctttatttatttattttattttttgcttaatctcttttaatttacttacgttgaaaatattagtttattattattgaaacaagatccacaaattttagaagtaatttaaaaactaacatgtgaaatattttagtttttgtggaagttgatcttctaaactaactatttatccaactcacctaaaccaattaacttaactaactttctgttatgttagttagttagttgatgctatttcctagtatgagtccagcctataaatatgtttattcttttcactttagagtagaagaagagagaggattggagagagtttgcttaggattctaaactgagagttctgttcttgaagagggtcaagaacaagggggtgtattcaggttgtgagagagaaaactgtgactgttttctctggtgtgtttcgagtaccacagggctgagattgctctgaatcttgtaattgtattaatactctcttattccacatattaatgaagaattggtgatgtttctcagctggaatatggtcaggaatcatgttaatctctaggaccggaaccaggataaattcttgtgttgttctttgtttaatttctagttttgattcattgtgttgttaattagtttgtgttcattattgctgtcaaagttgtgagtttattgcaggttttaggattgaatccttgatgttattgttgctgaaattacaacattttcatactaatttttgaatcttacatatgcgttaaagagagtgttaattgtgatctctatagttaatttttacgtttgaaattatatgtccaaatatttttttaatagagatattcattatagttacaatattatctttgtaaatttttgaaattttttaaatagtttacagtactaaaaaaaattattaatattctaatttaccacgtatattcaataaatattaaatttatttttgacattgcaaattatttataattttttcaaaaacttacaaaaattatgctgtaataataataaatagcgtcataaaaaaatccaacatgtatttttatacacaaaaattaactaaaaaattgtaataaaatattaataatattatcaaagtaattaataattacaaataaataaacccaaatattaacttgtaataaaaaaaatttcttttagaaaaatacatatacttcaattatttaataaaaaaaaaaataatgaacaaattaatactatatcctttacaaaaaaaaaaaaagattgatttcctttaggccaaataaaataaatatgatcattattactagtactactaaatgcaaataacaaaccacattcccatatattagatgtaaataaatgtatcatataataaatgtaatcacgtgggtgatgttaattagtttctatattttgtttttattattttaattatcatattaattttaattttactactactacgtggctacatgtaagattttattacttagagtgggctagttagtagtaatgccatagtgtgatcctaatttttaggtgataatggcttctatctctattttcatgcatacacatatcatatcatcatttacctttctctacacgaaataccaactcttttaatttaatttaattaattatacagtaattatttaataataataataataataataataataataagcaaaattatcccacttactatacagaaaaaattattttcaaatataaaaataaaaaaaccctctaataataataatctcaaatattattttaaatcttacattttataaaaattattcatcgaattctctgttttattaaaataaatctcatagtgtattttttaaaaatagtaagtaatactatactgttcgtatcgcatcacatatgatatataacttaatataataaaatctaaaaaatattactaagacgacacgtttagataatattaactaaacacattaaatacactataacaatactctttttccttaatataaccaatcaatttatagataatttctagggcaaaaaaagagtaaaaagatattgtaaacttaatcataacatctccacttcaaggtatttgttaatgtaaaatttcaaactcaatgtattactatattcttacaaaaaatacatatcaaaattttcatttaaaaaaatacaaagtacaattttactaaacatattatcaaaaacaatatttattcataataataacaataataattagtaataataataaatagttagtgtaagccatagaataaccgaccttaagtcgacatagtagccgacctttataacaatacttctccatgtgaaaaagtgggccccacaccacgatcaacttctctcccactctataaataccctccaaatttcactctaccatattattattttcatttttctctaaattccaataaaaaaatcaaatattacaccaattcattattattaacaatggcttctcttcatcaatttctcctcttctctctaatcattcccttcttccatttccttcaaggtaatgatattagagcaattcgagtcacgtagcactattttagatgtttatataatttgatttgatgacccttttgtttgttttaaacaggtgttaattcagctacattcacaatcacaaacgaatgcagttacacaatttggccgggaattttatccggtgccggaacttcaccactttccaccaccggattttctctccaaccgggagaatcaaactctctccaagtaccaatttcttggtcaggtcgattatggggtcgaaccctttgctccacagacccaacaacatccaaattctcctgcgtcacaggcgattgtggctcctccaccgtcgaatgcagcggtgccggagctattcctccggcgactctagctgaatttacacttaacggcgctggaggattggatttctacgatgttagccttgttgacggttataacctccccatgaaggttgctccggtggtcggtgaaggtaccggcgggaactgtactacgacgggttgtttggtggatttgaatccagggtgtccggcggaattgaaggtttcgtcggcgagtgtagagagcgtggcgtgtaaaagcgcgtgtgaggcttttggggacccacagttttgttgtagtggggcctacgctactcctgacacgtgtaaacctagctcttattctctattctttaaaaatgcgtgtccaaaagcttatagctacgcttatgatgatggaaccagcaccttcacatgtgccaacgccaattacgtaattaccttttgcccttcgccaactacaaggtaaactttaactgaataggggtattttcgtaaattcatatctttgctatagggaattatagtggggagttctattagcttagaataatttttaatttttatgttattatgtaaaatataatacttattttaatttattttttattaaatttttaaaatatgtataatttttttcagtaaaattttagtatttttttattttaatttttataatttatttttatttgattggtatattagttttttttttttgaaggattgtatatatttttaatacaattaaaatatatattttttaaaataaaaattattcaaatagaatgtatttataaatttttaaaatataaataattgacataattttatctaacaaatttatacatatgttaaattagtttacatttattttcaaaattctttattaatttttttatgtcttcttttccatttttgtatatagtttttcaaatgtatcttctattttttttatatttacacaatatatttttttttttccgattttgataattttttaaaataatgcttctacacaaattctcaatgttacatttttagtttccagaaattattacaaagtaatattttgatgtgaaagaatgatacaagtgaatacataacactcaaaattatttattttctttaaaaaaaaaacaacattgtgaacaaaaagaaagaaagataacttgttagaatttttttgtttgtttaataaaatgatgatttttttctcaattaatttaaataatactaaaatatgaattcatatttatgcattgacctatgagatgatgtggttgtcacgtttgtttgttttttcttttaatttattttttaaaatttgaaaaaataaatttatttacgtaaaatatataaatggcggtgggtgcagtgtaaagtcttctaacgggaagtatcccgaggcagccgaagtatcggccagttctcgcaaaacgacaccgtatctcattggatttggcgttttaggggcaagttggggatttcggcaactattcatttaaccggcgggttcattgagtgggcccggcccaatgttgtgatctgaaactggatcaagatatggacaatgaattggggcccactttatttttactattggttacaacttgttactacaacggcccaattgtcagtgattattcattctggctattttgtcttatctttcaagttgtatgagtggaaattaaatagtagaaaataggaaaagttaattttttatttttttaaattagaaattactgtaaaaaaacaaaagagtactctctatttcgaatctgaatattaatatagtttagttggatcttgaattcttgcatatattttttctaatattgattttgacataatggtattgttatgttaattataaagtttaatggtaaattaatatatttatttatgtatataaaaaggtaatagatgtgatttattttgtttatggagacaaatgcatactaacacaagaaaaagctactattattggcaatgatggtgtcattcttagctggaattatggtgtttttattttgataataataattttttatagccataaaataaaaaaaaaagttattgtgtaactaatagtttgaattctatttatatgttaatttattttaaattttttaaaaatttatcttaaataattacaacatacacgatcttaaaaaaaaaattcgactatatatattttttttaaatagcgaaacatataaaagtgaatcgtaaattcaaaaaattaaacaataatatatgagataattattatgatatatgaatatgataattctttttaaaaattaatataaacagtttctagttaaaaataaatctcaataaaaatagataaataaataaacccataaaaataacataaaattaaaaaccttaatatttatcaaagaaaaagttatatataatttcatattacttttaagtagcatcattaaatggcattaaatggcaagtagaagagttacactcaaatattatgtgtgtgtatatataaagaaaaggaattttatgtatgtatacagtatatttatgggattaattaattgttgtttctcatatagattcaactgccactaagtattatacataattaagagtaattaacagctgataaatatattggttgtgtgtggctataatttgatgagaatatgtcattatataattttatattaattatgattagatccatagatcttctaattaattattgagtcctcttattataaaatgatattaatatcatgagattttaatagcaactgcaagtttcctgcttctactttgtttaattaattaattaattatatattatatatatgttgttgttagaaaattaaataattgggtcaaaattaatgtcattagtatattaattaatctccaagtttttcttcattatatacatcgattatcaatttactccttttagaatttatttcttattggattatatacttacaagaaacataataatgctaattcattataaaataaaaaaaatatatttatttaattgatttatttatcatttatatatacggtgggttgagtaatattttttttaattaaatttttgtttttttaattaaaaaataaaataattttcccaaaaacatgttctatataaaactgttttta

SEQ ID NO: 297722 - DNA, 1437 bp, Cannabis indica
tcaaaaaccaaaaaaaaaaaagttaaaaaaataatatatgtagtaggaagtgtttagagcttaattgtaattaaggatgtaaactgtctcctcctaaaaaggtttttacagtgggacgagtccgacctcacccatttatttctttattttttgagatattttttcatttaaacaaatcatagcttaatcaattagaagaatacaactttttacatgataaaaatatttcatacatcaaattaatatatcttaatttctaaattatcttccttacattactaattttgatgatcttttatatatatctttcttattgattttaaaatcactaattcctttatctctctttctctctatttgtatctataaatgtaaaattcttaatttttttatctctatttttctaatttttttttttaaatccctaattcttttacctttttttctctatacctgtacatataaatgtaaaattcctaaatttctctatttttccaattttttttctcataaacaaactttataccctgttaataattgatgaaatttatcttcttttacacatattacaatatcagcttattaatttttaatttttttttcgaatgatgcatgtaatggtttttttgttttatgataaatttatctttaatccattaaatctctaaattttttcctctctttcaatctttatatataatgaataataaattaaattttgattttttttttctcttttggatgtttctggtgtgttttctctaactatatttattttattgatttttcataatattatttttttttttttagaaaaatagatgcttatacctggtactagagtttccaaagtaattgatgataaattttttattttatctcatattttgctacatagtgaacttatttacatgttagtgctgagtcattatatatacgtgttatttgatttgtcaaattgagagtaatcctctcttcaaagattagtataagtatactacaataacatgatcggacttaccaaaataacagccctaagaattgaaactttggtgtacaatgacatgtggttgatgctcctgattgctactctgattgaactccctcaatttctcagcttttgtttgcttggtagatatttatttaaatttatcttttcatattgtgatatatttttttattatttttttgaaatcaagtctacatatttgattttgttagagaagtaaaaaattaaagtcgagacttcataagaataaaccataaaactaattactcaatccaaaaagtagtggtcacctctactaatggtagaacaattagaatggtcaaacaacaactttgctcttttaacaatcatgtcaattatgtaaagaattgcatggtctttgtaaagtctttttttggcaagttagttgacaaaataatttttccatt

SEQ ID NO: 297723 - DNA, 1527 bp, Cannabis indica
aataataataataaatagaaaaaaactacaacattgatgcattaataaagaatatggatatacaagtaatttattagatgaagaaataagagtatatttaaatttgaagtcttcatcatactcaaggcccctttaagttgtgtagaacaattggacttctgacattatgggtgccatcatcagaccacactagtgaagcagacaccatagaattattcgataaactaccaccattaacaatcacatcaaaagacttctcctcattcagtgacttgaaagaaagaacatcaggcactactttgatacttatcagagatcttgagaggattttagccttataggtagagttagcttgaccaacattcttgattcttctatgaaacgtaatactaaatggcttgccagttggaacttcagaagtcattgaagggtaattcagatcttttggtgatgatttgcctaagtcttgaggacaactgctgttatctccagatataagcctaaccttttcttcatcatagccaatgctgcatagaaattgtacgtagtctcccactgaagaatcatacacaagtcctggatttaatgcttgaattgggttgacatggccagagccataagcaaattctccattggaattcccagtattgttcatcaacaaagctacaaacaaagagagaagaagagattcagttcacatggtttggtagtttgcatacacataggagaagagaaagagcaaattctcatcgaggtaagcctttgcaaaacagttcttgagcaatgccattacctgtagtcatgagagatgatttaatggctgagggtgaccaatcagggtgaaaagttttaacatatgcagctgcaccagcaacatgggggcaagccatggaggttccagacataaaattgtaactcactcgccttttgtcagcagggctgatcgagggtgaattaataggaggatatgcagccaatatgttcagaccaggggcaattatatctggctgcaacacacttaaacatattaatttaagaaaaatagttatctaaaaaagaaatgaaacaaaaacaagtaggactaggaaatggaacaatgcgaaccttcagaatatctggtgtgattaaatttggtccgcgagaagagaaggaagcaacagtaggagctgaagaatcttttatagcttcacttcttgaaatggttgcttgaggattactgaaaaaacaaaataaaagagagaaagacttgcattatttgagaggtagcaaacacacttaaacatagtgttttaagggtatatacaatgatacatacttggtggaatttaagtatgacaagaccaatgcatagtcagcttggttcagagctgaagcagggaatggaacaacagaagaaacaccaacgactctatcgttgttcgcaatacaaccagaggcacggccttataggcctcttgatcccgaaaagtgaatcacacaacacaaccttcccttgactaacactgtctagacagccttcatcacacc

SEQ ID NO: 297724 - DNA, 4215 bp, Cannabis indica
taatatttttttattatataaatgttaatatatatatatataaaaaaagtaaatacactaactataatctccttctagaagattaaataaacccaaagttaactacatgattaaattgtaattttatttctattatttgtaaattacatctactttttttattaaaaaataaaatctccattttaaaagtgcatagctaaaaaagtaccaataatgtttaataatacttagagattgtattttgaaaatagttagtaatattttataataattattaaaataaattatgtgagatttaatacgtaatgacaccaatagcgatgattcttttagcatttattttttaaaaacgatctagacacgtgcctactcttcttacgtttgaaaccaacctgataccattttatattgatttttaaattatagagtattcgaggactattaatggagaacttgagttgatcttaagttgagtgaacctcaatacaaattttgttattttaattgttgtgtatacaataatttttcttaaaaatttcaggattatttttatatattaaaatatcaccacgtgggaatattttagtgatgtaatgagtgatacttaatttgtgaaaaaaaaaatatcacataacataaaaaatattagggtaaatactatttttttatatatataaataacaccaaacatagtattatctaattatattttgtaccttgtattttgcaatggttaccgattggaccctctgttttgttaagtaataattcagactttatattttttaaaatggtacgaaatagaccctgaatttaattttcatcaaattaaaacttaattataacctgatttggaggtataattactagactgattacaatttttgcatttgttcatgctaaatactagttttaggttagttatattaaaaaaataaattgacaaaaattgagttcaaaatctatcttgtactatttaaaaaatacaatatctaaattatcatataataagatagagagtcgaattaatacttttacaaaaatataaggtctaaaataatatttattcgaaatataacattaaaaatattatattaaaacataagtaacagatggggatatttctttaatagaatgttaaatttagtgtatttttttattttgtaaaaatgacaattgttattgctttgtgaacatggataggataaagtgtgaagtagggtccatatttgtgttcaattgaggattgaaagtcatttttgcagaaatttgttggaaattactgaattagtaatgctaaatgaatatgattgttacgcatgtgatgtcagagagaataatacaattatacaatatattttttttttaataattatacaatatattatgattgaatatataatatgagaaattattaattaattataaagtatcacattaatatagtgttcggatttcaaatagtaaaagagtcgagtacctttgtccttaattacctctagtttgggtcgctccatacccatactattggtagctcccgaccatttggttaggcccttatatttgttcggtgatccctaagaccgaggacgaaaatatatttggttgagagaaatgagaataagaaaaaatatgtatatatttgaataaaacttaagatgcataataaattgatatatttttttttcatcttgtaattgaatggccattagaatgatattccattgctttaaaatataatcaaacaaaataatagaataaaaattgatttacttccatttcattactcccaaccaaacgcaactttcagcccctattaaactttgtaatcttcttttacacgttattttcaaactaattcacatactttttcaaaatcataaatttggcaccccacctaaattattcttaaattttggcctcctatcccaaacctccctccgtccctactgatagggacgggatcaacaccacgtgatctcctttttcacataatttatttacctttagaatatttttgaaaaaaataagcatattttgggtaaataccattatagactctgtgttttacaaacgttactaattaaaccttttgttttgttaaatgacaaaataaaccctgtattttttaaaattgtacaaataggacctctaaactgattttttgtcaaaataaaacttaataataatccaatgattctgatctagagatgttatgataaaactgattatattacccgcatattttccttgtagagaggtccaaaattgaaccattttgcttagctaggtaaacaacttcatgtaaaatggcattattgattttgatattgttgtttgtatctttaatgtggcaccactaactaagacagttaatgtttatggcccactgggctgggctctaaactaagaagatccacataattgttactaatactttgtcctaataataatgacaacaacaataacaacaaccagtaccacttctcttatactatagtccacatattcatatacatatacatatacatatgctatcttttaacgtttccatcatgaaattttcatagccaaaacaaaaacataaagagaaaattccaaaacaccaattattttctgagagaaaataaaccaatcataattcattcataactgatatttttgtaaaggatttcagatatttcagagaaattgcttacatatgcaatcttataattatgtttgccgacatgagaggtcccttcctgaaaaattaaatacaaaaataataatataattattttgttgggaaattttataataaaaataataattgaattggataagttgattatttatgaggacgatgttgaagaaaaagacagtttaaagaatagataatgaaaaactcttgcagtgtcgagtagtcactcaatccatcattatttccttttttttcaacactaattaattattaatatcgtagagagtttggaggaaattaaacaaaaataaatgtaggtttatataattagagaaatgataaatgaaatcagtggccaataatatttaaaagaccatgacattagtggtgtctagcaccacttagagatggcgcattacgattagttaacgatattttataaaagttcttatattaaattatatgagacttgatacttaattatactattacattaaattttataagacccgatacttaattatactaataacgatacgatacttagtaggatactattcactaaaagtacattttagtatttctcataaccatataatatatgaaagggtgttaggtacaactaaaatattgtagtattttttaatttaaaagtgtctcattattaatgatatagttctatttattttaatataattatataaaatggataacttgataacttttcaagtaacaccactaccaatatgtgatatagttccatttatttttgcaatttttaaagtcttacggtacagacagtttgagaaattacaaaaatcgcgggtttgaaaaaaatggtcaaaatccacaccgcaaacatccatagaatttcagtgagatattttaaagggtaaatactattttagaccctgtgttttgcaaaagttatcatttagaccctctgttttatcaaatgacaaaatagaccctatattttacaaaatggtaaaataggacttgctcaacacaattttttttttaaatataaccaactttaaaacaattttcaacacgaacagatacagaaaatgtgaatagttttgtcataacatcactagaacatattattattaagttttattttgacaaaaaaaatcaattcagaatcttatttgtacaattttaaaaaatataggactcattttatgttggctattaaatgggctatgcagctcgctagagagcgagggttcaacaagtttgttggtgcctcggatgcaaaaattctgattgatgcgttgaagaagcatatttgtccacctatttggcagttaaagcctttggctttggaggtgttgaggttgtgtaatttgtttgatgattgtaatttcttttttatttctcgtcgagacaatttagcgtgcgatgctttagcaaagcaggcaagacaaagtagccagtttgatgactacattttaagggagggatcccctattgtgattcccaacttttctttgcaatgaacttcttttggttctttcaaaaaaaaa

SEQ ID NO: 297725 - DNA, 1690 bp, Cannabis indica
ttttttattgaatgtattagagatgtgtgtatgccattggcctacattattatgtaaagaaaagaaacaactagaattaagcataggagtaaactcttgatgaagaacatagagtttcctgagtcttttagttgtcccaattaccatgctcggagaatgagcctatattaaacatgaattattggcaaaaaaaaccagattagaactactgtcaagaaatgcaatgattaaaaaaaggtttctcttgaaagtgggaacaaatagcacattatgaagtgcgatgtgtttgtttatttagacaataccaatgcccttgactcatatgttagtgccataaattggggaaaatcattattagaaaaatataggaaacaagatctggtggcacacatgtgatatgtggctccactgtcaatgatctaagaacgagtttgagatgaaaagtgtttaccaaccatgttggatgctccaggggtgttgtttgtgtcatcacgaggagtggcttggctaagtttctggctgagaagtgatataagttgctggcattgggcagacaattctacatgggttaagtttccaggggccatgtccaagatggtgctgacttggttagcatttgtttggatttttttgacttcttttggtcaccataccctggaggaaagccatggataaagtagcatttatccacattgtggcatggtttgccacaattggtgcatgagggccttggttcctttgatcttgggggaggattattggaagaggagggtcgaatagatgttgccagagaggaagtatctgaggagccaagagttcgttgcctctcttcttgaacaatcatagcaaataccctcgaaatattaggaatgggttcattgagaagaatttgggcatgaactgaggcataagactcattcaaaccagtgacaaattgtaacacttggttttggtcgtaatattcaagaaacagtttcatggcaccacatgtgcaagtagtattaggttgaaattcttctaactcatcccaaatggatttgagttttgtaatgaagtatgaggtgacagacttatcaccttgctgcaagcatgttagttgtgtttgaagatgaaagatctgaggtccattgccctcattaaatctttcttctagatcatgccacatatcgaaatgcatgatactttgtgctatctctgaagaaaaagaattgacaagccaagacattactatgttattacaatgaatccaagaatgaaggaggggattaccagtagctggttgaggaggagagccgtcaatgaacgcatagttgttttttgcagtgagggccattgtaattccttgtttccaagacttgtatttggaaccattaaggacggtggaaaccaggactaatccaggataatctgcagtgttgaggaagaaaggactcgagacgtcttcatgagccaatcgatcgagtggcgaagaacgacgagtgtgaacaggtggttgggaatatcagcaactggatcaggagaagagtgagcttgtttaagattatcttgttcattctgggattgtggtcttgaattgggattttgtcaaggttcgggcatcattgacatgaggtgcagaagcagcatcaagattggactccgattgattgtgctcagttgtggatgggggaacaccatcttgagaacgagt

SEQ ID NO: 297726 - DNA, 4920 bp, Cannabis indica
gattttctaagtataaaaaatcaaatttcccattacaaattacaaattatttacacagaacaatacaacacaaaaatttccaaaaaatataaaataattaacaatgatggagaatggtaactcccaaattaagaattatatttcctattctgaaattacgtaaatacccccttcagttgcgttaaccttaagggtatattcgtattttcgcttaaaaaaccccaatttgccatttttttcgtaccgtacgaccgccgaaaaccctaggccactcacaattcgcgaaaattttcctcttcagacattcgttgaaagtttttttcctctatttctccgaatgaatgattgtatttagggttccttcttcgtcgattgttgctccagccttatgaatcggagttttccctctcaaattggattgtcatgtctaaaaggtgatttcttttaatcttccccgatcctttaacttctctttcgtactaatttttgttgtaatatttctgtcgtaaattaggtcatttctgatccaagtttgttgattttgattgatcttcgttgtgtttatgtgattctgtatctttctattggttttgattttgggggaaatgcacagttttcttgtataatcgatatttatatatacatgtatgtggttgtatgtgtttttttgggggattattggattttaagaggagatatttttgagcttgttattgggtttttataaagaaattattttgaattttacgttcttattattgtatctgtttggttgatgagaaaaaagtgagccaaagataactgtggcaaacattgatatctaatgcttagtagtaaatgggaaatgtatcatttttattatttttctgtaattattttacagggttctttgtaagttctttgcacaaggagcatgtctgaagggggagcattgtgagtattcacatgattggaaggaccctccaaataatgtaatagttcattgattttattagtgtatctaggcattgtttatgtttaagcatatgaatttaatcttttttgtttaactgtttcaggtttgcaccttctatcagagagggctgtgtgcttatggtagccgatgccgatatcaacacactaaggcttctcaatctcaatcttctggttcatcttcgtccacaagttcacagaaatttcctgtttcagattctcggtctcgtcctcattcttccagcacctcattaaatggggttgctttagtttcaggggtgttttccgagctctctgctgcaagcaggccttttgttgttcccaaacaacctgcttggaatcaagggcttgagcaatctgatgctctacatagtggtaatgttggtgagagcagtcttagtccggcggatcttcctatctgttcatttgctgctgctggtgattgtccacgtggggaaaaatgtccacatattcatggggacctttgccctacatgtggaaaacattgcttgcatccttataggcttgatgaaaaagaggaacatctgaggacatgtgaaaaaaaagcataagaatctagaggcattgaaacatagtcaagaaattgaatgcagtgtctgtttggaacgtgttctctcaaagccgacagcagctgagcggaagtttgggttgatgtcggaatgtgatcatccattctgtatatcttgcatcaggaattggcgtagtagttcaccaacttctggcttggatgtcaacagtgcattgagggcctgtccaatatgtcgcaagctttcatactttgttgttccaagtgtcatttggtacacttctaaagaagagaaacaagaaattgttgacagttacaaggcaaagctcaagtaatttgtttacctccgaaccaaattatatatggataatttctcaattatttcaatagttgtcttctacatttgcaatatttttaaagaaaaggaacttttaattttttatagctgaaggcatattgtattattctcaagtcgttaagttggtatttacatgtgatgaattgctagttttaattagtggaatcaattggtttttcttctgcaggtcaattgattgcaagcacttcgactttggcaatggaaactgcccatttggtactagttgcttttacagggtaatactctactcctagttgctgttattttgttcatataatgctccaccttttgtatttcatatgttatttgcaatttggatacgtggctgttattatctgagaatatatgctatcgacaatataagtgagaaaggtcttgttttcttcgatttctaatttatagattatttccttggcttctttgttgtgaatttcttttgaagttcttgttcttcaatgtcagttttacctttaggctgtaggctaacttacagaggctcaatgtgtactcagttaatataaactgaatttaacgtactgactaatatttaaatgaattaaattggtgcttatcatctgttgctgtgttagaattaggaaggggttagtattagaaatcattcaagatggaccacattttttgcctgatcctcgaaagcctcacccaggctcagcaacagttgatcgacctggcatttttcttgctgtcttattggtcgacctgcggagatttgggcaatgagtaacattaagttttcatgaactctgcaactgaagtagacagtttttttagaactgtgagtggtaagatgtagtggggcaagggcatgggggggacatttacttgaattatatcatgcaacttctttgctgcaatttactttcatgaaggagagtattagctttattactcctttaatggatagaatatttgttgtgttccagcatacggtcaagccaggctcctatgtatggaaacatcacaggccaccaccacgaaggcgaactccacacagatccaattttgtggacatcgatgctatgttagacgaaatggagtgtttattggatgacggtttagactctgaagatgatagtacttggaacatggggttaatgttttcgttgatgggctttgagacggactcatctagtgatgaggattttatgttctaaactcagcttttggattagccaacttttaattgccttatttttattttggacgttggaattgttgccatcattttttttctttttttttggcatatttgtcggggacagaatttaacttgcgtcattgaacgggcgaaacatgtagtgtctaaaactataattaaacatgtgaaataagatataaattttatcttcttggtctttgataatgtttggtatcctggtttcatttctactgttttcgtcttccatggctctgatcatggttggctactaagcagtgaacttagctgttgttatctgatatcatttgcagcatgcataccgcgatggcagtttggaggaagttgatctgcgtcatctcgggaacgaagaaggtctaactgtgatagctaaacacgttaggttatatgcttttttcccttcctttcaatttgttcccaagaattaaaacaaaagccaaaacttttccatattttttttctcacaacttaaaattttcggtattctcaggctatcagacttcctaagtgacatgcatataaggtgatacccccctatgtaagtttgcccctacttattatgatttccttatcttggtgaacaaaaatcttgtttcgggtccgaatataagtagattctttgtcaatcaatatgtgcagggtgtttactcatatgaacaagaagataataagagattgtatgatatggtgttgtatgttatcttttgccggtggtatgctcaccttgttttttttggggtatggtgattcttcggtagggtatgatttttataccgtactattaggatacaattcggaccattcatcaaagattgtacgctgattcttgtcttcgtacaacttctggatgaatggttattatcgtgtcttatcatcgtaaatcataccctaatcgtagattgtacgagtaacttcttctccaagatagagaaagagagagttgtaatttaatgtattttccttccaattttgtgttgttttgtaggctcaacacttatacacgatgatggcagaggttggttggttggttggtgatgcttgttgttatgaagttgaaataatagtactaaacaaagaacaaaatcattgcaagtaaacattattgaaaaagaaaaagagagatatacacgtgaggatttttgacaaagtttgctcctttttttctctttttcttagattgtatacatataatcatatatatatgtctctcaaatttcaatggctaattcttgtgagtcaagattgaattttgaataaaggggcatgatgatatgaatatgatatatatgatagaggtgttgtatttgtagtaattaagtaccttcctttgtggatgagtttgagcctccaagtgtatatatatcttgatattatatgacatggctatggctacttctactggtcttactccaaatttttaataagagagagacttggttttctaatatattaagctttttacatttacaatagtttctattttcagctaagaattcaaagttttagtttttatgttttaattgtgcatgtgattgttctgaacttcattaaaaatgttgtaagccttttcatttgactaattaagatttttgacactcgaattctgatacgtatcaaatcatgttttatgaacttatcaagtcgtaaattattttttttgaaatattgacattgtaagattatttttcaattttatttacaaaagtctaatgtagataaaaatttacgggtacgatttggtatatgttaaagtagaattgaattggattagatagaaattcttaaatctaaaatttaaagggaattttaatttcctaaaagttt

SEQ ID NO: 297727 - DNA, 5757 bp, Cannabis indica
ttctttttctttttcacattacttttttggcctggctgcgagattgcagtttcttatcataacttttctttctgggctgtatagatgggttttaccctctcttcttgtatttttaccctaatcaataaatacaattagttttgttgaaaaaataaaggagagaacaaaggaaagaaaaagatattaatgtcaccaccaaacattatttgtaaaccaatcttagtaccattcctatttttaagtcaaacatggcttggtttgttattataacttactagtttctgttattctgtattccaagtacagagttttaaaaatatcatgaatccaatgctttatttttgtcctccgtacattgtatattgactttttctgtggggtacgtgtaatgatcaatagaagtaaaaatactttgatggttcaactttttgttttttactttgtggttatgtttttaggtgcttgatgcattggtcagtctattttgtcgttcaaatatatcagcagaaacattgtgggaaggtggttggcttttgcgccagctactttcatacagtgaagcagaattcaaaagtgatcacctcaagctgttgaatgtaagttattcttcttagataaagtagatatttgaattcacatggtgttttcttgtttgtattgatgtttgttttctcatcttttcctttaggttccttttagtttcttctattatctactgttcaaggatgaaaatattgacgctataattttatgaaaatattagagatattttcgatatcaatggaaatttcaagataatttatggttgtcacaaatatttgtctaaaaatataaaatttcttgataaaacttgtacagatacaataatattcaacaagtataacaatatatacagaacaataactaattaaactttaacatcacttaactacaatgtcatacaaatatagtaacatttgatattttgataatcacattttgatgagtggttaactttatttatgagacttgtaatccaatagctaagctccctcacctcactacaaagtcaattcccatcccatctcaccaccgccacccctaccacaacttctcacaatactctttctagtataattggtaattactattcctccccttccaagtaaagcgtatcacatttctatcattacccctctacctgcaaattctttcatcttgtcttcagtgaaaactaagaaattgttgctttccggtataattagtaattactattttcgtcctccaagttaagtgtatcacttgcctatcattatcgctccacctgcaaattctttcatcttgtcctcaaggtgaaaactaggaaattgttgcttgatggtgtcaaagtgctctcaagtatcttcaaataatggtagatctttccacttaataaggacctccaatttgtggccgtcatcacttttggctgggcaagcgtttaacacaacaacaagtttcgccttcaacttagtcgtaaagtaggagaagaatgggcaattctagtagcttgctgaagtcggcaaaaatggaaaatggggtgcacaactgatattgctagaagacccaaatgttgtgctaccctactgatgtgacgtataactttaaagtgaccataaaaatgagtagcaaaattgttgttcttgtgaagtgcaagtgtaatttgacagcacgagtgaaaattcacaaacacgtggtccccaattttaaatttcacatgccttcttgctgaattcgctgccaccttgatattttattgggctcgacatagctccaccttcacatcaactagaaagttgtcccgttttgctagccattgatccaccacccccaccactgcaatggaaccaaccaaatatcgaataaggggtggggtatctctgcatgtaatactttacaataagtacatctggtttttttacctttattcagcctaaagacatccacttttgcctagacttttggtatcttagattttaatacccacaatttttccatcggtatagggtgataggtggtgctgtttctatttcgttctttacaacctaaataattcaaccttaaaatggctgaggaaaacaaaaccacagtcagagacaattgattgaggcataccatggagtttgaccagatgctttcataaaagcttcaactgctgtatgagcattaaatggtataaagtgggaagagttacttagcttatccgtcacaggaaagtagtatcgaccccctcaaatttggtaatccctcaatacaatccattgtcaaatcctcctgtacttgtttgggcagtgccaaagtctacgatagacaaacgagagacattgccaaatgcttgtttcactaggtagtttcacaattgcgcacaaaggtagtcatgatcttcttcatactagtctaatacacatttgatgcgagacatcattaaatgcatctctttggagtgactgcccaccgaagaggatttatattcctttgaaaagaagggagtacgagaagtgggagacaacactaatagtttcttatagagcaatcgatcattgtttgaaagtgaaacttgaaacttctttcttgattcacctcctaccgtaaagggtcccaatcgaactaattagtataagtgaaggcaaccgtatttgagtcaacttagagcatcttgattaccaacacctagttatatcaattacaaaataccccaacaactcgaccaaatactgctctagaagaaacttcaagctctactaatctgtacggatcgcgaatgtgggaacctaacaaatatggtccacagttaaaaataataaaaaaaatcaaccctttcacacaagggcttagaacttggttgaaataagcaagaggatgtcccatcacacataataaccctagcacaaattgcttagagaaattcagttaagtaagaaccttagctgttcaatcgttgtggtgacattttctatccatctaaatcagtctctcttaataacatatccgactacgaagttacgataataccctgtaagctcattaacctcgtaattcctcgagggatttgggccgaggccaatcaaacattgcttgaattttgctaggatgaacatatactcattttgccctaagtaatcaattgggtagagttgcatttcttcaagttagcatacaattgattggcaactaatgcctctaagatagtaagtgcttttcatgagtattaatattcagacaataaattagaatgttgtcgaaaaataccaatacaaatcgttacaaatatggtttaaacacttggaaggtcattggagcattggtatggccaaaaagcatcactaagaatttgcaaggtcttctgttggtacgaagtttagaatcgaatttggtgataatgatcatcgaaacaattgatgaatgacccaacttcatgatgcatgccgtatgtcatactatatattacagttattaatttcaaacataacctaccacttttcaacttagtcgtatagtacgagtcgattccacaaggactattacttcaatttattattcaagaaaccaaaagttagtgagattggggttttgagaatgaatgaaaagtaaataaaaacaataatgaaatcattatctaccactgaacatttattcaagcaataatagcatcattgaactctattccctatcaaattattaaccccatatataaaacttcaacagtcattattccgaatcctcctaatgtattatattaagcgcaacgctcttaactattttttttttaccaaacaacctaatagttcaacaccttagatctaatctagcatagacattaattttcttggaggttagttaacctgggaaacaagcttgctcaatatgcgatacatttaacttaggttatattttccatcacaagtaacaatacctataatactatcattaattgcaaattatcactttaacttagaatcctagacaattaggttaatagaaattctaagattatattagaataatgcaaattctaagcaagattttacatcaattgtgaagttaaaatagaagaatataaacaaaacaatattaaagagtacgaacaataagtcattgaaatcaagaatttgtgtctagggttttgaaataataaaccttaatctagaaagaaactattccataatctcaaacataattaacatcataattccagataatagagtttaaggaaataagaagagaactagcttgctggtgtaattgatgatgaattctcctctctcaagctctctccgagtagatgcactcctgagaggaaaatagttttattatggcctgtgtatttgactttgtgcaaatatttagagactaggatctgaactatttcctatttaatctcataacagacttcaaattcaaattacatgaaactgtgtaaatctgtgggagttaaattgaaaacttttggtgatttggaatccagtagtttggcatctgcttgattatttgattattcagtttcttactgaataaacatactttaattacttgtatgctcagtaaatttctctgtatattcttttgtgaaagcaggagtcatacaaacactgtgctgctgctatgctgcaggaggttagaggagtctggccagatctactattatcagttctttgtgatgaatggaaaaagtgcaaaagaggtatttactgttaagtggtattgttgtctttatttcttaactgtaaattgacattctgctgattttttttaagcaattgaggcttcatctcctcgcaaacagcccaaatccattctcttgtcatcacagaagtctactgaaggtcttggtgagtgtggatgcaacttattatttatagtttggaatgaaaaagtgtcaggctgtctttctgttattctatcatttctcttagaaaaaggctggtgtgtagttttttgttacgtttaagagtttatgggcaagagaaagacaggttgtttcattagcagagttaaaattgatgtgtggatgttttcccaggtgaatccacagtttctgctggagaaagaatgtgtgagttggtgaaggtatttgtacttctataccaactgcaaacattttctcttggtaaagctttgccagatcagcctcccatcaatcctccagttcatgtttatgaaaatgttcgagcaaaaactgctgctgtagattctttgggtccaaaggcaggttctgagttaaaacttggtcagttttctacgaaacttgtaatttactgaagttatatttactattgggcaataatgatattgactttctacctaaccacttttttctttagtaattctagtatgctgtatttgtttgttatgtgctacaagttacgaattcttgccaaataactatgggtgctgctatttgcagttgatgccataccttgtcgaattgcatttgagagaggtaaagagcgtcattttttctttttaccaatctcacggggaatgtctgggtgggtggtcttagcagaggaattgcccctgaagcgaagctatggagttgttcgcatagctgcgcctttggctggatcaaatgtatgtacagatatgcctataacatgtcctttgtgatgacaagtcatttttgtttgttaatatgaagaatgtgcaggttttcaaaagttcactacgatttctttttgaagtcatttttccttttttggatctatcgccattcccttgtctactttcttcacacacaca

SEQ ID NO: 297728 - DNA, 4836 bp, Cannabis indica
ttattaaataaatagttttagcatttatatatttgaaattggaaaatatggtattattgaaagaagaataagtagctgaaataaagtggtaaaattataactagtaaaatgcccattagtggcctgccactatgtgtaattttttcccattattctattctttttcttaatccatataattcaaacctaaaccctagttgaaatactataaaagaaacatgatcctcttatctcatccaactattcactacaatcaaactaaacctagttttcattctctgacaactagtagatgagagacactttctatagaatttcgaaccctccttaattgttcttcacctattcggcctatagtgatagagtgtcatgcccacacataacaagttaaatactcaatcatagtgcggaagacggtggtaaccaacccaaagtagagaaagaaatccaggcttaaatcttaataatactttgtgacagattggaacaagggttagagatttgagcggaaagagtcattattattccactacaatcaatgtaaagttttctaaactcttatgtgtttaattttatcatattagagatatttgtatttaggatgttaatcaccatacttgctagtaaatctagatcctaataaaaatcaattccaataactggtatcagagccatgataatgatttacttttatgaaatataaatttaaaatgatgaatttgttgtgttggtttatgtgtaatttgatgattgaatgagaattacgaaatttctccatgaaaataatttatttggatttcttgtaaaaaattacgcaactttcatttttacggaactcaattccgataaaaattgagaaagttatattattttgaaaaatcgggcctaaggtgttgagcatggctcaatcgcacgtacaggggcattcagacaaggtgctcatgcgcgcatgtgtgggggacaagtccttatctgaagccacgtctcgcccagcctttagacacgatccacgccaaggaggaccttgcagctgaccgagaaacctcggtcaaagaggccgcaatcctcctggtctgcgcgcccaaggctaccagctgcctgtctcgtggacagtcaccaaaaattcattttttttttagagtcattataatgatttacttacatgaaatatggatttaaaatgataaaattattgatttggatgtgttcatattggtttatgtgtcatttgatgattgaatgtgaattacgaaatttttccatgaaaataattttatttttgttctgaaaataatttctttggatgacttgtaaaaaattaagcaactttcatttttacgaaactcaattccgataaaagttgagaaagttatagtgttttgaaaaatcgggtccgaggtgtcaagcatggctcaattgcacccacaggagcactcagacaaggtgctcatgcacgttcgtgtgggggacaaatccatgtctgaagccgcgtctcacccagccttcatacacgatgcacgccgaggaggaccctgcagtgtctaggaggttgcaatcctcctggtccactcacccaagacaaccaaagattataaggttattgtatccttctttgatatgaaaaagcgtatcaatgggagaactttgattcaaaataggtgtaggtaacctgttatgaatatacaaagcacacctaaaggcttcatcccaaaacttcaatggcatagaagattgagcaagcaaacttaggccatgttccataatttgtctaggctttctttccactaaaccattatgttcgtgggttgttagacatggatgcctgtaaatgattctaacttattttaaaggctcgataaaagacctatactcacgcacaattaatttaaagaaccttaatcttcttacctatttgaagctcagtttcaactttaaaattgagaaaagttttaagggcttcagacttagtttttaataaataaatccatgtgaatctagtgtgagcatctacaaaggacatgtaatatttacagccattatgagagactgtatgagaaggtccccacaagtttgagacagctagttgtaatggttcaaaatattcagtgcaagaagccttaggataaggcatatcttaggaattttaccaagacaacatgcttgaaaaatagaaataggcattttattatctccaatagaaatgttacaagattttaacacagattgcacaacactatctgagggatgacctaatctattaatccacaattcaaaaacatatataagagatttattacagttgctacaagaactgacattggaatcacaagtgcttgtaccagaggtgacaatgcaagcatgtttctagtttacaagactagagacaggttgggatgagattgttggagttgatgagacttgaagttgatttggatcaaaagtatataggctattgtggagagtcccagtcagtattattgctttgttcacctggtccttgacataacaaacaagaaggtgaaactcaaataaaatattattatcaagagcaaatttagaaacactaagaagattcttagtaatatctggtatgtgtgtgcagcagatttttgagtataaatgttttatcagaatgtttagacttaaagcaggcatagctagtgtgttggatctccaaacctgaaccatttcccacatagagtctaatttcctgtctattgtactcagaactactcatcagattttgcttatcatcaatgtagtgattggttgctcgtgaattaaggtaccaatttgcatttgcatttagtgatgtttgagcaacatgtgcttgcattgaagtagcttcattagagggtggcaaaaaggctcctgtgaagcttttgccaaacctttaaaagcattcaagagccatatgtccaactttatgacatagttgacattgtggcttgttttgtgttgtagaaaatcttccaccatgctgagtactatagtttcctcttccatagttgtaggaaggagatccacctcgagacatgtaactcgagttagttcctctattattatagtaattggaagaactagaagatggatagagtgaagggtgaaactgacttttattgaatccttgtcctcgagacgcgaatacaaatgggatacggtgatgacaacaatggtaaaattatatgatgagttttctataagtttattgtcttcttttttattatttatcaaatccttatttggtgtgagggctctttaatctctaatattatttcagtatagtgtttgaaaatattaattatttaattgagtaaaaaaaaaattaaagtttagtaaaataagtacttattctaatataaaaattacattaaaaatttgatataattgtatgatttaattatcactaaataaaatatcaccacacacaaaatcacagtttatttcctagtttaaaataatttatgatcaaactagttaattctagtgacttcagaataatttaagttctagggcatctaaatcaataaaaaaagttgtcccttaatctcacttcatatacttagtcaattctatttcttttaattaaaatattaaagtacactagtccatttaagactcgtttaatcatccctctctttctttcatatatcacctaatagtatgacccacaaatttttagtcaaaataaatgaacaactcccattggcctgataaaaatatgattatccacaagtaatgacaaaatattacaaaagacacaaccctaattcataatgattctactaatttctcgatacatagagattgccaattttgaaacttttcttttctcaatttaaaagcacatgcaaattttaatttacagaagtgaaatacttcaatttttaaaaacaaacaaaaaaaaatcatatttttaatcatttttttaaggaccggagagtacttataattaattagtttaattatgaatacaatattcaaaaatagtataattgatattaattgattggaaagtgtgataacaacctattagtagagatacagtaaagagtaaatactattttgaattttgtattttgtaaaatttattaattgtattttctgttttgttaaataacaaaatagaccgtatatttttttaaaatagtaaaaataagacattatgcttaatttttaataattttattttctaatataacgaattttaaggcaatttctaacacgaacagatatagaaaatacaaccagttttatcataacatctctaggtcaaattattattaagttttattttgacaacaaatcagtttagagttttatttgtacaattttataaaatacaaaatttattgtattatttaacaaaataaaaaatctaatttataacttttataaaatacagtgtgaaaaataatattatagtcatgcataccagagtatgaggccctttctgattaaaaaaaaagtggtggtccatctctaaccatagccgcctctagaatcatagtttattttatttgattgatagatgttctagtcttaagagtcatatatatcaatatctaagcaattacgccagagtttattttttaaatcctcccaacaattattttaattacttctatttaattttttaaatttaaattttgacaataaaattttttaaataattgaattaaaacgtcattcaattaactgctatcgtaaattgtttataggtactatttttatacacataatacgtttatatatattagtataccgtaattttattagttcaaaaattattttaaatttaaataaaattataaaaataaaaataaaatatttaaa

SEQ ID NO: 297729 - DNA, 1843 bp, Cannabis indica
agagtttaataaaatctccggaattgagaaattataactctaatatttatttctaaatattggggtccacaattaaataaattcacaaataataataaaataataaaaattagtgctaattgcctttactaatccaaattactaaagcggtcattacaaaaggagttgtccgttgtgactggaagccttctgagttactgcatccgacgcaggttcaggacccttccctttgtctgctgcctgtaacgtactcaaaagcacgccggaggatgagtccttttcaagatcgacagttgttggctctagaagaggcaaatttgcaggcaattttttcaccaccagattggctgtatcttcaaatgggcaaatttcacctatcccaggcagcgagaccatcggaaagcggctaacccgttcttcctccgtttccggcaagtcttcaatcacttgctcgaccattcgcctcttccctggatattgtcttcttgtttctctagcctcccacgattcaatggctttcaaagagttgtccatcttccacatttgcttgaacttcttgtcgacagttagccgtttctgcaatatccattcctcgaaccaccttggcaaaatcggagagaaaggccatctcgcctcgtcatcatgtttcatccaagctccatacatagggaaaaaaccgcctttggagtcctttatgactgtaggaggcttaaagcatagcttctgttcatgcgatataatgccacatttttggcagaacttaggcaatttttcatatttatattgaatccacaaatctttgatggcttccctcttcatgaaaaaccccgagaataacggcttatcgatttcaatggtggccttaaagcgtagtgtccccataccaaatgatccccgctcgaagtcaatgtatcggggcaatttgtatatagctgagacttttgcagctagttcttccaagttggtcttgttccagtaaaaaggaggaataccgctaagtctcacccacactggggacttatcaaattttacttctgatggagcaagccacgtttgccatggcataatgaccaacaaagcaccacaaatgatccacggccgtctattgaggacattccaggcatcttcattattagcaaaggtgaaatgtataatcccatcttcatcctccttccagctccatcctttgaaagaagcccaggcttttttcaaggttccagcaattgcctttcttcccagttttcctttgcagatgagttttcccagtagtacatttccttggggttcctgtacttcactttcgccggggtcaaggcgacaagttaaatcctccgtagtaatctgcactgtatcttcaaacagatggctgagactattgtccgccatagcactgcacttagatgttactcacacagtatagagactttaggatcaatcgaaaagtccacagcctaacagtcaataacactaggctatggtaaaaacttccatgaagttatactctcgaacagagagaatattttttatatcagcctttaggatcaatcgaaaagtcctatatattttggatcaatcgaaaagtcgtaggtaaattaattatgagtggtatgctatatgtgtccgagcttataaatagagtcatcaacatactttcactctttcactcaaaaaggtaaaactagcactaggcctcattatatccctctcttgttcatactgcgctacatattcttagttttcttcttaaacctctctgtctagcaccaactacatatatagtcacatcatttcaaaaccattaatatttgttctctctagatcaaactcctctaccactacacta

SEQ ID NO: 297730 - DNA, 3956 bp, Cannabis indica
cctacacagtctcagaatcatcccacttgaccttccccaggcggtgtaggattgcacagcttactcgatatttccccttacggatcacgggactactgactgtcacatctacagtgcaggatccaccgcatggggatttgttggatcaaccatgcccctacgagtctataccaccatcatacttgtgattaaatttggaataaagagcgatccttgatatttctctcaatgaaagcaccaaaatattgacctcgcctttagcaaacgaaagtgagtctaattttataagcgacaagtagtttaatacgattgaaatatagtaaatcaaataaagacacaagaattttatagaggttcagccccaagtagttcggtaatagcctaatcctcgttatttgtattaacttaagaacaaggagaatagttccttttcttagagctcttacaacattatatttgaatatgaattcttagaccaaatcttttgaccctttccccaatgagtatgaatcactatttatagggctataagcttggacaggaagtatttcccttctcgttacaattgctataagtcgaaagattgcatagtaaatacagaatacactaatcgtgggatttggacagcttgccatatctctgtaatttcatccaaaagttatatggatttccttgatgactcacgatgcaaaagctgaattttctaagtgttggcgttttgcacggattgctcactgctcggcttagaggacttcgtctgagaaaatgtgtgaggtgccatgttcggcgtgtctcttttgagcggatacccggagtcgattccacgtgtcaccatcgagtgatgccacatcatagtgcaaaaattgggataacaccagccattgcagcaacagcaacaacatcaactacaacatcaacaacaacaacactaaaacatacaacaacaataataacaccttccacactcatcgtctaggcaagtgtccatgtcgcaccaatagtagtctctatctcctcgtcaattatagatagttgcgtcccagtctactctacccccaactcagtcttagtctagactaacctctattgatcctcctcagcccgtcacaagaggcaaagctccctcattgggatttttggttcctatgatgccacatgtcggccatgagtatctcacaaaggctgccatcctgatgaagggtcgagagcgggaacatgtgaacctgcaaaagagggccactcgactatcttccattaagatggctgaaattgtagagggaactcgccggcctctgcctctaggccccatgtttaacctgtccacagtgagtcaatatctggttcctacgatgggtagagtgattgccccttatgctgtggaaatgatagacaccataggtcgtagtgtgagcgagcttactttggagaagtgaatggttagtagtagtgttcatctatacaccctgtcaatagctgccaggcagcaagccgcagggataattattagccttctcatttatctctacttgaaaaaagatctttatccccaggatgatcttggtaatttattcctattttcgttagatggcactattcacagagagggccaccaaggaagcagggaatgtggccatagagctaaaccaacttcgcgcgaaggtctagtctttgtccgctgaaaataaagctttatgcaccagagttgagcgggtcgaggctcaaatatcctctggcaagcatatgactcaggaagggtgggaagaaaagttggtagctgaggagaagaaatgggatgccaaatacttgaagaagtatttagagcacaaggcccaaattgagtaggaggctttaaagtcaacacaagaagctgagaaggatgcacactcccttagagagaacttaaccaaagacataaaagagaagaacgtcattgaggcccatgtcgcgaataagtttgggactatctctgtccttatccagcatgtcaacaacccttaagaggacacagacctgaagggcttccgcatttagagcctcgaagctgaagtgaaagaggagaagaagcaggtggatgcctaggatgttagatgtggcagtcaaacccttctctaccaaggatcccatcttgtcattgacctccgtcaggagaccatcaataggttgtagaaggaagttaaccagtgtccctcgaatggcataaaggcataaagtgcttttgccgcaatgcataagatgagggatagtgcaccccaacttgttctggatgcggttaatacggctaacaaggcaccagctaaggcaaagagatatcgtcttcgcaccatggagatgtcttacgttgtggtcattcacaatttattgttggcggacccttccatactccaacatataaatgaggtaaaaagggaggaagttacttcgaaggtactttccatgcattgtggcaaataccttgaggagttcctctcacagttaacagcgacagtgatgaggatattagtgtgaggcctcatattctcaagaatcttcaagagttgaggtgtcttccattatggtcgtggaaaggccagttcaagatgctgccgaatctaacccagagctagaggagtcgtctaatgtcccatccctgacagactcaacagcgcctttatcttcactagaccattaagagcctttttttgtttttcacctcttctacttgttcttttaggacaattctaattcctttttctcttctttatgtcgtagaattctatttatttatgcctggtccataagtttgtttatgatacttgtctctaggaacaacttagttcgctcttttgacatggcattatatttcagcattaatattctcaactcttagtcttatgcgttggcatgcgtagttttttttgagggatatcttcttaggatattttgaagtgtgtggttccaatgaccatcactccacacctttcaacattgatagacttgttatccctctgctagcttaggtggtagtttaagaggtatctacttccttttgccaggcaggatggttttgatcttgaacctctaaaaatttcttgagcaaactaaagttgctaaaatcgtcgacaattttctaggttgttcctggattaccttatgatcatagagctttgatattttttttaagttttgacgtttttacctaagaaagctgctttcacatgctatatagatttcagatggtgttttcctagttaggataacaccaatatctataggagttcaagaaaatccttaatagttttaatctttttgtaagactcttttatgaaagttgccaaaaaggaattcaagcgagtacctcccactgcagggagttgtggctgaaaacacttctccttttgtattgagtgtatttatttaagctttaagaagggattcgaggattttttaattttgtaaggaaattggttgaaaacacatcttatttgaagcaagcaaaaaataatttaaacgaaaataacaaaatgcggcacaccgtacgttattttggggcacaatcagctaggcatgataccccccaagtgatctgagaagtgtggacgtctccactttcctggtcacttatttaaaacatagcttgtggcctaaaaaacgtgaagtctaaattgtaaacatgaagtacttttactgtcattgcatgatgcctaaaggccatttgttcaaaagttaaatacataaattgtttacacaaaagcactctaaatagagtcgctacctggcattcaccgcctatttgtaatattggcgtaaatgatccgtattccagacatttgatattggaattattttatcaggatctagttttactaatcaagtatgttattaacatcctaaatatgaacttctaaaacgatatgaaataaacacatataaagtttcaggaaacttacagtggttgcagcgaaatataatgtctcctt

SEQ ID NO: 297731 - DNA, 1868 bp, Cannabis indica
tgacaaaaaatcagttcaagattctatttgtacaattttgaaaaatataagatttattttgtcatttaataaaataaaaagtctaattaataacttttacaaaatacagggtccaaaatagtatttatccttaaagaattaaactaatattttccaatttagaaggcatctccctcaatcataagatgtcttaagttgactaacttctccatgttctaaagtaatcttgtcaaaagattaagatatctcaaattgtttcaattcacacagcttctttggcaacaccaaacactacatttcctaattaagaacagcttcttcttcaacataaaacttattcactaaaacacaaacccattaaattgatgatacgacaacttcaaccgaaggtagtaatgtcaaggtacgggggttatggaggttccatctccataacccgtataccttgacaagatttacatcgttaacaacttcataacttatctttacaaacaaaattgtccaaaataggagacataaccacccagcaaatggaaatataatgcacaaaagcaaaattgctgctacacttccaaacaacaccctcatttttcttattgaaacccaaacacttcttcttacttcatcatcattattcatattactattatgaatattgtcatttattatgaatgtctctatggcccatgcaaaaacataaataagcaaagctacaacaaatgctgccattattctatattgggtctcaaatggggaataactcttcgaatgaaactttatttggattaaggttgttaatgtgaagatgctaaattcaataatcttatgaaatgacataattaacctcttctgattttcttggcctgctgttttttttttttatatcttcagctcctaaaagaaaaaaagaaactttaattagatgaatacataaagggatatataagtacaaactgacaaaacttaaggaggagtgagaggtaccttaaattaatttcaatcagaggaatgagtaattataaatacttgcttatttgatatatgaattatattaagcttcactctatacatttatataggataataggaatcggttgcttctttgacaccctagtcttttttgtcctttttttttttttttgaaataaaaaatgtatttttagattgataggacaaaattaaattttatgatcattacataaaatattatttagtagagcggaaatattttttacaaaagcctacttattaatcacattataggcaataaaattacagtatcttcaaataaacaaaaaattacaacttaacaaaagattagagagatgtttacattgaattatatagttactaatacttcaactcactataaaaaatcttactttttatgactagctaaaagtaaaaaaattatgactaattataaattatcattcatgcattgtgactaaaaaatccgtagctaaaagtattagttacgaaaatcacaatttgttgtgactaaatgtgcttttaatcacaataattgttgtgactaaaacaaaattagtgacaatttgtatctaaatactatatattagttacaagtaattttttattgtgactaaaaattacattttttataaaaaatttatgttacgagtcttatgactaaaaacttatcattaaaaatgacttttttttttagtaactgaaacaagttcccttcaatacattgataaccatttcaaaattattctcaataacacaaaaatatgtttcagaaagacccctaattccaaaggtaataaagtagcttctttaacaccctagtcgacaatatttcattttcccccattcagaatgttctctctcaaaaaaaaaaaaaa

SEQ ID NO: 297732 - DNA, 2607 bp, Cannabis indica
aaccaaacgccaccttagagtaattttaaaatattagtgtgatacatgtatttaaaggaatgtaaatgttgtaaatatttatttaagttatcaatgtagttttgaattatatgcttattatatagaatttaaataaatatatattaattactatgtataattgattaacacgctgttaaaaatgaaaaatgggttatcattttttttctttctttcatattactatttttaaaattatgttacgagctggaattttttttgaagaacaacttttttataacttttaaaggaagaaataatttagggccgactatttacgtagccctgggccccattttcccaagacacgaccatggtagaacgtcttcaattacaaattttgaaaatattgaagctaattaaaggcccgaaaaaccaaagttaaagacttttttttgtagtagctattgttctacatataatatcgacgaatggtcctactttattactagtattttatatcatttgtaatcgttattttccaacaaggttaaagtgctttgaccacaaattatatatattacttatctatcacgatctagggtttggctcgtgacaaccaatttttagtgctatattattatactagatttgttttttttttttttgaaaaagcattattattactagactagatgtttaggtttttatgtattgtctcacttatgtgacaaattcggttagaaaccaggacagatttcattgtgtcatttgtatcgttctaaaaacaacagaaacacaacacgttaattcgctatatagcctacatctatatttcagacatgaggttttcaattcaataatatgaacaacttttaatgtatataaggtaatattttggttgtgattgtttttaattaagtgtttctggtatatagatcaaatgtgtacgactctattatattttacacatgatcctgtatttacaggtgatatctgagattaattacctattcaaattaattaagatttaaacagcagctaatcaacttaattactcgagcgtcttctccatactctccatacagctatttccagcgccccttataagaatataacatgatgaactctccaaattattgtaagttttaattatcgtaattgtgttgagaatttttcgtagtatatatatatgtgggtttagagaattcatcatggataaaattaagccatcatacgcaccatatatatataaagatatatatatatattgtaagaatttcaagcttggatgaacatacataattggaaaaatctgtgagttacatataatggagttataggttatattttgttcgtactagtcaaattgtagcttactattcctcatgtaattattcaacaggctatatatcagcagcaagtagggtttttaatgttggggcttttttagttttacactttaaaatagttttttttttgcatttttacgaaattctacataaaatcccctattgcaactagcgctgcaacttaaaattgcaattagcgcgacaactaatttaaaaactcaaactgtaaattaaaaaaaaacagttaaaaaaacagtatatagaataattctcttttaattttcatttcatatatatatataaatcagttcaaatatgtaatagccacaaaaaaaccctataccctaaataataaaacgacaagaaagaaaaaacatgaaatttaattaacagtgaagagaaaggtgacgatatcattatccccacttgctcacttttctatagtgctatatatgcaacagacttactttctcgttcatcccattcaactttctctatttgtgtcgtcttttacttttacttatcacatatacctaataaagagataagaatcgatagtggaaaaagtagggttctaccaaagcatagatcatattgttcaaggaagatgatagtcgcttgttcatatattaaccaagtataatgcagtaaatatatgtcctatctctggtatgtattttgaacacagagagagagagagagattactataaaaggtttagttgaaactgaggaattcatatcaattcttagagatatgtgggtaacacacgtacatactatcaaacttttatatattatatgaaaaatttccctgtttgcctgcaagaaacgggaaggatcattataattatcacatattattgtttgaggttttggaccaataattgatgcaagtttgtgacatatatcttctgcaaattaatatatatgaccaatcaaaaataaagaaaattaatgttattgggtattagtggtgcccagtaccttctatagctagtttcctagaattagttagcgatatttcctaaaagttatttttttaagttatatgagacctgatacttaattacatcagtaacgatatgacaacaaaaaggacgctaaatattagtggtgccttttagcaatggaaaatttgaatttgtatacttgcatttagttaaaatttatcctcaaaactcataatacccaatatttaaaatatatgaccacttttctattatgcccaaaataccctctttatttacttcaccccctctcacttcttctctctt

SEQ ID NO: 297733 - DNA, 3165 bp, Cannabis indica
aataaggccatcataaccaaaatagcaaacatctcatcatttagcacctgtggttattgcacatgtagattattcaagttagtacatggtatgtttagatatccaataagcatctcgtgacacgattcgattagcaaaatttaatatcatatcctacttattaaataaaagcggctcaaacttgcatagagccttcacttaataagaccccaatttgcaataaattttattttttacatataaaaaagctctaattctcttgaacaaaattccattatatatacaaagttagaaaaataaactttggattgggcctcatccagagccgtcatattacacaaatggtgcttcgagaatgcaacaataaaagacgagtgatagaactgtgtattgatttatatacacgatataaacatatataatatttaatataatatttaattatttttttttatttttactttctaaaacagtatttttatagaaatccacataacaatcaacaaagtaacttaaattaaaatataaatctacattgcaactcacatagtacttagtagaacaactcaaactataaaagtaaaaaataagttgtgattctgctaaatattattaaagaggattataataggcacttttgtgcatattggtaggtattttttttttttttaatccttagccctacaaactaatttttttaattgtgaaatattttaaatctcacttttgttattctatatagctattttattacaatgttagttcttttgtcgttactagctcaagaattaatattgtatcaatattaaatgtgtaacagttgaaacttgctaaagataacagcataaaaatttctgccctaaaaaatcaattaataaacaatataaaaatttttactaccaaaaaaatgacacagaaagtacataataatttttgtgagaaagttccataaaaagtaaaagtaggaaatcatgtctatatatgagatacatacacgttaaggctaacttagtgagggagggatggaaaaaaaggagaggtcataggttcaaacttagaatcttgaaattattaagctattaaatgattgtaaaatactattgaaatcatgtctatatatgagatacatacacgttcataattatgttgctctagttttgtagtgggaaataaaaagagaagtaagtgaatattaattaactaatttgtaagggagtattaataatcataaaatgattaatttcaatattttcaaatgatggtatacttttccgttataatcggtggaaatgtgtacttgtactaatatgcattaaaaaaaaaagaagtcttattatgaatgataaaagtattttagaacttaggttgtatttagtaatgaaatagacaaaaattaatttttatttttattcttttgtttaattgtattttaaagtatggaaatgatttttttactatttaagtgaaataatcattttaatgcaagataaaaaaaaattttacaattttttttatcaattattattataaattttaaattttattccttttcaattttattatttattctatttatattcatattctcattcgcatgtttttgtatataattaacatgaccaacattataataatataaataagaaatcataagcataacctagttttaaacctcatcatctgtaaccacttgaggttagctcaagtggccataggtcggtgtgtgtcttggaggtcctaggttcgagtcccaaaaaaatatgattgtaatatataaacgcttaaataataaaaaaaaaagtttcaaacctcatcccacaaagaaagtctctagttcaaataataaaaactaagtactagacatcaatgatagttcaaacatatatatattaatagaattatgatttaaattataatttatttttttaatgttgaattataatataaaagaggcatgttataagagctatagtttaaaaagtttttttagctaacttttctcaactgttgttctatttgcatttaaccatctaaacttaaattttgatggtaaaattataattactggattagtagcaaatttaaggtgttattccgttaattgtcactatgagttgtttattcatacactcttgtacacatgatacatttatgtttgtacaactaatataattatttaaaaattattttcaaaaatcattttaaaatcaaataaaaatattataaattttaaaataatttttatatcttcaaaataataatagtaatagtgtatcaatataaatttgacacatgtgtttaaataaaattgtaatttaaataaaaaactatataagatttttgtcataccattattatattattgataccgacatgcattacattcaccactttcttacatgtagaaacagctttatattattttgcttggccaacaccactatcttcctattgatcatagataaatataacatgaagccatatctggaaaaccaagacaatatagatatagcgcaacatcaactttaatactttgtctttaggttcagttaagcattttcctcataataaagtagaatcaatatattaatattccaccttttttagattatgcgcatatatcaactaaaaatcacaacgttttaattttattttattacaatttaataaattgtgttatatttataataggtgccactttatgatgttaaatatcttaaaagttttttatagcataagaaaatatcaatatccacaaacatcttagataactcttataatcgaatatcttggttattgctaaaaacacgaaaattaatgataaaatttataaaatactaataaagttaaattattatacttattcatacaatttaataataaatattagttttatttagatatcatgatattgtttaaattatattatatcatccttttcagaaaaaatatatatatatatatattatattatatcatataaattaaatatgataatatttgatactcacttgataagaaaatattaatactaaaatatatttttataattttaaaaattattaattaaatgaacttgatttttttagggtcggccctaaaactataatagaccataggaaaaaaaaacaagttagtactcttattttgacaaaaatgtgatat

SEQ ID NO: 297734 - DNA, 785 bp, Cannabis indica
aataatagttaaaaaattataatttattgtgactaaatatatttttagttacaataagtatattgtgtctaaaactaaattagttataatttgaatctaattattatgttttagtcacaagtaattttttattgtgattttagtcacaaaaaattatgttgtgaccaaaaaattatcacgaaaattaattttttttgtaatgtaaaatttttatggaatatcgttaatttaattaatcataagatgtcacttttgagtagtgcatgcagtcttacaaaaaatactgtaaatctcttatttttttttttaatatttgattgtggaaactcatttgcaattataaactaattgtgcaatgtgacaatcggtaccaactcccaatatattaagtagataaataatttgtattaatgttattgtagtaaaacatctgaaatggaaacatgattagtaattgagggtgcatacatatatagttgtatatttgtgtgttttgttttggtagcatcaccaggccaactcagtattagttgttcaactaatcaatcactaaacattagtattaaatagagagaggaccgataagttgggtgacccaaaaattagttagcgttggaagtagcagtgtcatttaagaatgaaattatgttaaatgaaaattaaaatcgatgcattggaatgcgtacgtagtgtagttgcggaatagtagaggcctctctgcgtcggcgtcaagaatccgttgttctcctttgaggcctactaataatactctctctctctctctc

SEQ ID NO: 297735 - DNA, 9672 bp, Cannabis indica
tacggtttctccggtcaaggagttgcacctctaggacaaattcgtctacccctcactgttggacaagctccgacgagcatgactatcatggcgcagttcctgatattagatgttcctttagcttttaacgtaatgctaggtcgaccgaccttgtatgacttaaaggctgtcacatcaatattccactcatgcctgaagtttccaacaaagaatgagtatttacttaacattattaaatttttaatattttattaacattattttaggtcctcattttttgtttttttttggcttttttattgaaattaagatctctgatctaagtttttagacaaaatttggcattttggcttttttttattaagatatttaaaaaatgatcattttttctatcacttactaaactctatatatatgacatgacactttaagatctctacaattagaactggttcggagaataaacaagaaaataccaaaaaggcataaaaattactaaaatacagtgggtcggccatttcaaaaattagacagcccataaacaaacttacaaaaataccacctcttctagaccttcagccgcacgaaacagaaggatcaccaacaaaaagcgtcgatcgttcaaattggcaacacaaccgaaatgaaaccatatcaagaggaagactgcaattaattccaaggaattcacttgaaaagaagacaccaatcgatttaacctgaaattgacgaaaataagagaagaaaaacttggttgaaagtgaaattcaacactgtatttctgttttattcgaacaaaacaacttctcctaatatcaaaattcagattcatataacttatatctctaaaataaagattggagctccccatcaatccaaatctagtctattccaaagacatgaaaaaaagtataaataatagatctaaggtatatcgaattgcattattgttgatttcaaatttccaatatttaatatattaattcataaacaaaaaaagaaaagaaaattcgaatgaatctgcagccacatacgtagaagtatgttccaggtttttctagattgctttatagttgtattatcattttattatggtgttcatcaacattggaggtatttcatttgacaacaaaaaagagaaatcgcttcaaaaatacttctacaaaatggttagttttatgaaattattcaactaattgataattagtagcattttagttttattgtagttgtaaaatagtggtgatacaaaaaagaataatataaaatatagggttcataatttgcaatacatgacttgaatagattaaagccgatagaagtaagtttcttttctacttcatacatactatttcaatttttcttttttttttaaagtttttatcaaaaaaattcggactcatttatgacagaagcatttatagatttaatatagtttttgaatagttgacttgcaataataataatttcggatactcaagaaaaagatgaaattcaattcctaaccttttaccacagacaatttgatgatcgattgaattatacaaattatgaagctagtgggaaatacatctcaatccattgtaaatatgatgaactaatacacaagttgaaagaaattctacaatacaaccatgaaaacactatcctgcaactgagataccatgttaaagaaggataccaaccattgaggagaaaggacagtcaaagcctatatttctacatagaactaaaacaaaaggaacctaacttcacaacatatacattgtgtgtgaacgtgatcagcaacacaacaacaacaaacaatccatcgttcttgaaaatgagcaactcagtattttcatgaacaaatgcaatagaaaaatgaaagacaatgcacaaccaatagaagaatcaacaactcaacaacctacaatgcaaaaaaacaatgctagaagatggtgaaataatgtttgactttatggactatgcaaaacttgtggcaaaggaaatagttgaccaactagaatacaatcaagacagagaagcagaaatcacagattatgacgaactactaatcccagatccgcaaaatcctaaaatagaggaagcacaaatatacaaggacaatgaaacactacaaagtgtgcttagtttcaatgcaattagaaataacttccaatacaagatataaaagtcttgcacaagaacaaacaaaatttgttgcttggatccaaaatacaagtggggactcgcagcatctagaaacggaccaacaaagtctttcatagtctataaatatgacaaaaaggtgatacacacttgtgatccaaacataagaattatagacaaaagacaagctacaagaaagttgagtgaaaactacatccagccaagctttaccaatataaaaacaactcaaatgccacaagacatcagaggaaaaatgaaacataagttgtaatgcctcgatttcccgagacgtcacgcttactagtccatttaaaaccatttaagataaagacagtaaaagacttctttaataaaaataactaagcaagagatctcattatttttaaaacaaaatatttattattcataacctttaaaatataaagctttacaaaattattggaatcataatctttaacaaaatattttaaaaccaaatgaataggttgaatttggctagcataagaaagatgcctagttgcccaagtattcagccgcaatttaatcttcttaagaattgcatcacaatcttctcgcctccacttagtttatcagcattccaagatagttaagagggaatgatccttctcgaaaatgcacatcatccaaaatcacatctttatcactcgtggagacccccccaaaataaaccaatgaattatccttgttaggcatcaaacctgaaacctccgaaagctctccaaagcaaccttaagatggtggacaaccgaaggtgtacccttgctaaagaggataagatcatccacaaagcatagactaatcaaaaaaaagaggtgacatcgggtccccttgtcgaagaccctttttccccttaaagttgccttgaaatcttccattcatcaagattgtataaaaggtgcctctcaaagacttcataatctacaaaatgaactgtgactgtctgtaggcccgtgatctgtaaggggaaatagcgggtaagctgtgcaatcctacatcgcctggggaagatcaagtgggatgattctaagactgcgtaggtatgggactacacagttgaagagggatcaacaaggtgcatcttgtttttctgtagcccatcacaaaagaaccccacagttaagcgtgcttgacctggagtaattttaggataggtgacctcctgggaagttttccaagaaagagtgcgagtgaggacaaagcacgctcgaaacactcgtattggtttgtagggtcagtcatcagtccaagaagcagccagtgaaatgtactcgtgtataaaagccattattctgtgggtgtaaggacccaatggaggcttgaagcggggatgttacatgaaaatagaaggaaagtttaatccaacatgtaattcctcaacaaatcttcaattcactgtgtcataggctttactcaagtctatcttgatagcacacctaagagagacaatcttcctaccataattctttaacagatcttaaaaaattaagatattacgagcaatagatctattcttgataaacgcccctaattttgatgaaccaacaagtcctttagcaatatatcaaggaagcacttcatcaagtccttatatattgtagaagatattgtgaacaatagatctattgtgatgcacttatatattgtagaacaacaagcaatcgacctgtaatgaatagccctcataggattccaaccgtaggaacaagacaaataatagtttcattcaactgagaacggatcttacaagaactaaaaaactccatgatagcactacacacttcaactccaatttcagaccatagcaccttaaagagctcaaaattgtatctatctgggcccggacttttcaaaatagggatgctaagcatagcctccttgatctccttattagtaaaaggatgaatcaacttcagctgctgagaaagattcaaccgatttccaatatccaaaacactgctatctagccgacaaccaaaagagctacaaatgcccatatagctcttaaaatgatcaatgtagtgcttaaccacctcaggatagtttttaataatatttcctttgtaatcaatgaagcttgctattctattttcctcccttctcttcttaatataagcaaagaaataagttgtgtttccttcaccttggttaagccagttaactttactcatttgaacaagaaaacttctcagcatttttttatgaagcacaaaatcagcagcaacaaccgactcttcattcaaataaatctcatctcggctgttttgagcttccaatctagccacaagaaacatgtctctagctttcttgtagttagactccacattaccaatcctggatgtattaaacaccttcaacacatgtttcatctgagccaatctacaccagatgcccattaacccggtagcgttcactggcttttgccaaatttccataaccagatttttaaaatccctatgttcagtctagtagttgaaaaacttgaaaggcttcactcctatctcaaccataactgttgaggaaatgactgtggcacaattttcagaatcctcttcccagctgaatgtagccattgaattaggaaataaatcaatccattccccattcttaaatgcatggtgaattcttgaataaattctatcgtgacaaccttggttgttggaccaagtaaaaaatgatttggacctcttcaaagggtccacatgacccaaactcaacaaattattaaagtctttaatctcattccttgacattggcttcccaccaactcaatctccatagtgtataagggcattaaatcacctagaataatccaaggtttaacagggaaccttagattaactaggctcttccaaagctccttacgctcctccaaacaattcaacccatacacaaaagtcgaacaaaaagcctgagtatgactagctaacttcacataatgcacattttgacttgtttcttcaaccactatcaccctagcaaaagtccttttccaaataatcaacagtcttcctgcaataacagagctaatataactatcccaacaaacaaatttattggacatcatagctttcactttctctcctttcaacttagtctccaccaaatctccaactccaacctccttaattcgatagacattcaacaccgcctctaactttttctctatattaaggcccctaacattctaacataatatattgcaacaattcatgatgaaactaattcaccaagttctccatgtatcctactcacctttttctgtaacatctcaaaagagtttctacccttgttatttgttccctgatccgaagcaaattgcttagacttaatcaagtgagttcttttaggtgtctcccaatctcaatcaactccttcttctttagagttaactgttgaaatagtacaaatatctccctgttttgaattacaaagagcctccccattattatggaccccaattgtccccaacgacttacaataattctcagcccccttaccttcatcttccttttccaagcttttagcttcctttttaacagcctccttctctatatcttttaattcaacttccttatcgttattcttctccattcctcctcctttctccacttttttcacccattgtttagtctcccctttctacaatcagccatgataaacccaaaaccccaacaactcttgcacttaaccggcaaccattcataatctaccccttacgcaattagtctccctttttcattgataaaatgaataactctcggaagagtatcagttatatcaatttccaccaaaattgtagcaaatttaaccatggaccattctttagttactttatctacaatgatagggctcccaatagtactgactaaagcactcaaacacttcttaccccaatattacagacccaaatcatgtagtcgaattcacaatggtactaatttaactagtttaacagcatctaaataagtagtccaaggtctactaattatcggtttccgattgaattgaaccactccatgctccagcacatgatagcttcatcattgaacttgacaatggtaagccctccattcattcaaataatttgagcaattcccggctttccccatatccttcgcaagaacccttcgaagattgcaaatggtgggttcacacccaacaccacacagatcacagcagtgctccaactagctgcctataactctacttcctcagcatcaatttgggggattttattgccttccttaatcagaggctcctcaaatctcaatcgcgcttcctgatcttgaagcttgctcacaaaaaatttcctctaatgactctgagattgagtctgatgttcttcattttaaaaaatatctgcccaacaatgctcaccgatcttctcttccccttcccctaggtcaaaattttcattctccattattagatcgcaagcaccatccttcaaaatcgcttcaatcacagcctcctgggaagttcgaacttcctccaccacattttcctgaccgattcgagcctccttctcactcctagctcctaattccacactcaattctcgaacaattggctttcggatcgcccttcccgtcttcaacatggaagaagactagagagaacacaaatgacttcttcaatttttttttaatggaacaattttattttaatgaaatttcctctttagtaaaaaaaaagcagtttacattgatttttgcaacagcctccaaactagcaaaaataacttggtcatcatcaatctcaagctggcttaagccgttgaaaaaatcatctccctttacatcaatttctttgcccttgacattatctacatccctggaattatcatcttcactacatggaacaacaacaccttggacctccccaacagcagaagcatcagcaccaaccttatcataataatgattatcatcagtagaaccatcaccacgatcttcaccagacgaatcaccatcagcagactcaatttcaatattctatgaatctggtaatcctttgccatcatcatcttcaacaacaacaccatcagcatcatctgaatcaaggtcatcagatgttttcacctgcataaagatagtaatgcaactgaaataaaacaagaaagaaaccaacaataacaaaataatgaaattgaaaaaaaataaaccaaaactatgaaaacatatacctcaacaaaaggtcagtcataaatgacaataactttttttcaataacagtcaacaaagacttgaaattaagataaacaaaacaactccacgaaataaaatacttcggccaatgattcctgactggaaataactaattccaacttagcttttaacatttctatatcgtcagactcaaattttttggatggcgaaccagtgtcaatggttgcgtttaatggagcacaatcatcaatcgattgatcctcaataaggcatccaatgtcaaagacttcctttcttcatcagaaaaaacaataataaaatagtaaagaatctaaaaatcagttgctttaatagaaaatcaaatatcttgtctttcaaatccctaaaagttggattttttgccctgatatcattggtccaattgagaattctgagaatagtagaagcaactcgtttgtaaaaagaattctgcgaatattcattaaaccatacaataaacacccacaaacaccccaaacctctataccaaccatcataagactgaactgcctttttctctttcttgtttttcatcttgataccatgttcaactctatccttgaatgaattaattttcaactcaaaggacttcctaccccaaaataatcatcccaacaaccactatcaatgatatgtaattctgaccaaagaactttcttctcagtagtgttacttagaaggaaactattaatgaaatacaaaatggtcaatttcaaaccaagtgattcatcagggccccacctagtgcccaaaaaagcatcctcaatagacttacggtcaataatttttgtttcagaaaaacatacatcaaccaattggtttgattcttgagtaaaaagccatttattgcaatcaccataacatttcaaaccagaaatcaaataaaactcttccacactaaaaccgtatacaatggcaagcaacctttgcccaaattttttttaaaatttgactagttaacctccctcaatagatggttgtgcaaaatttcaggatggaatacgaactcaggaatatctaaaatatgaccaaagtgggtatctcgaaacatgttcaaaaattactcgagatagtgtttttttatattaagaataacagagtaggtgcatgtagaaatacacttggatctataataatctctaggactaaatttttatacccaatcctgcattaaaaaagaaagataaaataatgaatagaaaaacagaagtttccaaactgtaatacaactataaaacaaccatgaaaaatcattcacacatagtaaaaagtaaaagcaatacataaacctaaatagagctaaaaataaaacctaatataaacaacaaaacatatagaaatacataaaaaacataaatatgaaaaaaaatagtagaccgacccaattaagctgctttaatatcaagttctaggatagttcttatatttactccttgattttttatatggatatcatagaaaatatatatgatgaaaagatgtgcaaaatataaaaagaaatatgatcaatacttaaaactattgtttaataatttatagtatttaaactgtaaagaaacaaacacacatatcaaatgaacaaaatgaaatcaaacacataacacatatggaaatcatagaaaaataaaaacaaccaaaaagataacaaaatttaaaactggaaaaataaaaaagaagaacataatagcctaaacgttaaccaaattaaaagaaaatggaatgattaaaactaaaaacaacagaaataaaaaataacttagaaactaaaccctaaaaaaataaaaacaatatacactaaacataaaattagaactaaataaaagaatcaaagttgggggaaaactaaaaaaaaattgaaaacaaacctccaacccatgatcctcttgaaccttctccttcttgttctcaaaggcaggggaaattttctaaggaacagaaactttagctttcttcttcgcaggtccacaatcccgtttcaatacaggaggagcaaagtcggagtcatcatcttctacaattgggcgttttcctttgaaccttttcctacagatttaacacctattttcgaattttttttgggaaatagagaaggggaggttgaagaacaagtaatactcataattatatatagattcacaacaagaaaagaagagtacaaattgttatgaaaatttgttaatggaagtttgaagataaaatagcagaaaattaggaagtgggaaaataggttttgattgtaacaccctaactaacataggcgtattacgtgatt

SEQ ID NO: 297736 - DNA, 3068 bp, Cannabis indica
aattttacaggatgtcttaaataactataatttacatgaccatgaagaaaaaatttgactgaaaaattatttcggatattaaaacggatagagatgtatcggtacatctcttttaaaagggtacatcatagaattttccaaaactaaaaatagaaaggaaaacaaaaaaaaaaaaaaaaaaaaactacttaaatttggaaaggaaaaaaatttattaccacaatcacaagctttatattattaagttcaacacaactataaaacattcaccaaatcaacacatttatacaacgacatattaaattaaaaaaaaaataataataaataacaaattaactaaattaagttaaaaaaataataataaataacaaactaaaataagtaaccataatccataactaaatgattataaatagaaaaatataaatttaagaaaattttacaatacacccagttaaaaaagatgatgcattcctatttagaacaattttttagttcaaattttttataattgtgtatgtagttatttaaggcgtcatataaaatttgaacactataaaaaaatattgaaaattattttaaatatttcaaaatttataaaatatctcaaataactaattaactataacataaataaggataaaaaatattagactaaaacattttcaagataccaacaaaaataaaaattgcctccatatacctctttttgtggagtctaaatcacgatcacccataaatttaaatagttaagcaaattaaagtccccctattgttttcaataaaatattctcacaataacttttgattagaaaacttgaaataaataagactttttttatttagttcttgctcaaaatattggatgatcaattaatgttttttaatatattatttttttgtctttactaattttcttttataaatttaatcacactaggtattatttatctaattattaaaaggttatggctccatagttttagtttttgtctttggtaatagttttgaaaatttttacaataaaatggatctattaatgcactttttttttatatattttggcatttagaagaattttcagtctatttttttataatcatttatgttatagttattaaggacattctgtaaaattttgagaaattcagaaaagtttaacatgatggaaatacagttcaaacagtctattttacacgcgtataaaataaaagagtcttgcatacaataaactatttgaaccccgtttttagtgtattaaaatttttccaaatctctcaaaattttacaagaagtcttaaataactacaacataaacgaccataaaaattggactaaaaaattctctcagataccaaaacaaatatgagtgtattggtcatcccttttaagagaatgtaatatagcatccaatagttttagctaataattttttgattcaatcacatattttttggtgtctataatttaccctcctaatttgactttaatagtcgtgtacgttataattgtttaagacatccttcaaaattttgacaaattcagaataatttacatgtgcagaaaataatgttcaaacaatttatttcacacacatataaaataaaagagtcatgtgtgcaacagacagtttgaaccttattttcaacgtgttcaatatttttgaatttctcaaaattttacagaaaatcttaaataattatcatatacacgactataaaaaaaatagacaaaaaaatctctctgatacaaaaacaaataggggtgcatcacttttaagggggcaatgtaaattttttatatactactttatcaaattatcgaaattttatcataaagttaaagtttgatagtaattttttggtttaatctttaaaacattaaaatttgtggtctaacttttttgaaagtatttttgttttcatcttagtcttaacttgagtttataaatccacaaagcatactttttagataagtgttaaagtaaattttattaaccaataaataagttttatataataattaaactctaagatattaatgaataataataatttatataaaaagcaggaaattttttaacgtagttttgaagttaattcttcacactcgacaagttcatattatttttggtattttacgaagtgtatataaaatgcagaatcaatatattatttgtgagttcttctttttttttttttttctaaaattggtcgtcctttgttcgttgggttctccccttgggaatctttgcaattttcatgaatcgtcacgtttcacatgggataataatgataaataattgctatagttgctatttgtttttatttataaacggttatgctgattacacctctctttcttgcaatacaaatgatcatcttaagatgctttgttttgaaagtaacttttgcttataagtataatctgggacatgttcctcacgtgtttttgtaaatgttgggagaggcgaacgcgagacactaccatgatgtaataactctaatatgcattatactgggtatatttcttttagtctttcaacataatcacgagtatgtaggttaattgtacactcttaaagaatttattatttaccatttccattacactatcattatattatgtcctctgtagatttcgaggtaggttaatcttataaaacggtaattattatttatggctcgtccttatttttaaaaaaaaaattaaaaatttctactaatcatattatcggagacgaattattaaacttatttattattttgtaattattttctaatttttttgtacttgtcttaactatattgtttgctttttatttattttgccacataaaaaaagtcacaccatacttcttttaatacgtcatacataggaaccagaaaacctttttcattcgatgaaacatttaattttcttttcaaaatactttaaattattataatacacaacatgttactttcattatttttatgtatagcttttaattttgtcgcacacagtttattatcataacaaatataataataatgttaagcaaaaaacaatataataataataataat

SEQ ID NO: 297737 - DNA, 5969 bp, Cannabis indica
tgcatcaacactcatactatattcccctattgtaatccaaagtaacaaagctggctagcaatgtagtgggtatttttccaaatcgtgataaggagtggctaaaaatgcaagggatttcagccgagacacctcattttcacactttggaaaaaacttaaaaattggtcagcagaccaatctaacaatataatagattttaggcgtcatttcccttcagaaaagaggctgaaaacgtatcgattgtgcacttgatgaaaaccaagcagaatatgcaaaaaaattcaagtgacacttacatattgaaattcagcgatatttacatgcaaagttaaagagattttaaaaaaatttaatacaaacaaaattaaaataataagtgggcactatatgtttttgagagcacatagctaggtatactaccccccaagtgagctggaaatttaggaagtctccaaattcttggttacttgtttaaaacatagcttgtggcctagagacaaaaaatgtgacttcttttgtaatttttttctgtttttattttattatgcctataggcttacattaagaatgaaagttacaaagatttacaagtcatccaaagggacatctagattcagattgtaaagccctgactcctaaggttgccacgtgtgtacttttataaattagtttataataaaaaactaacggtttaagtaaaatttgtgatttaatcaaaaaaattctaattaatttgaaacataaaatatcttggcataactctttaagtttggggatcccctttgaaatattacaagagatgccattacattatttcaacaaattacactttaaagttcagaatattctgaaatatcaatcttaacaactcagctccacttgctggatcaactgatatgtacatttgctggagaagatccctgactcatggttgccctaatcgaatcatttccttacctacaccacgtagcacccgtgagtcacaaagactctgcaagaaaaacaaagcattacaacatacattcaagtacaaataataatcaaacataagcatgaaaccataatcaaatatcactaactcaaataaattccaataataacaaacaactaacataaataattcaatatacaagcatctaatatttctcaggtatttgtctaataagacaagctaataccattacttaataaagtaactatccctattgtttcctaataaagcaaacatgacaatcctaaccaggcatctaatgtcattgtcattacctaatgaggtaaccaacaagtaagaaacctaataacaatttccgattgtagtcatgacttacagttgtttgatgaaacaacttttcctacattttcctaataaaacaacctttctaccattgtctataaaacaatattttcattacataatgataattaccatatctatataatcgataataattgattcacaaacgataataatcatagcttatttgacatgctaagtggtttgaatgtacttttcttacctttaatttaaactcatccatgccgaccaacctgagtggagaaacgcccgacgatctcggcccttgatctccccttagcaattcaacctaacttagctaaaatctaagaggaaaaggaaaagatttagctctaaaattcttttgttgatgaggttttcttgggtggttcttggccaaaagagaggaaggagaagagagatgttgtgtgaattttttttctaacttaataaaaggatttaatgatattaagaataacccatttcccacctaatccaatcagcctagaattcactaggatttcactaaggataaaagaatagaaatcccatcaaaataacctttatacccttacttcatcactaagctacctctatggttaggaataaaatgggcataaccacttaccccaaaacaccccgagtaaaaaaataccaactaaactcctcaattaaataaactttcacgttcattaccgttgtgatatttttggccaccaattgggtgtccacagttgccgaacttaaaaatattttatttcatcaatggtatatacaatattcatatatttccataaaatttctgtattaataaattacgatcatttttataacaatccctaatcacaacataattagcttcataagattataatcttaataaggtgtgtgttctcatcttctctcttccatagcgaaaaaaaaatagtgggacaaaagcctgtgatgaaggtgaatcttaaggatcccccttcaattcaagttgagattaatggtgagaacatttgatcagatggtctaaatctaattgcacatgttagcaatcaggtgaagtcaaaaaggtcattcatgtacctctgaatgggagttacgatgaagatgatttcaagggagaaaaggaagatgggctgaggaagttgaacgggaggatttcaggtcgaatttacaacaataatggaagtaatttactgaaagtaagtccctatctagatgttaaactcacatatactgaacccactctgagagatgggataaaaattgctcaagttgatgttgatgaggtccaagaacaagctgttaattggaattcaacagttgtgtgtatggttttaggggctaatcccccaattaaggtgttcgagggatttgtcatatgaaaatgggggaatcttggaattactcatattgtgaggatgaatggtggttatgccattgtcaagatcaatgatgttgcgacttgagatcatgttttagaggagggggcttcgcaatttgatcataagcctgtaatattttaaccttggacgacagaccttacagccttaagattagttaaatcggttccactttggattcatttacatatttttgggcttcattattggggaaattaatgcctcagtgcaattgttagcactattgggaatcctgtattgtcagataaggtgacaaaggaaagatctatggttaaatttgctagggtgctagttgagatagagataacagataagccactgagggtgctccattttttgaatgaacatggtcaactcattgagcaggaggttgagcatgaatggctcccagtgagatgcaaaacttttcaaggctatggccatataatggtttattgtaggaaagctcgaaaggaccctaacgataagaataagaatgagaagattgaggccaaggagagtgagatagcaagtaaaggaaggatgatgtatgaagagtggtttagaatgtgttatggaagttactaagatagtggaacacaatggaaatgatgaagaagcagaggaggttgcaaaacagagagttaaagctgttggtgtaactgttgataaaggaagtagggtgttgaaaaagccaaagaatggaagttggcagactcctaaaaaatcattgcattccagaaaagtgggaaccaagacataaggtagttctaatcatcctaatgctattgagatttttcatttacaacaagaaggtgcttgagctgaaaatggtttaaatttatctttccatggacagcagtaacatacttagttggaatgttggagtcctcaataatattaaaaaacaagaggttgtggtggatttgtgtcggattaggacgattggttaggtgccttattggagactaagatgaggggaaataaagttaagggttctctattaactttagtggttggaattattattttagtccagtcatagaaggttagatattagttatttgaagaaataaatttgttaaggtcttgattttggaggaatcgagccaatctgttcactgtcatgtgaaaattctttgtctcgataagattttgtgcttctttgtttatggttctaactctcttgaggagagaaagaacctttgatttgggttatccaagcttcagatgccagttaaaccctggatgatcttaggggactctaatgcgatgtttgagtttggtaataggagtgggggtcatggggtgtcaaaagttgagattgaatgtgctactaattgggcttctttgggtatggctaatgctctgcatagaataggatctttctttacttggtcgaataaccaagatgccaaagatagaatcttttcaagaattgaccatgtcctcaaaaatgaagagtggttagatacttttcctagctcctctgctaatatgagttgggaaactcttttcgaccactatttttgtgtggtctcttctatagaagctactaatattagcattaaacctttcaggttttttaatttctgggtggatcataaggattacaaacgtgaggttatggaaagttggaataaacctattagaggtacagagctgaaagatatgttcctaaagtgtgtgagacttaaacattgtttaaggaagtttaataagaagataattggggatgtggaagttaatttttgaagaagacaaaaaattttatcttgaagcaaggcttgcagctccatctaaccctgagaacttggttattattcaagaggaaaaaaaggcaacaaaggactacagcgaaaaggaaaggctgatgcataactttcttgttcaaagaagtaaagctaattggtcaagaaagggtgatgacaatacaacctacttttatgcatgcataaagaaaaggagagaagacaatagaatagctagcttcatcaatgagaagcaaaaacttgttgaaaactatgaagaggtcattaaccattttcaaaactactttaagagttatatgggaagtgaagactcctctacaactaatctgaattttcataatttgaaaggtaacaagctatccctcgacttgtagcctaaacttttaaaacctttttctaagaaagaagtaaagagggctctgttcagtattcctaatagtaaaagtcctggtccggatgggtttaattctaaattttttaaatctatgtggctggagctaggggatgaattttgtcatttagttctcagcttttttgaaactggtctgattccagcagagctcaatgaaattgttatatccttgatcccaaagactaaaaatccttccagggcaattgactatcgccctatagcctactattccactatttaaaactgtatctccaagcttatctgcttatgtcttgctgaggttttccctgttgtggttaatcaaagctagggagtcttcattaagaatagatttatagcatataatatcgttatcttcctagacttaacaaaaactatggaaggaagaatgttttcttctcggtgtgctatcaaaatagacctaagcaaaacttatgacatagagaattaggtgtttttagaagtttggatgaattatctttgttttccatctaggtttatgaaatggataatgttgtgtattagaggaacttcttataatttgatgattaatggaagagtacatggtaactttgaggggaagaaaggcttaaggcaaggggaccccatgtcccctctattatttgttcttgttatggaatttcttaccagaagattgtaaaaagaaggagaagctagttccttcaggtatcatcctatgtgcaaaagcctcaattaattaatcttagctttgtggatgatttgatgttgttcagtaaaggcactgtggtagctgttcgatacctcaaagaagctctggaagatttttgtcttcaagctggtctttcagttaataaatctaaatctcaggtttcctttggaggcgtgtagatagaggagagaaggaaaatagctcaagaatttgggcttgaagagggtcagtttcctctaaagtatctaggagtgcatttgagacccactaaatagagaatggaagattgtggggttattgtggacaaaaaaaacgaattcattcttgggcttctagacatttatcctatgcagggaggatgcaactaattcactctgtgtaacgccctaatgctaaggcacgctac

SEQ ID NO: 297738 - DNA, 3887 bp, Cannabis indica
ttctttcctcccttcagtgcggcttcttcttttctctctcaaaaaaaaaagttactgctacacatctttttgctcagtataaaattgcttcaatggacaagctctctatcatttcctaagctatgagtttctctttgctattaacaagatgtctctttcaatttacttgcatggcaaaagggcagaagttaaaggggatcaccatgcctgctagaattctggctgttgtcaggttgaaatatctactgcgactacaggaaacagagttaattctaatggctgtgaattgtttacctttaacaagaatccaagctttgacagaaaccatttaattaagtacgtgaagccatacaagtcaaatttatcatcacatacaatttgttgctttctcgttagtagtttgtgtaaaacttttggagccaatcagttatgttaggtggtcatatatccacgttaaactattaactcaccacaagctgagagcttcgctaccactctccttgaccggccattagagtgttttggcatattaaccaaggggaaaacaggagatgaaaataaataaataacatgaagaaagaaatgattagatgagagagagaggaagagagaaactttcattataaggtatacataaatcagaacacatgtgacacacacacacacactctttttatttcttttttcaatcatctttttctatgttgtttattaatataataataataataattctgtagatgctaatactatatcaagtaaattggaaaacatgtgaccaattaaacacacttgtgagagagagaaaagagagtaaaatacaaatgatagtttaaacaaggacggtctttagtcctctctgagagcatctacatctaagaatgacataagagatgaacctgtaaaccaagatgaatcccaccatgactcccacattcctccacctactctcttctccatatccttcttctctgagaatatcctcccccgtcatcatgcactttccaaacaggtgctccaagcacttgccagacttagaaaactcattgattagaaacccttcaaatggatacttaaacagggatatgtaatgcatgaagatccaataacttggaatctcattctgtgatatgaagtaaccagagaacagaaagaaagaccccatgacaccggcaataactgagtttccaactatgaaattaggtaccaatgcactgaaacacactacaactgagtttgcagtgtataagatcaaccagattagcaacaagaaatgcaaaaatgccatgaaattcttgttcaatccaacaagccaatataagggtgaggtaaataagatggcgagggtgagtagaaatggcagatagactaagccattagctatggcgtaggatgagactctgtagctcccacaagaggtctccttcattacaatttccctttcttgcaaaaagattggcaaagcttctgtagtgcatgataataagaaagttaaaatgaatgcaaatagacctaccctttcttgagctccaactaaattatctttaagatcatagaagattgatcccaagactagaccagaggccaacatttgaatagtcctgcatgcaaagagttccttggttcggaatatgttcttggagaatctgtgtgtgagaacaatcgtctccttaagtcttgaattggcaaagtctcgagggaaatcaatcccggcagttactatgtcctcatcaatgacctttgattgttgaaatagctgctgaagagtgagcttaccgctctttctctcaccatgagtatctcctttcttctgttgtgctgttgttgtagttgttgttgatggcaattgtggcagcattttattgacttgctgctcttgaatgcattcaatggattcaatagcgaactcaacaagattaacatgaagaggaacttctaatcccacgagcctcaaattcacaccaagctgatcaattgtgccatgatgaagaacagagccattagccaacaaaagaatggaattgaaggacttaacgattctaaagccaggttgatgaatgctgaggatgatggttcttcccctggtttcagccatggtctttagcatgtcaacaatttgtagtgcagaattactgtcaagtcctgaggttggttcatcaagaatcagcacttttggatcatgaatcacgtcgactccaatagaaacacgtcgcctttctccaccagatatgcctcgaaccctgtcatctcctactcgagctccagccacacggcttaggccgagctcctcgatcagtgacttcactctggagctcaactgaactggaggaagccccagcctcagcttggcactaaacatcaaggtttcttcaactgtaagtaaagggaaaagcatgtccttctgtgtgacataacctgaagtcttcttgaactcagctttgtcaacaggtttcccattgatgaatatggaaccactctctggtgtgactttccctgctaagatttccagtagagacgatttcccagctccgctcgggccaacaatggctagaacttcccatggtttagcccggcagttcacctctttcaacacttgcctgcctcctttgttgaaggatttttcaattactttaggtgactcttctggttctggatcaacagcttgatgactctgatgcggttttctggtgaaaatcttgaaagggttctccgtttgaatcctatagttgatccttatggcttcaatctcacagccttgtttcttcattgaagcagctcaggctttctgtatctgcagttttgattacagtactatttgcttattgtttctagctagctctctaaggaagtgtgtttgtttagtagaagtaaataaagacaccaacttcgccagtttcttcttttcgtttcttttttttttattaaattaattttatatggattttcttctgtttctgtggattaaagatataattggtagtctccttaagttgtagccaacctgtgaaaccttgtgtggtaccaagtaattaactggaatttgagtgactcttactgcctcgaatttgtttacgaagggttcacgtgcttatgttcttagctatacgtcatggagacttgtatatcattatcacatggagtagagctacgtgtgatcttttgttgtctcgtggtacatatatacgagtagtacatgtcaatttttgtaaattctactatatacatatttggttgacaaaacaatagtgatataactttcaagttactacttgtggatcatatattttggcaatactccatgtagctagcatagcactgcagattaatatggcgatatatttgagtggataatatgtcttgttctatagattttcctctgtatggaattgcaaaccctgtttttcttaataatagatgatatgaggaacatatattccaagaaatgtgctaataaataattagtagtttatcatcatacaagatattaatacatatattattttagagaactagattccccataccatttagcaaagaagataattatatatcctaataagttagctgtaccatttctttaggtcatatgtgactatcaaataggctacaatcaaaaggactactaaattttaaattggtttatatccaaagccagttttgcttagctaatgagaagtgttacgtgtttttaatacatttaggtacttggtgttagaagtcatcacctcctctaaacttctagaaatttctagttattacatatttgttagttaatttaagacaaagcccattgtaattaccaaagattagtagaaaagtctagataaatgtaagaaatgagtagaaaataattttctagaaatttttagaaacaatagtcactagat

SEQ ID NO: 297739 - DNA, 4699 bp, Cannabis indica
agaggtatttatttaatttttttatttgggatgtatatttatttaattggccggttgtaagtttttttttgtaatattgactctgattttgctcttccgcgtggctaaaggtgattgtcgtccaatgaagaagaagtcgaaagtgtctttgcctaaaaaaatttcaactttgatggccaaaagaaagaagaagtcaactttcaaggcaactgtgatgaacctgtaatggaacagttatatctgttgcgaatcaactaacataaaaccaaaaaacaactaataattctagatatttaatacaaataaatattacaacaatcgtgttttatctgttcaggtcgcgtatttgacaatttcaagccctgtttttataatagtatgatattgtagtagcaaaccattattcaactaatgtgcaacttaattgcaactaaaaatattaaatgtgaatgtgtatgtgtaagaaactatttgtcagtatttttttgtcactgatagatgattacttgtaccttaatagtaatatgtgaagaaataactgttagcaaatgtttatgcaactgttatgaaacatgttgccttctcatattgtcgggaataaaatatgaaaaacatgaaatttcatgtataacgtagttagcacagctagaattcaagtatatcaccaaaaaaattcataaatcataattaataattttatttaataattaagccctaattttctactaatttctatatttaaaattgagcggtctttacaataatcgtacattgtattaatgtaatattgattatctaatgaagtaataattttttaagtttttatacttctcgcatgtttttacttagaaaattttgtggaatttttacttttgaatatgaacataaaaatgttcgtcacaccaagctgtgaaggatagtcacgtagatagaattgcgatcaacgaatatgaaaatctaagtgttttgaagcaccgagttgcatttgtaaacacataagatttaatggcaaatgacaaaagcacatagtcttaaaagtaaaatggttccccgagaggatacattgttcataacaaggcaaaagaaagataattgtcttaaaatactgctaagtacaaaatgtgtgtacctgtgtaccactcaaaagaagttcgaaaaatgtaagaaaaggatttaacgtcaggggcattgggatcatccgcgaccttactagtaccatctgcgacttcagcagcagttgcatcttttgcatcatcaagaaaaaggtttccacctaccccctgagtttcagtaggctacatggtacgaaagacattggccatctcaaccgaactctagtccaaaaacaacgaagtcaaaatctggcatcttggtaagagtggtgtaaatatagtcaaatacaggctaattgtaggctttctttgcattctccttcttagtctcgagattgcaactaaaggtaggattttcttcctctagcctcttactcttatcttttgactgcctcttctccgcctaatctttggcttggccaagatctttgtcgacttccttctcttttgcagcaacatccaactttgtcttctttaaaaaaaaaaccttcttgaagagccgagttatgtttcttcaaaagctcaagatccttgatacttgcaccaaaagccaccgaaaataacgtcatgaactgtgatgtgagttcagctgagcgagataggttgtcctcagtaggagccccctcaactttggcaacgatgtcatcgctcatgaattgcttttgcaaagccacgaatttacgagctatgttcgcatggtcgatcctaaccttcttcctttgtcatgtgtgaccttctgttgcttcttcaacaaattgaccacagtagtggtagcaaattcacttttcctctttttgaggtgtcacagctgaaggagtcgcgatgttgaccttagccttgcaattgaaggagggtgcttgcttcaggaacatcataactgtgaaaaaaagcacgagaataagaatttaaaatattaagacaatattatcagtagtcgctaaatcgtgttacctgatgtttgtgtcgaagtatttttgaaaagatacttatctatcttctcattttgtttttcaaaaggttatttatatattggttctcactggagtatggagtcaggctggaatcaattttgtcttgcaattttgcaaaggtagatagcaagtgccagtcgcgatctcaaactagaaagccacttaaaactttagtgatttccaaacgattttgatctagtacagattgatctggtctacctgcgaacatataagtggatattagcttctgcaaaataacaacaataaaagctaagtgtaaaagtatgtgatgtacgaggtcgatggttaaagtcaatcctgatccctagcatcttaaacacataaaaccactttaattttcaatccctcatattgaaaaccgtgccttctaccccgttcatctcaaagttggcccatttactaaaacagtagaagccattatcatgaccaacactctttatatcacaaaataaagaatctaaaatcctcgactgttggttccccttgtgtgtattccatatacatcgcatagaattcaaggattatgcgaaaactgtttcggataagttgaaaaggggaaacgacgtagtgcgttaggatggccttttaaaaagggtggaaaggaagtatcaccccatagcaaagaatgggaattgaaaccacaatattttgagttaggatgatcgcggggtcggtaaatggaagatgaggtcgctgcattgatatgggctttgaggtagcagtatgaatcagattcatcctctcaaatgttgttaaatcatacttcttaacctacgagactaggccctcgcaggaaaaaggctcgtctaattgagcattgtccgatgaatctgtttcactacactcgccatttgcctcatcttccacctcgtgatttgattgttcaaagtcctcacccatcactttgaattcaacatctggggcaatccgtgtatatgaaaagttacctataggagtctcgtcatcgcatagcaagacaggtatgaagttatcgctatttgagactcatccgcgaaagccccctctccagagtcgtgtctcttgctgtctgataggtcactcatctaaaagatagaagattttttcaccatggtacgagtgtaatttgactagaaagtgttcttacctaaattataaaagttcaaagtaagagctcgtaaaactaatcgcatgtctcaagaaatggctgggtgtgtcacagtatctcaaggggcatgtgattgcatgaacattaagttaatgtgacagtcccacccttttgagaactcagatagttttaacaatcaattagaatgcacataacctaaagctagatataacctaagagttaaaacactaaaataaggtcaaaaaagttgctctaggtgaagtaaaagtgtgaatatgcaaaacgatattagcatgaagatgtaagtattcaagaagttcttcctaaaactcgcgagtattcaagtttgaggcacgtattttttagaaaaataccatattttgcctaaactgcaaaaatctatctatgggccctatcattccatacattttctatccctaaaaacttataatgaatgcgaatattcttcctaggattattttgtacgtgatcaaacctacgagatcatcctaagtatggagaaatttgaagcttcagaaaaaattcagaaatttgatattttgagtaagggaaggaaaagtcaaaaatgtgagggaaaatgaatgaggatcattttgtatctgagctttttaaataccgatattcctcatttagtgggatatagacacgtggcaagggaatgcctaaggtcttccaatccaactgtctccaaagaacacgccttcacataccctcaagggttttgatgacgtggaatctcagaggaaaattaaagtaataattacagccgtctttttgaaacactcaacaagacaaccaagaatcaccatctcatgacggcaactcgcctgcctctctctcatagtttccctaatgacatagctgttaattgcacgcgaaagtaggggcatgtgttatagtgcaattattttgcctaaaaactcgagaccaggctcccataagagtgacacgtggactcacatcccttgaggattactgagctgtcaagaagtgactccttaagaataaacctctcctgaactaaactccagagataatgtgactgtgacagagtctagttgcattattacgcttcgcgtattatgaaataagcaggaccaagaagagtttatataagtcatgcatatccctaggtatatgcgatgattaagtatccttcacatgcgacctagtaaagattgtttctttactagatgaattggtccaaatgactcagcgtattcgataactcgagaaggactcgcatgtcttatgttatcgacgcttattaataaaatatccatatatgcaactcgcttagaacaatgataccttaatacgaggcccgttagccctcattagaatgataaaacgtatctcaagcctgcgagcttgagtgagaaaaagaacagacaacttgcaccatagaagtcgtatacgttgttgtatttagtgaaacggatgtaaattgttcttcatttattctt

SEQ ID NO: 297740 - DNA, 6307 bp, Cannabis indica
tttttttttttttttctttcataaaggcacttctagtgtatgcaacatgtatttatgtttgtgtacaacattaatcttaatttaaatgcatgcaatgcaatttagtacacttcaaattgcttagtttattgtacatactacgtgttcttcttctatgatgtatgatgatctgtgctctgctcataaaagcctttgctgtgatgaaatttgatttcttgtattatacaatagaatgatcataataatatggaaaatataaatagtttgaatcaatggagggtggggactctgttctattcacttgggattctcattttatagaaagtcaaatgtttgagtgcttacagaaaggtcagatgtgactgatgctggtgctggtgtgggtggttcgaaagggattttacactttcatagttcttttagtttgattatttagattacatctttacctttttcaagaaattttctttctgaatttatttaggctcccttttagacacaattttttttttaatttattgtctaattttcttaagactttttttttatttatgtaaattattcggccaatataattatgcatgaattagatgtatatacatttaagttggataatgagttaatttaaataaaaaaaaatttatttatattttatgatgtactcaatcgtatatattttataataaaagtttgtttattattaaaagaataaataataataatatgtttgttgggacaacaattagtattttaacactaactttttcattatattattattattgcttgaagaccaaggctccttattatctcaagttgcccacttacattttcacctgtaataaacccaacttaatattatgttcctcttcaatttttacttaccatgaatgaataaactagaaacttaattcattcatagacataatatagaatatctccacaatccatatacctaagaatgacagatgagcaaaagcaaaggaattaattaatataaaagtgtgacaaaagaaagagttttggtttgggtaatgataatgaatgatcaaatcacattcacatggtcatggtaggacattataatatagtgggtgggctgtgctgtgtttggcatggtttttgtcttttccaattggggttgggaaaagacaaatccaatccaatccaagggctaccatttttgtatgcatttatgtgtttatttttataataatatatataattttacacacgaaatgagatgagagatgagatgctaatctggtaaatgaagtaaattctgtcagaatatattcctatcccttgaaagacaaaacaaagaaaggtattagagtctaaagtcttatgtattcatgtttctaaagtatctactcttctttttattcatgcatgcatgcgtgcatgcatgcatataatatatatacacattccgaatcaaaatacaaaatgatacaaagaaaaatcaaccactttccataacaaataatcaatagcatcacaaatcatctatctaatctataatgggagaccgaagacaaccattccgctttagactaccttggttagcccctcaacgctctacagagcaacaaacacaacgcttgcgtcccacgttagatgctgtttcgagagcaccaacaacatctgaacctgcttctcgaccagcgtttagacctgctggcagggtgcccgctcagcctgctgcttcccagcctcaaccacctcccaaagctgaacctcaatcatcatctccatcaccatctcgtgtagtcaccgagtcctcaaaagaaacaccatctcgcgctatcattgatgaatctccaaaagaaacatcttctgcctcaacaatcaaatctcaaacacaaactgagtcaccaaaacaaacaccatctgtcccaacaacagctaaagctcaaacatcatctcctgcacctgcagccactaagtctccaaaggaaacaccatctcctgtggccaatgaatcccgaaaagaaacaccatcatcaacaacagacaaaatccaaacaccatatcgtcccaacgagtctccaaaagaaaaatcatctcgcctagtcaatgagtccacaaaaaccacttcccaatcaacttccaaaccaccatcaccgtcatctcctgcagccactaagtctccaaagggaacaccatctcctgtggccaacgaaccccgaaaagaaacaccatcatcaacaacagacaaaagccaaacaccatatcgttccaatgagtccacaaaaacaacttcccaatcaacttccaaaccaccatcaccatcaagtgcagctaccaagtcttctaaagtaacacaacctaccacaaatggtaaaagccaattgttgtcagctagtacaactacagctgagtccccaaaagccatttcccaatctatcaaacctcaatcagttgaggattcgaaagttgcttcccaatcaacttcttcaccatcccatgtagtagctaaatctcaacttagttccaagcccgagtcaccacctcaagtaaggactcaaagtagcacaacgtcacctccacaacgagacaccaaatcaaaggcaaatgctgcttctccttaccaatctcgtgcagcttctcagtttcaaccagaatcgggaaagtcacctcaatctcaatccccaacatctcagcatgcccggatagctaatttggaagtttcttctccaactgggaaagctactcagcaaaaaccaaaggttggctctgtgtctcaatctccatcttctcttgagaaatcgcaaggcaaaactcaagctcaattgtcagcttatgagcaagaaccagagagagagaaaattacatcagaaactaaaaaggtaaagacccctcaagatgttccagtccaaagggagcagaaagaagttccaatgcctatggcaacaacaaggtcagtactttctaaggaagttgtcgaggtagctgctgccccaccccagaagtcaaatttgaatcccctacctgaattagagaaacctgaacaactaaagaaaattgctgaacatcccagagaaggaaagtcagacaaggcagttcatgaagagccagtccagaaaacaatcaatgggcatgtttcagcaccaatttctgaaaaggacaccaccaaggacgtacacaatgttccatctgaagcaccaaaaaggcaacaaaagcaagaaacttctgatagaaaggagactacaacaaccactagttttattgcaaaccatacaaaagctggcaagtcatcacatccaacagagtttcgaaagcctgtttcgaccacagaggaagaagaagttcctctacagaaggagattagagaaggcatgtctaagcttgttcaaaagctcacaagtggatcccaagttgatgaaaagccagtcactgtcattaccttaactggtgataatagaggagcaacaatgcacatgagctctgaaccagctaaaaaggaagcatcagttcacattcatcggggctataaatctaaccctgatgacagccctgaaactgaaactgccactgatggagaagcaagctcaagaggagagaggcacacagaccaaatgaaaagagaagctccttcaccaaaagcttatgttaacaacaatgtacagagtgtcaacaactccattgtcttcaatgcttcaatcgaagaaagaaatccaggtgttcaactaacttactctcaaaacattgctgaggaagtcaggtcgatgggtaaatcaagctccatgcaaacccgcaaggctgaagttacaataaccccttctgagaagcttactcatgaacccaatgtcagacgacgatgcctcagaggtctcttcatggaaccaagcgactcagatgatccagaaaagcctcggcgccatggttgtcgctacaagtgtggggagaaaaatgtaggggaagagttctaatcatgtatccaacgaagactcatctgctgatcatgtaatctaagcttcatataaaatatgtctgtatataataaaaatcttacaataagattggtgagtgcatgagacattaatgcaagacaattaagatggtctggctctgcctattatactatgagaaaaaaggctatccactgcatacctgtctttcaaaacccagattttaataaactgagaaagagacataaaactatacaacacaatgagcaatcgttccttttgttgtcgttttgagcaaaaataaaaagagaataaaaattggggccagctctgtaaagggtatgtagattgaagcttagaagtgcttggtggttacatacatagatagtttatgatggccagtacgtatatgttaagttatgttactccgcaaaatgtttcttaactttttgaaactgagaatggggatgatgaacattacttagtccaagctttaactttaacttcactagtactacttctactttcatgaatcaataaaataaattaagtactgttaaaaatctactttcattgtgtatttattaaacatatttcaacatcagaaaagaaataaatttttgactacaaaataaactacaaataacatactttgttgttatgagaaagtagataaagctattctaacttgattttaaacttaaaaatccagttagactttccaagatgctgtaaacttcttctattctaggatgagctgtatcagaagagtagaactgaaaaacctgttcatcgacttcaatccaactgcacccgggagttttataggcattttgaaccttcaacatcctcctaacctttcgaacctcatcccacttccccaattctccatatatgttggccagcatactcacataaccgccattgtgtggagcaatctctatgagcttttgcactgcgatttgtgctagatctgtacggccataaattctgcatccattcagcaaagaaccccacataacttcatcagcttccatctccattccccttacaacctccatggcttcgtcgaatcgcccagctctaccaagaaggtctatcaaacagccgtagtgttcaattttaggcttgatctcataaacgttagtcatcatatcgaaataagcaatgccttcttcaaccaatcctccatgagtacaagcattaaataagccaatgaaagtaatctcattaggtgtaattgacacatcacgatctttaaatcgtatcatctcctcaaacacactaattgaactcttgctttcaccatgtagagcatagcaattgatcatggaattccaagaagtcaagcattttggcgaggtcatgtcaaaaatcatccttgcctctctcaagttgccacatttcccgtacatatcaactagcgcattggagagaatcgaatccggtaagagcccatttctataaacataacaatgaatccattttccaagcctgagcatgccactatgtccacaagctgaaagaacagaagcaacggtaacatggttgggcttcagtccaataagacaaaggtgatgatgatgatcatctcccaagataaagatcatttttttgaacaaagaaatggcctgctgaaagaaaccattctgtgtgcaccccgcaatcaaagcattccatgaaggcacgtctcgaatacgaacaggcatttcctcaaagagaagtatcgcattgtcaatatctccaactctagtgtagcccgaaatcatagccgtccaagaaacgacatttctatttctgtcaggcatttcatcaaacacctgtcttgcatccctaacatcgacatcgaatctcctcgagtaagagtcgataagagcagtctgcacaattgggttggtcccaaaaccggatttgagaatgtgggtgtggagcagaggtgctgcttggggcaaagacttcaagagttggggatatataaaatgatgggggcagccgcagggtctccccttctgagcataaggcggaacaaatcaaaagcggaatgggaatgtgagtgagaagcgtaagcagtgatgatggcagagtaaatgtagacgtttggagagtggagagtgtcgaaaatggaacgagcgtaggagagatcggcgagagagatgactgcaaagcggataagcttgaaggaatagaattgggattgggaatgggaatggggattgagagtgagaaaggcttgaagttgtttaagatggttgaggttactgcactttcccagtttttccaatacgtattcattcatctttttagttatgaatgttgatgaccgttaagttagttacttattgtcttattatagttattagtatttatatatatatagtagaaccttgtttaag

SEQ ID NO: 297741 - DNA, 3157 bp, Cannabis indica
tgagagctctctctttcactgaaccacttcaatacgaatatacatcccaaccaccatctatccaataagaagagtataccgctggtacatgagtaatcttctcgtaatctattccaacatctggacgtagtttcatgactaattgatcaggcatgtcgaaaaactcaatcgcctttaagttactcaagtgttcgattccagttggcacattcttcaagagtttacagcgttgtataaccaacttctcaagttttggcatgaccccattatccatggtcacagattggagtctatccaatttgtcaagacctaatagctttagctttgggaagcctccctctttaaaatgcaggctatcaccatcataaacctgaagaaactcaagatgaaccagattaggtaaattctgaagatgtactagaggatcttcctttagcctactccattttaagagtagtaatgctagattttgaagagagtttatccagtgaggtaacttttctaaacgcccggccaagtacagcctttgtagagactcgggtgctgaagaaatttgttgaagatcaatcacattctccttttgttcagaagtgatagacaaagagcgaagtttcgtgagcttttcgatggaagaacacaaagcaattccatctctttctctgaattttacgattcctaatctccttagctgcttcatctttcccaaatctatcattaaagtaccattcccttggtttgcctctatgaaacagagcttttgaagtgattgaagacttcctattcctaaagggacctttacaccatacttggagtcaaaatgtgcacaagactcaatttcatatcgatatgccaggagatgcctgagttgcttgagactcaaaatctcaacaggaagctcaatgacataagtttgtttaaggtctaatgtctctaagttttgaagcttcttaatagagctaggaatatgatttaccttggtattcctcaggcttaaatacctcaaatgaattagcttaactatttcttttggaaaactctccaatgatgcacctcgcaagtctaatactttgagcagcctaaaacttcaaggaaacaatgctgataatgaaaattcagcagccaaatcttcttctaggaatataagcaatgaaccaagtttggagacttttttgtgctctacattgtgtggtatgttaaagatcgataagcgcctagctttgtctgaccaaatggaatcttgctctttggctatttcagcaaaatcttgatccttagacttcaaaatggcaatctcccttagaagatcatgcacatgacatgatttgatccttccatcattggttgtctcagccacttggactagccctctatccaaaagctccttaaaataaccctcagcaacttcttcaagagtttttccttctttctcaaccacaaaaccttctgctatccataaccgaatcagcctcatagtttctatgttttgcaaagcaggaaagatactcaagtacaagaaacgagatttcaagtagtatggcaaatcattgaaactaagagaaaggactctcttcatgctatcaagattataattctcttctatctcaggaccaatactatgataaagaatagaccattcattcttacttgccatgtctttggcacccaaaacagctccaattgctacaattgcaagaggcaatcctccacactttttcaatatcaaacgacaagtttcttccaaatgaggaggacacaagccaccgtgaaaataaaaggccttcatacaaaacaagtcccaagactcattctctcctaaaggctcaaaattgtaaacccaatcattgatttcaacacagcttgcagaagtaatctcagcattgcgagtggtgatcacaactctgctaccatacttgtcgtttctgggcaaagctagtttgatcgaatctcaagctttcaactgccaaacatcatcaagaacaatcaaatatctcctctgtttaagcaaattttttatactctcctttagaagatcattgttcatggtggacacttcaggtggaactggttttctgataaccctgaagatttggttaatcacatctttcatgagatttttggtcttgaacgaccgagaaacagtgatccaagtgtgaaccttgtagcgtttcttcactctcggatcctcataaacttgcttcaccaatgtcgttttccccagcccacccattcccaccaccgaaacgacttgtcgtccggaatcattcctcgtgagccactcaattagctgtcgtttgggctcactgattctgaccaaatccgcttcctcaagcaaaagcgcgtccccctgactcgccaatcgtccccggaataaaccacccgagctcgaccctgaccttccaatgtggtatctccgataaccgttcgagataatctccactctggacttgaatacttgtatctccaaaccaattcgacagcgggctcccaagttcttgacgaagtagataagcttcggaagcaacgggtgaaatccacagccatcgtaataatgagaaaaacaaaagttgaactcatcaagggaatcttcaatgtcgtaggctacgtctctgacttgtttgacccagaccttgagttggatatcgttatcttccatggcgtcggcaactcttaagaagcctttgattcgttccagctcgtcaacgatgtattgtacttcggctcgaacgccgctcaagagccgaaacacgtctacgagttgagccgagaggttgtcaagcagaaagcacaccacattttccgccatttttgtttacggattttcgatgaggaaaaataaggtttatgagttggtttgtacaatcattggttgttgtatggtatagttattatattaagcaatttattccattgaaatataatatagagagcctatttattattatttttaacgcgtcatagggtgttgcgttgtgctatttgcaatgaatttataagtcgtggtcaacttgtttgttttacacgtttggaactctataacaacaccataccaagctctacgtaactacgttagagaaacagaaatttcaaagacaaagactaggggccgtttggtacagcttgaaaaagctaaaagttactttttgaaaaagctgtgata

SEQ ID NO: 297742 - DNA, 4405 bp, Cannabis indica
tttttttttttttttataattcaaacaattgattaatatattaactcataaatatgttagactttataatttgtgtggtgatcgtgaattcaatataggggatgtctctactgattttttgttgtatttggtagcaaaaatttatagttaataaaatgttgtatatccatttaggaaaaaaaaagctttcattgtcttcgcatttgaccaccatttgggtccttttgtcaatggttttaagaaaattcacaaaatttttgacgtgtacagacccacaaatttcttcatttggcttgtgagattctttcaaatgtcgcattcaatcgtgtggtctcttaaaagtcattcattatatccatactttacaagccgaaacccaagaaggtgtattagaaatagtgtcatagttagaaatataatactatatatacaatgtataacctacttctatcgtaactaatttgtatttatataaaatgttagatggataaatgatatttattatggatatatgaaacattgccctagtggcttaatttgtagtttaaatatttatcaataattgttaattctatataataattaatgtgtctttaattaattaaatttttatattatttattaaaataaaatgtatatgattcagtaccttttagaatagttgagttaaaagtcttttaattgtaaaggtagttaaagattactgtcagtgtaactgaaatagcaacttgtagattgttcttgcaacttgtgtaactagtataaatgcaacacctgtaaccaccgtctttcaactcgatcaatacaaaataaatttttcattttaaattcttcttcttgcttcttagcatattcttttattgtttttcttttacgatattaggtcataaggttattttcttcttctataattttttttttcgatctttgattctctctcaccatgcttcgaataagaagtggaggaggtgttcttacaggttgacatttaattgatacctctagtaatggaaaaaatccaagtcttggttttgatcaatctgattggaactacaaaggcaaactattaatttgtagtctttagtcatgacgatcatcccgacgctagcttaattggttcccaaaatcttgatgggaggcaaaaattacagtttttggaaagattatatgattgtggcactccttgttaaaaattagatgaaatttgttgatggttagcttcttcatccaacttcagatcatgaagaccacgatttctagtggagatgcaatacccttgtgatctcctagatattacatgttgtgtcaagtgaaatttcagacagctaatgtattgtaatgatgcttcaatcatataagctccatgaaaaatttcaccaaaataatggtcatcaaatttttgagtttaaacaggctctgcaggtgttggttcaagaaaacaccaacatccaaagctacctcaccaatcgcaaaatcctttaggatctaatcagagaattcagacctctacctttttgcactggtggtaaaatgaatattatggctcattaggaacaatattgagttcttgagtttctttgggggttaaatgagtcatgctcaattgctcgatctaaaatcttgatgtacgatccaatcctcaacatctaaaagtatatgccacattgatttaagtagaaagatagagaaattaatttgcatcatgctcctactgaatctttggaaaaatatctcaaacctcttaggcaaaattcctggtaattcaaattttgggagacttatagttaaatgttcacattttgggatgacatgggcctcacaattgcaaagtgttacaagatctatgaatatcctccaagtatttatataattagaaacaagttactaataatgttggtgttcttgattataaaggtcacaataagttattatgtcaatctagtattcagatgctaggctacaaattcaagaaaatttatcaaacaatgttcaagggccatctgatcagcctttggtgtgacacttctctggtataaatcataaactgttggtttttatggtccaaatcagagtagaaagcataattaatttttttaaattaattttagattattataatctaaaccataggccccaagatctcaatatattttcatagattaaatctagctatgagttaataatattatgcctcttgaaggctattaaaatattcttgatcttttttgtatattcaaatgatcatccaatctaatgcaattctatttggcaaccatctacaccatagatcttgcatatcagtctcaacactttaggataagtgtgagcttataggattaattttagaatgaatattttattattacattgtttacttaactcatgagatactatgatgatgagagagagagagtagtttcactcataggtgtagaatagagagatagagcgagagagagagagatgagagttcagctatggattccttttccttttattttgaaaatatatatcgatcgtatcacaataggtatcactcaggtcaaacttgtaatgatctatatctgcgttatatctaacctaataaaatgataaaataataatttatttaagcataaattcaaataataacatcgtaattgaatcagacgtatctttgcttatttaattatttaataataaatattttatcctataagatatttaatttattttgaattatttttatgataaaataatcaaaacaactcccatgacacttatatatcacctacatgcttatgactataaagccatatgcatatgacatatatttaatgcccgaattgatttctcaattttgtcttacataagatttattatttgttttccaataaactgttgatgttgtctttcgtcaattaatctaagaagatcgtaaaaaataaaaggactgttgataacccagaaacttttcctggagacgtgaacatcatgtttgacacgtggcatgaaggaggacgtgacaaagttaagttgacctgtgtacgtcatagcagttgacctaggaggggacctacccttacgcccaggttgactttaggatcttcgggatgaaagttcagactttaataacctaaatttaactcacaatattttaatattctataccatgaaggcatggagcaacctaatccaaccttcgagagttgaaattacacgaacatgcaacctggaagcgaacctgggtacctagggtatcaccaaacacccaagctgatgtatccaagtagggtttcaatttttgggaccgtcttagtgcaaaagggtcaaaacatgcattgagatatcaactagactcaccacagacatatttgaggcatctaaatagaatcaaagcaagttcatttttgagcacttggggccctggggccctaagcaccctgcgccaagggacaatctgtcaatctagccgcctttcaagtatcatattggagatatgacttttgcatattctttgtgttcgtcaaagggaaatagatcttttaaaataagaaacaacacttcatgggtacaaaaattagggcccaatgccccaggttgacacctagggctgaccctgcgccgaggttgacattttttcaacccgagcaattttaaacaaagttttttgagatcacttctgatcacctactattttttcttttagaaaatattgagattcaactatttttggggaccaaaaaaaattttgaagggcaaaactcggaccgagagcctaggtagatgtattgtcaacctgggttgttttcgatacaatttatcaaaaagtgttctgggcatttttttggtcataaaaaataatgaagattcaagaaaactaagggataaaaccacaaacctgcacctctggaaacagggcctagtgcccaggttgagcttgtactgggttgggcgcccaagttgacaatcaacttgggacattgccttaaattgctcaaatgccaaatctgatgtgatcattaatctagaatcatcaaaacggggtaggagacctcgtcttcaagtgcaaaagaattggaagtatgaaaaaggaatcctaggagcttaacagtaagtacccagcgcccatgttgacaaaagggctggtgcgctgggttttgcttatctgattctaataccgtgttgactgtctgtttagttttttcacaataacaaagatcaatgtagtcagagaattcaaattttaaactttgcatttgttatttccatcaaaaatgaagagttttgggtctcttgtttttgcgaaatagcaacatctctgagaactggtgacagctttgctagaacacgataactgactaagtgatgtaaaactatcacttaggtaccttaaagtacatcccttgtgttggaaatattttac

SEQ ID NO: 297743 - DNA, 10022 bp, Cannabis indica
aaaaaaattagattaaaattttttcttgaatgctaagataaataggaggtctatcaaaacagtcatttaagaggggtgtattataaacttatcctgtctaattttaggagaaaaaaggaaagattaaataccattttaaacttatagtttgcaaaagttggtgatttatcttctattttattaaatgagaaattagaccttgtatttttttaaatagttcaaaatgtatcctgagttgatattttgtcaaaataaaatttaataatagtatgatctaaaaatgttatgacaacactgattgcattttctatatctgttggtattagaaattatcttcaagttggttataaaaaaaaaaattgttaaaaattgagctcaggatactatttagtacgatttgagagaatacaatgttcaatttatcatctaacaaaatagagagtctaattagtatttttataaaatatatgatggaaaaaatatataatattaacccaaaaaatcacatttcttaaaaaaaaacctcattgaatacatagagtttacactccttccaacaaaaaaaaccttcacaatctttctttaaaacgaactctaatttcataactcaaatcaccaactatttaaacttacaatctcaactcatataataacatatatctcatttgagtttcaatcaactcataatgccaaactcaaaatctattgaagccataaaactagccgttttgtagggttgaatgggtgtttaattattgttgagatgatgaggaaacttaggctccatgagtattgggtttcagttgatcttaattagttgtatctcttcagttcttagctattgatgaagttcttggtaatttggtttcttatcgtggaactccggcaagggaatcccctatcttcttttcttatggtgcgaaatttatccacactggtaaagaaagattgtgatacagagctattgttgagtcttcagtttggtaagaccaaatttcacacttatttttcgcggatgatagcttaatattcttccctccaagcattgcactcgtttcaagactgattaattttactagtatggtttcgattctggtcagttggtgaattttaataaaaattcagtgtgttttaacacttagattttggttagctagacttttaaaagttagttttgggcttaagctcaaaaatgacttatgttgctagttgggtaatcagtgaatttcagttttaaattctaaaacactcttttaataaaagtcaattttagtagttttctcaaaatgaattttctgagaagctaaaagcaaaaagcagaaactaaatcaaaacaaagtctgaattctttcaactctaaattcttcaatttggtgcatggtaacatcccttagggaacatacatttagtttgagtactagtgattctacatatatcatcttcttcatagtgaaaaagagattttgtctaatcactaaatataaacatgatataaaaatcattgtgtatatgtcttgtatgtcatgatcttgatcttgaacttggtgattgtattattgatcttattcctcaattttttttggaagtttccttttattgagaaaaaccaaattagttggccatttctagcccatgtatacaaatccatctcatcaatttgaaattgctaggaaactaccatgaactcaaccttgtctacaaaacaaaactaaaggagagccccacacaacacacacaacaccatcacctatccaataattatcttatctcttacatcaccaatttcttctttgagatatgattggtatagggaaggaataacctttggtgggtcccacttacataataataataataatgcacataatatttcattatcatttttgtttgttaatatagattagatattataccatcccatatattgccatgcaacattatttccttctaacttctatgtacacgtacacaaaaaaaacatcatataaataaataaaagtgaaggaattaattagtcattttcatcatcttaatcattttatatatatagacatagttgtgtacataggaattgatataatggaatttcatttgaggtttttgttgacaaatttcattggtgtccatgcattcttcttcttcatttcacttgcaaccgcggaacttccacggttgcagcatcccacaaaagtcgacggctcattgagttttttagtcgtcggagattggggaaggaaaggagcttacaatcaaactcaaattgctcgtcaggttttcgaatgtcattaattattttctagttttattatgattaacttaaaatcttttctctctcattcatatatagaattattgattttgtattattttgtttagatgggaaagataggagagaaactaaagataaactttgtggtgtcaactggtgacaatttttatgatgatggattgaagagcatcaatgatcctgcatttctaaattcttttacaaaaatatacaaagctaagagccttcagaagccatggtacaatggtaattattaataattaagatgagttaatacaattacatatattaaaattttttatttgtgtgttatatatttaagtggagtgtgagtattattgaatatatttcacaaaaattacaaaaaatatatttttttttcaatgcataaaagtattaaataaatattttcgatcatgaatttgagtgggccctaaacagaagcttaacctaatatacaacctagttggcgcctctcactctttgccacgtggaagagtgttgtggcatgatcatcatcgatattgaattataatgttaaataaaaaaaaaattgaattataatgctaatattataaggatgttttttttttaatttttggtatcttgagaaattatatcttaatttttttgtaaggttaatcctattttgaattttttattttgttaaatgataaaataaactttgtaatttttaaaatggtataaataaaacactgagctcaattttaataattttttttataatataaccaacttaaagataattcctgacacgaatacagaaaacataccagttttgtcattacacttttacattaggttattattaaatttcattttgacaaaaattaattcaggatactatttaatactattttagaaaatacatgatccaatttgtcatttaacaaaatagatagttcaatcaataactattgcaaatataaagtctaaaatagtatttatcatttttttatatgacattttttattatagctgtaacaaataatttacttatttttaaaaaattcggaataatttacaatgccgacaaaaaaaattcaaaatattatttctataagattctctattctcaataaatattggtctcttttaattttgttaatatttttttgtttaaatcttccattaaattaacatgaatttactaaaatgaaattggatcagtgttaggaaaccatgactacagaggaaatgttgaggcccaattaagcccaaattttagaagtgtggatagccgatggctttgcatgagatcatttgttgttaactcaggtaaagtaattaattaatattaattaaaccaattacctctcattaattaatgtattaattttcatgggtttaattaattaattaacctaaaaatgggtgataaatttgcagaaattgcagagttgttctttgtggacacaactccatttgtggacaagtattttgtaaggcctaaggaccataaatatgattggagtggtgttcttcctagacaacattacctttcaaatcttctcaaggttactcactaactttttttattattagaagtcaaatacatcaatcaaaccaagcttatataatacattaaattttgatcaaaatatatgaaacaaatctacaatataaattacatataaaatgataagttatttttgataagtgagacccatcttaaataaagataattggttgaagttacctgccacataaatgtgtatcaagtttgtatgtgaattgtgtgtacatatcattactcgaagagaatgtatctcacagaatatatatgtaattaaatattgagtctcatataatttaatctaatatattttaaaaaatatcgttaacaatcgcaaaacactacctataggtggtgctaggcactactgatgcccaataacaaagttcttgtacataatacttttgaaacatacttatagctctatgttcaaacaccactttcacttgtgttacatgaaacagtatacaggaactaattagtaaattattagttttgtttaactagcataaatatgtaaattatcaatcaatgaaataaaaaattagaagtttagtttaattgagagataaacactttctcgaagagtgtattttaaagatttgtccaatcttaaagaagactattactctatcaacgtgtcttcaaataggctctagacaaatattaactaactaactatattaaatgtcaacaaactaagaatgcttatattagttaactaatatgtatatataaatattggtttggcttttgggggaataaaggatgtagatttagcattgagaaattcagctgccaagtggaaaattgtgattggacatcatggcatcagaagtgcagggcatcatggtgacaccaaagaattagtgaagcaactcctaccaattcttgaggtaattaacactattagcattttctttttaaaaaagagtaatgggtgaaaatacaataaaaaatgtgattaaaaatgtcatctttttaaaacttttaacactatccaattttgttcataatttgtgttttgccatatgaatactaccaaaagtttttcaactctaacaaaatctataactctatttaatatttcaggcaaatgaagtggatttgtacataaatggtcatgatcattgtttacaacacataagtagcatcacaaggtaattaatttgttcactcactcacactgtcaattaaaaataatattatgtaaaatataatgagcaagaactcgaatttttagagcatttgcgtgtttttactctaatttttaaaatacattacgaaaattttactgcagccgaattcaattcttgacaagtggaggtggttcaaaagcatggaaaggtgactttagtgcaaatagtcacaagggaatgagattttactatgatggtcaaggcttcatatctgttcaacttacaccaaatgatgcaattgtagccttttacaacatatatggcaaagttatgcatactttgaatctatccaagggtctctattctgcagtataaggtttattgtaatcgtttcaagatcgatgttcgatcatctattgattttgacgtgtaagaatattaaactatttataagaacatcagttatttcattcatcaaaatatttcatatcaaaagtctatatagacatcatccaattcacacaataacacttttacattattatgacaatttaaattttttattatgtttgattacaaaactgtaactattatcaagttaacaatcgttttatgtctcaacttgattgttgatttatcaagttacaattgttaaaatatttttaaatacttacataattaaatgttactcagacagtgttgatattactgcatgtagacaactatatgcatgaaataatgatgattatgtgattaggatcataataggatggtcgattttattaactgcaattaagatacatggtagcaccttaataactatagattgacctgacccattaaaccaaaatccaccatctcttgtattacgagccaaatatatatgcacactcactcactccataagctctctctcacacactcatgctttgatacttagaaggattcatggtgattcaaggtaactcacaatcaagcaaggcatgtttttgtataatttaatgctctaaataaaatgtgatattagttgtgataaatgcaatttaataacattcgcaaaattgcataataaaattcatcattcgacaattcacccctagtttttttaagtctagctagcttgtaatatcttgaagaacttttgggtgatgacattggtaggcttcaaatgatgatgcatgttagttagtgaaaatgtattcaatcttattctagctatttatgtaatcatttcatgatcataatacaatgaggttcatatattgaatgtgtaagtatgaaaatgttataaactattcttatcaaagtgtcccacattagtactaagagaaatgctaaagggtaccagtggtgcctagtaccctcctatgtgtcaatatcgttattaattacaactaagtatcgggtccaacataatttaatataataacttctagagagtatcgctagtcaatcgcaacgcgacatgtcaagaaggtgctaaacaccactggtacttaataacaatgctcttcgtactaacaagtatttcaaaaatcattatggcctttaaatgcatcttgtcattttgatatttcggtgagttataataaatggttttaataaatataatcagagtaaattatcactataatattgtaaatattttgtaattttcattaaatattatctcatttacttaattccaataatgtagtttgtttcatttggacaattctacatcaattcaactgtttccattgatacatatctaaaataaaaaaacatggaagaaaactcacaacaaaaacaccaaagtatatattttatttaatccttactaagattaaaaatgagatttctctatttacacaatatttagccccaactaacttgtggtatcatcaataaatttacacacactatctcaatattaaaccagtcagttgtgccttcatttccaagttttcctatgccaggaatttaggcagccataatatgaaatcaattcatcacaaaatggtaccttgaatccacatagctctccacatcccacagaaaagaaccaaatgtcacagcttcaagaacaagccttttcaaaccaccgaagctaatcttgataacctcatccttggaagaatcaacggttccctgaggcgttataacaatttcgggtcttccaaagagtgcctcggtgtgcttttcgataatgctaacagcctctttggatcttatggttgcatatctctgaagggtctccccatcaaatgacataacgtagcttctcagtcgggaattcttaacaccagcaccaaaacccgtagaactgatgcccccagcccatgaagaaacttcgggatgtgaaggtgctccttggagagactgtcctccaccgaggggtttagtttcaatgttgttactttcttcatccaatttatctggaaggattttcatcgtcttctcaagttgaaacctctgatcaacccgcctgaggaagtatccatacataaccgacgctgcatacacctgcccaactcggagtttgcttatttgagctaccgaagtggagtcagctaatcggtttcctaaaataagagatagatgattctgtatcatctcataagcctccggtgagtgaagctgctcgagcttctcatcttgacttggccaggaatcgacctgcgatgaagaatcagaagcagcagaagggataatggatggtaccaaagaaacactggcatccatgaatttctgaacaatcaaagcatacaaaatttcttccaaagtctttctcctttcattagccttaacctcagcaattctcctgtaaatataaatcaaaataaatttcaatacaagattttaaaccccaatttcgtaaaggctgtacattcttctacaacaaagagaattttacaactaaaaacgcagataattgcaaagttttttgctttccagcttgagtaagccgatgacatgattcaactacaagattttgaaggataaaaacacgaacctgtagagaactaagtcggtgcctgtttccgaagattcctcagccgttttgtcagccgtttcttcagcatcacggtcgatttgaagctgttcgagctgctgctcaaccgcagctggaacaagatgcggatgacttgctaagatttgtgttaaaaactgtcctataggagattcaagttgtaatggagcaattggagcagatgatcctcctgaattcggagttaaggatgctctaactaatgggaacctcctatttccataatttaatcttctttcccctacctttgattttgcaatcgaagtttggtgctgccattatgcacaaaaagttataattaaaaaacagaacatcaaaaatctaacataaaacaatcaaagttcaaactcccaaccccacaaaataaaattgcaaaaccaaaatcccaacagtttagttttgactttggacaaaaacaaatcaataattccacattcaaattaataagttaaagaataaataggtatttttccctttgaactttggccgacaaaaaatcatgccccttatttataaccaatgcccctgaattatgaccgtcctttaaataattagtaattttatccccgaattatgactgctatcatattttacccaacaaatttttatcattgtcaaaccgtgctccttcaacaaaactctaacgaactttaacattaccgatgttaaacattcccctgaattatgaccattagtgatatacgaggcttctcactaaataattagtaattttatcctctgaactatgacgactatcatattttactcgacaaattttatcattgtcaaaccatgctcctttaacagaactctaacaaagtttaacattaccgatgtcaaacattctccctgaaatatgactgtcagtgaaatataaaaattccgttaaataattagcaattttatcccccgaactatgaccactatcatattttacccaaaaaattattatcacggccaaactgtgctcctttaacaaaagtctaacataagtcccatatttcacaaaagttcaacttaataattcagttagtacaatcttattagtaacaaaaatcactggtaaaaacacctatttattctaagtttaaagtaatttataaagaacatatattaaagtacacacatatatatacaaaaactgcacaaattacatcttatgagagaaaattcaggcacaataatcacataaataaaatacccaattcagattctaagctgatttctaccacaaaattcaatctttactttttggaaaataaaaaaattgaagaaaagtttagataagaacatataataccttgattgagagaccaaaattggttccgaaattgacgaaacgagaacaagtagaagtgaaattacgagatctggaaatagaattggaagctttacagacagcgaaaggagattgcataagggttactgttgcagcttccatgttcttcttcttcttctgcacaaatccataatagattgataaacaaaacaattacatgagaaattgaatattaaaatcgaaaaagctaagaaatttagagataaagtcttcacctttggatgaaaaaagagagaaaccctagaatagaatgagagagagagagatgggttaggtatgaaattgggggttttgatggtgatgatgatgactatagtagtttgagaaacccaaaattttcttttctactaaatatggtgaagtcttatatatttatatttatattttatttttcttgagaaaatgaaatataaatttttatacaagataaggctttattctttaaatatttacaataatacactctttagacatttaatcaaattgattgtccttaaatttgttggtactaaatggttggcaactaaaatttaaccacaaatttcaaccacataatttttaggaataaattagtttattagaaaagaaatcataagataagatcacacataattataaattaaatatatatacttttttaagtcaaaatgagatgtggggatacacaataaagtaacttaaattatgta

SEQ ID NO: 297744 - DNA, 1953 bp, Cannabis indica
actattctatagtcacaaggataacaaagtgtttgtttctacaaatgctactttccttgaagataactatatgaaagacaacaaaccgaaaagtgaaattgtattagaggaaatgctcatccataccttagagacattgctgcttactttgggatgtgtccgacataaatcacccaaaaaattatcaagtacctttcagtgatgtatttttttatagggagctaggatggcctcaacctactccttatgagatcataaactatattcatctgaagtctactccgaagcagaataggatagggtacttctacttcagtcaggttggccactagtggttgggtgataccaataatgcagctatgttaaaagtttgtaggtatgccaagaagtactttattgcttagggaatttaaaggattggatactacgagttccaacacggtgcgttcttcaaacggtctatccccacattgcaaatgagggatagggcaaaccatattctgtcactcttaccggagaagaaaaatctacttcggttgacctatgtggccagtttccaaaggtatggtttgtaccctcctattcctggatttccaggagccctagctgtagagggagcttgcactggagatggacaagttcctgaattgtacgatgacgtacctttgtctcgtatgactcagaatattaagaggagagagaaggccctccactgatgcttggccagttggggtccaatttgtgatgctactctctggattaggcctggaggctagacttttgaggaactgctcgccctttgcctacatctagaggcaagggcaaggaaattgtcgatgattgtgatagttcatcttctgaggatgatggtgtttgatagttgatatctccatcttttacattcttgtcttgcattgaatatttatgacttgcattttgactttgctactttctttttgtagatatgtctttcaggttgagaggcctcactgggggaacctgatgagccttcagcatgactaagggccaaggtagcccggacctctcgtggcggagatgatgctggatcatctctgcctcctcctccaccatggcctgcactaggtgggcaactcataattcatgatcctcttgtttggagcgaacgacataggggccagggtgctcaaaggcccgatcgaggagcaggctcagctgtagggtagagggctatggagttagcccatagatgtatagagagagctattccattcatgaataacagctcaaggagcttggtgatggcaagatagataggctctactcaactggcctttgggatctatctatggtaagttgtacttttagctttcttcatctttctaacacttcagtaagttggtcaaccaagggattttctgcatggtcctggtcagccaaggttgtatctcttgaggggctggctggccatagcaacttcagagagaggctagccggccagtgttgtactttgatactaattttgtcttgtttttctttcaggccttgatgaagttgagctcttcacgtgatagctcctaggggtcctcagatgccctttgggattagatgaagaccgtggaggcctctcttctgccaaaggacaaggccatgtttgaggttgaagctcttcttgtggagaaaccggagggagtctgaagtcatagggcataaagagagaccgagtgcgactcttgattgccagcatgcccaaagggatgattatgttggcttgtccttaaaactcatctatgatttcaagccacgtaaccccagagctgatctatcatacatgggcagtgaggctttcttggagagcgcactagcttggggaaagatgttgttcgagagccgattaggatcaggccagatcaccgcctatcaatgttgggttttataccctaaataaaactctttacaatctgattagttatc

SEQ ID NO: 297745 - DNA, 3132 bp, Cannabis indica
tctatggcatctaggggaatcttagtggccaaaaaccaatgaatgccttctagtaaagcttgagcttcaacgaaaagggggataaaagcacctcatctgggaatagaaaaccctgcaaagtggttttgtttactgtcaagtaaggtagcacccatccccgttttaaggttcttcaggtccaaagcagcatcaacttgtagagtgtattgtccaatctgaagggagtgagctgaaggatcctgttgactgtgtaaggtcaatgtttgaggagttgaaaccaaatggtctgactgagggggtgtagcttgggctgcctaatagtcccgcagtaaagaaaaaatgaaatcttcctccttaatgggagtgttaatgtttcggttgaaaagagcattatttcttttattctaaatctgccaaattaagctaatgaacaaagtaaaagtttctttgttaaaatcattaaaacctctcatgtaaaactctttgatatcacagttatagttcttaagatagaaatttgcaaaagagaaatatttccacacagacttagctttgggacaatggatgagagaatgagagactgacttaattcgattgtggcaaaaaggacagaaaggagaaggcacaacctgtttttgaaagagatttaagctgcaagggagaatgtggttaaaggctttccaagtaaaatgttttatcttaggaagagttttggtgttccagatagtttttcaccattatttgaagcaatcattgtcattagagttggtcaagtgataaaccgagttgacggtgaagcatccaaagggtgatgaccccaaataagaatgtcattagaaactgggttaatggggattttcaaaatttcatgaacttaataagagggcatgaggtgttggagcttggagagatcccaacaaccatctttatcaatgaaatatgagacactttgatccgtgggtcaaaattattcaagaaagatagcgaatgaaggctaggaacccatatagaatcaaggagagaaatggactaccattaccaacttttcaaactaggccctctttgagaagctccgtgccccaaagaagactttttcaagtgttcgaggggcaatggcccttagtagcagtaaagaaatcactgtttttgaaatacatggctttaaggagagtgtaaagaagtgatgaagggttggaccagattctccaagcttgagcttgattatgactttaaagagatctaaaaccaagaccaccatggaatttggatgttcataacgaagaccactttttccaatgaattttacccttgttagtgcaggaaccccaccagaacttagagatggctttttgaatagtgaggcaggttgaagtgggcagtttgaagcaggacatagcataggatggtatggattggaccacagctttgatgagagtttctttgccaactctagagaaattttttccattccagatgtttaattttgaggccactttttgtaccaagtaatggaaattagagttggaaattttgccagtgcgataaggaacaccgagatatttacttatgaaaccttcactaccaagaccaagagatgttctaaagtgatcctgagaatcatgaggggtgttgggggagaacatgattgaaaatttagcgaggttgaaagtttgaccagtggctttgtggtaagaacataaaatttccttaatggcagtactggaagcataggtaacaggagtgaaaagaatactgtcatcagcaaagagaatatgagagatgatgggagcatctctacagatttttaggccagtaaattgatgaacttgctccttagctctaatagtagcagagagaccctcaacaactaggagaaataggtaaggtgggtaaggtgacatgggatccccttgttttatacctctagtaggagtaatatttgtggaaaggatgccattgaccgatattcgataaaccacagttgaaagacatttcataaccagggaggtgaaagaggaagggaaaccaacatgttgtagaatagctttgacaaaactccactcaactttgtcaaaagctttctccatgtccagtttaatagttgcccagccctgtttgccagcttttctatagtgaatagatttgataatctcattgacaataaagatgttgtcaaaaatcaggcgatccgagaggaaagcacactggttttgagaaatgattgagtgaaggacaattttcatcttattagctagggttttggatataatataaagtgttgaacaaaggctaataggtttatagtctcggattgtggaagcatttttttctttaggattaaggccaaaatggtatcattgatttgggaaaaatcagagtgatgattcagaacatctaagatggtactggtaaggtctttaccaagagtattctgattttttttggtaaaagtgtgcgttaagtgcccattcgaaccatgggctatgtcaccagagagattaaataaggcatgctagacctcatcctcggtgtaaggcctttcaagggcagagtaaaggtggggatggatacggttagagatgcccttaagggttagggcaatcacattatggtcctcaccttgagtggtgtaaagctgggtatagaaatcaacaaaatgaggaagaagggaggaaatgccacttgccacagagccatcagcaaaggtaatggatcttataagattattctttttcatagcagtggctttatgatgaaaaaatttggcagatttgagccaattgaccctagacctttgtttccagtaaatttcctttttatgcagaagattgtccaattttgattgaaaagttttagcttgggtaatgtccctaactgtgggattattggaatgaagaatttggacaaggtccttgggcaatgtgtattttatttagggtaaatggcggtaaaacccccaaaactttcattttgatttcacttaacccccaaaactcaaatttaggcggtaaaacccccaaaactcatattctgttagcaatttaacacttccgttcattttaggtgttaagtgccatgttggactggacacagtgtacacgtgacacacttttattggtccacgtaaaaaat

SEQ ID NO: 297746 - DNA, 3611 bp, Cannabis indica
ataatattagtttgataattaatttgggtataaaaatgcatagattctcaaatttccctttgaaaattatccaagtagtaataataataaatacatataaagataatgactaagtttggttaagccctaagcaccaagcccatggtccagagagccttatcaacttgttgccaagtgagctttgtcctgtggcccaacaacttttaatgaaatgggttgcctaaattcttcggcccacaaccatttccctaataattgtcagtgcttgcattttccaaacttaaatatatcaatttggatccaagaaaaagaacatatactaaatctaatttatttgtattacatacaataatatgtgagaagaaaaatagagttaaatacatagtctataaccattgacaaattctatcatataattgtaatttaccaacataaatatttaagtttaattttcagttgtagataaatattttgacagtaataatacttaagttatatttctagaactaccgtaggcacctgatcaagtgtcaagtcaagatctacgtgttattttcttcttcgtatatttaaataattttttagataaaaaaataaaaatttaatgacctaaaccaatcagaggctgtcatatggtcattgacttgacacttaacggttaggtacttatagaaattctaaaaaatataacttaagtattattacctaaatgttaaatttatatatttatttaaaattaagaatcaaacttaaatatttatgatgtaaattactcatcacataattagttgcaaagatcttctcttctccttaagtcataacatcaaagtaacttgtgcatatctcattcaagtcataacatcaaggtaatctatacatatctcattaattttaacatggaaataaacaatcccatttcttccacacaaaaaaatttaagaaaaaaatactaccttaacaaactatttggtttattaaattagtatgaaataaacaaaatcaaacctattttatctttattttgtgagatttataaatctttattttcctagttaaattgatgaagtcttggccccttacaattaaatgatgaggtagctgaaaaaacaattaataaaaataatgacatttatggagaaacattattttatttattagttgttgcgtttatatttcattgcttttttagaattgtataataagttcattatcttacaaaaatgagtagtcatgtttctcctgcttttaattcatgattaggtacaaaaatgagtagtcatgtcttctgacttttttaatggttaaaaatacttattagatactattatggacattattctacgtagaataaatggtagattattgagtcatatataagagcatggattactccactcatcaccaattggtttttaaatggaatcccatgattctcaacacagtatcagagctatatcttgcgggtatgtgatcatatccgattcgcacctatacagatagtgatcatgtccactttaatacggttcaagattggtgagcaaaaaaaatgccacaatcttgaggggaatattgtggacattatcccacataaaataaatagtagagtattgagtcatatataagaatatgggctactccactcatcacgaattagttttaatatagaaccccaagattctcaacaaaatataacataagattttattaaattttgaccattgagtaaataaatatgaataattgttattagatattttaatatatttaatattataaaaggtgagttctcgaaaaacgatgttccctttgtaaagtaggctttttataactaattagagataacataaaatggatcacacataagaaaaattatatgatgaatgaatgattcaatcccctctcacccccacgggttctattattgaaggggttccccttcttccatgagaggtggggcatacgtaaaagcggaacctaaatttagtgtatttaattattttgtggtgtatttagttcaagcaggataaattagtgcatagctatattttaattcctcctcatcaagttgttacatgggctcgtgattttcttttaaagagttccaataggatgattcttgtactggtgatgaggtagttcctaagccgaatggtgtgactcaaaatgatttgatgtctgattaggcgactgatggtagtcaagataaatgttgatggagtttgattttgagtttggcctttgtggtttcacgatggtggctcgtaatgatagaagagaagttgcggtgtcgacacttcaacattttttgagtggttttacttgagctagttgaagcttcgacattacgaaatccaacaatttagtgtcgattgttggttttgctagggttcactttgagtttaattgtttgagtgtagtttctaagtttaataattatgttttgttggctttttcattgggtttagttttaaatgattttagtcatagcttttcttcttttgattatgcttgtttttcttattgttctagattttaatgttattactcacactcttgtcaaattttgttaacaaagtttggtggcctcagtacccaaattatattcataaactcatgttgagtgatttaattgatcaatgtgaatctttgtctcttaccttttgctagactttgttgcttataatgtagtgttgggattttcttttcaagaaattcaaaatatatataagaggtgacgcgagtataattaataattctttatattacttattattaaattacaaatatataaaatctaatattaaattatactaataataatattgcactcacttataatgttgggtctcaacttcgaaatactaaaaatagtaaaaaaactacaaaaaaaaaaaaaaaaaacaagtggaggcaaaaattctaaaattagtatttattactaataagttttgaatactgattatcaaaaaatactagaagatcactcacttgtaatgttaggcatacgcatttgaaaatctacctattagcatttataaacaagttcttaatgaaaaagtatcttctttttttctttctttgtttttttttattcaagtacattcatcattaaaaataaaataaaaatgaagttataagtgtaacatttaaaaatattattgattattttgatttttctctcaatcaccatcaaattaatagaataattaaccatcatacaaatttccttaaataatatattttgtactaaaaaaattaaatacatatttatcaaaaatatatgtacatctataaagaagactattgttgctattaacatctcttaatttaagggaaactagttgcaaggcatcaatgctaagaaaacaatttattcaaaatgaagaagaaaaaaatcagcacatttggacaacatataataaattgaaggcccacaatgcatttaatgaggcccaaagaaggaaatggtggaaactaatcgaagtatataactatatataagtgaatttcaacttttatttctaaaaaaactcttttaagaataatcaaatataataattttgtcagcatgtccttcggttagacgatgagctatcctggttcgaggaagt

SEQ ID NO: 297747 - DNA, 1772 bp, Cannabis indica
cacaaaaaaactactcttcaagccgccactctctctctctctctaccttctctgttttcgaaatactatgagtgatagagtagtgcccacacacatcaagtaatacctcaatcatagtgaggaaggctgtgtagaattcaaattcaacaaagaaggacattcgggctcagatcttgattatactctgcgagagaaaggaatcaagggttagagatctgagtgggaggcgacatatatttttctgcacccaatgtaagatttctcttacttttatgtgtttaattttccatcgttttagaagttcatatgtaggttgttaaatcaacatacttgtgagtagatctaagatcctggtaaaataattccaacagggtcgtggcgcgggaagtcgttctttgttctagaaacagcaattattgcctttgtattttcctaccaatatcagtgatgcacacaactttagaagaactagctatttaaattgtagacctgaatgtacctacaagggtcaacatagggcaagtccccaagtctctctctgtctctctagtaaaggccatgtacagagtgccaacattcccagaacaagtaaccgtatgcaacgtgcaccctcccaactcctcaaaaactacatcaaataaacaacggtaaagaaaacttaccattcgacgggcgtaggtgacatgggttatggctgtgttgcgacgtgtttggtgaaatgtgtttgggaatgatgtagtaagagaagtcttgcaagacaacagaagggatcaagccaaatgccaaaacctttttgtgatagacacgaaaaatgtgaaatttgagttggttgcagtaagtatttattgagcaccaagcaggggtgccttccacgaggagcgaacaatttgaattattcaccgaagggatgtttgacggttggatgaatgggaagttaagaagatttatcggctccctacatttagcttccataattgcatgcttcatcaaaagtgctccgtaagtgaagagtttgctctttctaattgccgctgttttgactactcacgaaacacgcacccaacacgcgcgcgaattacaagagtcagcatttaaagttctaacagtaaacaaaagaaataataccttctaacgttgacacttcagttggcggctactgggataatgtaataaaaagcttggatttgtcccacttgcctagaatcaattaggaggtaacattgcaagctctcgaatcttgttacgtcctgaaagcatgggggtaaatgttgtgtggatttctctaagcttgacaagtggatttgaatcaagaaaggttaaggaataataagttgatcaactccctttaccaatgttgggaagacaagggtcctagctcgcggaaagggcttcagttattgagactcccctgccagtcagtgatcattgggatatcacaatctggattgttccccattctcgagaatagaggccatctactcccgtaggatttaagtcaagtgctcctgcaaagggtatggattttaccccgtacgatgaccgaaagctattttgtaaaacgcgtttaagccaaatctacaatctcgttccacagaggcgtttgctcctacatgtcagactatgaacttagtagccaggcttttttaagtacggtgtcagggtttttcccccataatatgctacagtacagaccgcgtccaattgtacctgctgaaggatcggacgaccattgataagtgaaattcaaaaaggaaaaccctgggacgacacgt

SEQ ID NO: 297748 - DNA, 3321 bp, Cannabis indica
ctctctctctctctctctctctctctctctctctctctctctctctctctctctctctctctctctctctctcttaatttaagccaatttaaattttactccttaaatttgatatgtacagtacttttaagtcgttaaattttttactgaactattaaaattgttgaatttaaaagtttttgtccaactgtactaaacaaaatctaatgtatgaaaatttaaggggcacaatttcgtacttttgaaagatcggaaggtataatttaatagatatcaaagtttgagaggtaaattttcaaattgtacctaataataagattttctttagtaagaagatatgaatccgttgcttgccacaaaataatatgtgtttgggcaagttaagaagaaaccaatttacctttgtgaagaccaccttttcttgtagagttgtgctattatacagcttcttgacctagaattttcccttgtaaccaacgactacatttaggggtgcacatgggctgggttaaaggtattttaataggccaactcaatgattgcggtttggataagctataaatcattcaatttttttattgtacaacccaaccctacttagtacaataatatagggggtgggttgggttcattgggttgagatgaatattttaaactttaatatttatgttacaaacaggataaaattattcaacctagtgcatacacataaaagcgatacatatgtgtatgtgtgtgtgtgtaatatagtacttttaaaaaaattaagatagtagtggtattattgtatgagtagcaaaattaataatagtgattgattctcacattaggcttgttggtagaagtagtaggataactatacactacatgttagtgatgtgttttggttaattcacgttctaaggttatcacaatataatttttttatttatgaaaacgtaaaatgtatatttgtatatattttgtgaatataaaatatattttatgtataaaagttgtcttaaatttggaacatctttcaaaaatgagtttgtttgggttacatagagttaaaatgtgtcaaacacataaccaacccataattatatggcctatcacttttcaacccaatgagccatgacctactcttaacataactctttactataaaaaataaattgggttggtcgggttgaatggtttgacccatattttatgcacccctaagtacaatatcttctaagttgaaactccgaatattacagagcttgcgcaataccaactcgaatcagccttgagttggtactcgtaaaagtcttacttgttattacctataagttatgaacacacttcacccaaatgagattttgtttttctgaaataatgaatttgctaaaatggctctattctatttaaaactgtcttcgaaacaaattctaccttcctttggaaggtaaattttgttccaagaagcaagatgtacctttgataattttttgttgattaattttaactaagaaaacttattgattctttaacttttattctcttaaacataaaaacataaaaaatattgtaagtgcccgtttttttttgggtctgttgcagttatatgcattttaactaacttttgtttctaactaccacatttcaaattcccaatctccctccctgtatacacgcctccaccaactgcttttctgggttcttctccagtaatcttctcttcccttctcttcttttttcttttttcttgctccatcgttgttcattatctgtgatggactctctttcacactcaatacattccaccctttcacttacagaggaagaaagttctttgtttgctttctctgaggatgttgcaccaccattaccacaatcaacatgccacattctgttggctactgttatttcagagaattatgtgcataaacccactttcatagatcaaatgcaaggccactggaagggtcgttttcatgtggaaatatcagattatggagaggatatgttcaaggttgtattccattgtgcaggagataaaatcagagtccttaataaggagccttggcatttccaaaatcaccttattgtgatgcacaattgctctgcagaatatctctaagaaagattttaattttgtaccattctgggtgcaaatttaccgattgcctttcttaagcaagtctaaacctttggctgcaactttgggaaatctcattggtgaattcatagatgttcacgaagactctttggacgaagggtggggtccttttctccgcataagggtcaaaattcatgttaacaagccacttccaagagggcgcatgatcagtttaccgaaagtaagagatgagttttgggtcgactttagatatgagcgtctcccggaattttgcttcgaatgtgggttacttggacatccctttgagaagtgtactgcttttatggaaagaatgaattcgggaaatgatgacgatttaccttttggaccttggatgaagggtgccaaacttccatcaacgggctatgacaaatatcgtactgatttttctaaaggaaatgcgtggcctctcttaacccgcttggcacgatcatcgattacgtctacacttccccgactgaaaaatcttgcacaacctcagcctggtgttttgttacatggtgaatcctctacgcctcttgctcctattcatcaatcctttcacactcatactactgcaatgcctcctgtaacccatactactgtaaacccatccaaccatacaccatcagccaccaaatattacaactatgtacactacaaacaccaccagtaccccactacccaccaatagcaacaactcccttaaagccattaatctctctcacatttatactcctgatgtgggaaatgtttccagaccttttatgccatttgctacatacccaccaacaactttctcactttcaccacacacactttctactgcctctaccccaactttgtctactgctatcaacaccttttcaaacactaaaccgaccgtttattccacagcaccagtagcagcccactcacgtaatttttcatcaaaaggcaaggaaaacacaccacctgctaattcacctaaaagacacaatgactcacctaccttgaggcaattcttaaaaaggtgccgtaaccaaaactcaacatcctttgctgacaatctgtcccaaggcgaaggttcaagctagggctgtacatcggtcggtttagtcggtttatactatatattttccaacccgacataaagatcgggttataaaattctacatgcaaactgcccaatttaaaaaaaaaattctggacccgac

SEQ ID NO: 297749 - DNA, 2100 bp, Cannabis indica
tttttaaaaaaaaaaaacgatgacgtgaattcaattgggaactatttgtgaattatgagtataattggttgaaaaaataaagagtgaattaaatccaaagattttgttgaatgaaattgatctatgagaatactcaccaaaagtagttcattcttagatggaatcatggtgtaagaaaatgtttatgatgattacatttttattagttttgcttgtaatattagtcagactcatatatcatatctacctatatatctcattttctaatttacattaaacactttaattggagggtgcatgcatattaattcatataaatgatgtgaaattgtgtcttaatttatccaaaagaagtactattctatttctctcacacttacaggtgggttgcagaaaagaaaagtatgctctacggcatccatatatctaattaataaaatcaatcatggcatgaagagttttttcttttttctttttaacaagaaaaaaaaaggtatacttgaaacttgaaagtaacaacttttaatatgcaatttcatttgacaattaaggttgtgacattaattaattaattaattaaatcaactaatttagtttgcatgttttttattgtttctaatttgagtttgcatgttttttattgtttctctttatttttttatgaccaaccgtattcttatcagttacattaatttcactaaaagaaagaaaatatttttctttttttcaaataaaaaagaaaacattcatagattaaacttaaattaaacttctcgatgattacataaaaattttctcattatataagatatatccaccatgtcatacctcttgtaggtgaaaggccattttgtcacattatgggtccaaaaataataaattcttacaatcttaaaaaaaaaaatacaaccaacaaaaaagaaggaaagttttttacaaaagttagcataattattaatcttccatctagcacaagcactattaaggactcgtttggtagactgtataaaagttatattgtattaaataataaataactctatttttggataaaataatgtattgtgttaattattactactaaaaattttaatacaatttaagttgtattatttaatacataacaaattgtctctattagcttgtattataatatttacaaaagatttgaggtcaacctcaatctccgacccaaaaccaggaacccagacccagacccagacccagactcgggaccccagattctgactcaaactcggacctcggactcgaaccctaaaatccagaccccaaccttggacctagacccaaacccgaacccgacttggattcggtgttggggtcgagtttattaaaaatatattgtaactttacacaacatattaatataatacaattcaatacaatacaatacgacgtactaaacgaaccccaaaagtcttgataaccacactagagctacttttcacaattacaaaatggtggccacgctccactgccattttcaaagccaaacaacaggttgcggcctcatcatagaggggaccagaaaaacatagtctcttagtaatcactaattaaaaaaacaaaaggaggaactagatcatattgaaacactaagtaaagaataagaagatgatctccaataagattaatatcaaataatcaatgtagataagataaaatcaatacatcatcttgtcctatgcagataagatcatggctcattggtgaaatttggaaagaaaaaaaaaagattgattatgcaatccaaacaacacaacaagatctcaaactcccgagctgagacccaacaaccaccaacaaattcaaatcaaaataattaataatacaatagtacaggagaaaaagactcactttaggtctcagatttgagatttgagccgtaattgaatttttaatccctatagtaaagaaaggaaggggaatccctcgacttcaatggatcggtacaattagaagctgaagaatgtgagttcctagacattgattcagatgaagagagctccagctccgacttgtcgtatatagatacatatatagattaaagatatgagagagatagagatagatcaacat

SEQ ID NO: 297750 - DNA, 4240 bp, Cannabis indica
tcagttatgaaccgaagtaaaacctttttttgcttcgattcatgactgaagcaaaaaaacatttagggtcagttcgaaattgaagcaaaaaaaattaatatttgcgtctacataacgtcagttacacaaactgaagcaaactgtttatgtgtcactttaaaaccaaagaaaaatgcccttttgtagtagtggataatactcccaccttttatgccaagcaatattggagaaaaaaaactagcctaaaaataactgaacatacaaggctcccaacttctgagccttcaccctcgtctcaagaagcccaactaaactgaccttatgattagagatcaagagcttgacctcattctattttttttagctattgagcccctcgacattccatgttaatattttatccattaagtaaaggaggagctccccctccttcaatgttatcctctgtatctagtgccttgggagaccttcagcaacctctttaacttttgatcattccccttttgtatcaacgagcgtttggaagctatttacaactttagtaacttgtatttgagctttctctttcagtttcaagtcctctgtttacttgttggaagccatccttatccacctcttgttgctgtaaattatcacatttggattctttttcttcaccacccattgctagcttcatcccctcttttttccgacactctatagtcttatggcccaaacccttacaatgtttgcaagctattggcatccgttcatagtttacactcactttaatgttttgaccatattcattatgatatcaataaggtctgaaaattcttgttcaaaatcaacttcaatcataacccgagcaaaattaagtttctctcgatttttcgtagccaggtctgccattaaaggtttccccaattaactaataatctttgaaaggaatcgttcaccccaatatttatttctaaatcctagagctggacccaaataggaactcgagaaacatcctcttttacaaaatttgtgttggagtcccatggcttcagtacgattggcttcctataaaaaaactgtatcctcccttcaaaacttcatctcgctcccttgttattataaatctgattataaagatccctggggctattaatccaactcgatcatatcctttctcactccacatacaccgagcaaaaccatctagtatatgtgatagaggattggttcccaaaacagaactaacaattaatgaactcaaaaattctacctcctccactatatcatccatttctatcttaattttcctcaacttaggactttccactatccccaatcgcctcatcattcttattgaatttagcacacaaattttgaataattgaagcagatctttaaacaagaatacaaggattggtaattctatggcctttttggtggcaaagattgcacgaaggtgataggtgatagatcaggtggtgtcagtgccttcctaaagggataactaacgagcctgacatagccatggacgacatgctttcaagaactcataacctttcggttcacgatgaagagtgggtgggaaattaataaagatgggggtgctgaggttgggaagttgtgtgcaattggacatctgttctctaatcgttcaatgaggcgctctttgttgaagacgattcttgccgagtataggggatttgagacaggagttcgggagttgagataaaactcatcactaaggactcaatgttcttagtcttctcctttaaattaacttaagacttgaacagaattttatccaagaatccttggtttctcaaaaatggtactctaatcttggaaggaatggatatgattccactcaattgggatattgtattaactagatttccgattagtgggtgtattcttcatctccccctcgttcaattacccaaagaaatgtggattgtatggcgagcttggcaggggacattatcgaggtttagaaggctaatattccaaaaattgtggcaaaagaattccttaccttcaaagtatggttttacatttttaaacctctttgtccggggtttcttttcccttgcgatggtcgcaagatttggctcctttcaggtacgatcccttaccctttatgtgctttaattgtggtcggttggggcatgaggctcgggtgagttcggagccaattcaaacaatggaagatgtcatgggaatagaatgccaagctttgggacttggcttaaagttaaggataaattagactccccctcatctttgaaacatgatttcgttgatatagataacccccatgttttgtctaaatttggttccaagtaatacaagaattggtcattctttatggccttttttggttggcaaagattgcacggaggtgatagagtaggtaggtgctagtgtcgtccgttcctatgattgtggagaatgccaacattagtcttgataatgacccaagtaacaggaatcttcagcttaaacagaaagagaaagtggtggtggagctcgataatgcaggggctgttcacattgatacaaaggctgattctttgggaggttctgggtcttgtagttggtaggaaaaattcaggagcaacagggtcaatgatctaataaacaaagcaattcttggagggatgagatgttcgtgggtctttatcgtgattccaagcctaatactaccattcaaaattccatgattttgggttctattcaggatgctcctttgactactgctctcaacctggttgatgttcctataagttatgataattgtaataatcttcagacccgaagaagaaggtatgaaaaagagaagacgggttaatccgaagaaaatcaaaaaccaaatgttaccctgtacgacaatgataaatatggaaattaaaaaaataaagatggtggtatgatttcagggggaaatttgccttgttagatttaatccttaatgcatcaaaggaagcagcaaactcaaattttctgggtcaccgagcgccatgattactttatttaagaatgtccaaggtctgggaaatccttagacgttgaataccctcaattcccaggtcaaggattatcatctgagatgattttcttgtctaaaactcgtttgtctagtgccaccatggaatttgttcgggtgaagctggggtatgctgtctgttttaccatggatgctaagggtaaaagtggtggtttggcgctcctttggtctgatactttcaatgtccaggtcaagtcctttacggtttcgcatattgatgctattgtggaaaatgatatggggttcttatggcgtttcactggcttttacgaaagtttggatccaagaggacgaataaaaagtctgaagcttctaaagagactgcaaccgatgtttaatggagcttgggtttgtagaggtgactttaatgaaattactaatcatacagaaaagaagggggcggtcctaaacctgtgtatttgatgcataatttccgtacagtgatctcgaaatgcaagctgcgtgaaatttatactaatggtggggagtttacttgctgcaatgaaagatcaaggaatctggtctttgaaaagctggacacaattctttgcaactcggattggttggataaatttcaagtaaataaagtcactctttcgaatttggtgaaattcagatcatcgtccattattactttcagctcagattgggaatggttgtaaggccatggaaaacagatggggttctcgcttccattttgaataagcttaggccgagaatgaggaatgccaaaagcttataaagaatatggggagtaagttgatgagtagccctttgcgtactctttctcagcttattaacaattgttgtaaggagctccgagtatggagtgttcaacaaaagaagatcttaatgctcgaaccaaggatctcaaggcaaagattgaggtgttgtccaaatcagtttgtcaagatgattggctaacacttcaaaaagtagaacattatcttaattgtgtaggaagaaaatagagagatttactaaaaacaaaggagtcttgcactcttgtaacaacacggggatcgaaatgttggaaattattttaccagtatcttagatctactcacaagtatgttgattaacaccctaaatatgaacttctaaaacgattataaataaacatatataaattatgagaaaccttacattgggtgcagcggaataatatgtctccttccactcggatctctaacc

SEQ ID NO: 297751 - DNA, 2841 bp, Cannabis indica
aaaaagaaaacatagagaaatgaattcttagaataccacctcacattgtcttgtgcattcctttatatttatatatagatttatacctcaacaagttatgatgatatcattattatatatcttactttaggtgagtttgcatttgatgaaagattttaacttatttttttgtatgcataattacggtctaaatctaatacgaacataaatattgttgtcaaattcatgaaatatttgcttttgcatgtttataatataaatgaaattggttagttcgattttactattataggttgttatgttcttgttttcaacaaaccgtcagaatattaattaatggttttgttacagttagttaagttctctatagtgtataaataatcagtgtactcatttacttcaatcaatgaaatacactgctttcttcttcatggttcatactcagtttctttgaaaatcaacttggtattagagttcacggttgtattaatggcgtccttctccttcgatgttgtagcacatcaagctgttgttccaaccacaatatttgttccacctctgcaattaaatcaaaacaactatatttttaggagatcttaagtactccctgcaatcaaagcccatgatctagaaggaattcgtctcaaccagaattgacctcaaccaaggattcgccaacctcctgaatcaacaacaatggtaagaaatcctgaattcaatatatggatgtgcttagattaattctttctgtcgtggctaatgtcaactatttctaaatctatgattggacatgtggtgaattgtgtgtctgcctctgaaatatggaccacactcgagcaattatttggaactgcatctcgagctcactaaattcatctgacgaatcaactccaatcaaccaagaaaggctctttagccattgattaataccttctcaagataaaaaatcttgcaaatggccttcgtgcacttggaaatcaaagctcagaggagcaacttattctttatgttcttgctggtcttgaaatagagtatgaatttgttgtcgtaaacttaaccttaagagaaagactcagtcttgcagaggttcaactcatgcttgagaatcatgaaatttgcatcgaagcaaatcaggcccaagctaacattgatctccatggagctacaaccaactatactcaattcaagaaaaatcaatttggccctcccaaccccaatgaaagaggtggatccaacactttttgatgtcgtggcaggacctcctatggtggaagatcaaacaatggtggtggcagaggctactcaaataacaatcgacatgtgtgtcaactttttggttgcactggtcacacagttcaaaagtgttacaaaagatttgcgatctcttacaatggtcctgatgagaacaatggcaactcaggtccgaatccaccccaagcccttgttgcttcaagtgaaactcttgatgatgatgtctggtatgtttacagtggcgcctctcaccatgtcacccaagacagtgccaatcttcaaaaataaaactcctaaaaaggcaaagaaaagattacagtaggtaatggttcttctctttctatagataatattggtaatagtactttagctgcaaaatctatatctcaaaaatattcttcatgttccagccataacaaagaatttaataagtacttccaaatttactcgtgacaataatgtcactattgaatttactcctaatttgtgttttgttaaggacaatcactcgaggatccctcttcttcagggtgctcttaaaggtggcctttatcaaatcatccttcaacttcttcacaaggttactggttcctcttcttcaagttttctagctactataaaaaagaataatcccttgtatcaagcaaacacactctccactgtcccttgtaataatactagtaatactgtgatttcctcttcttgttcaagaaactctcaacttgtaaaactatggcacaatagacttggtcatccaaataaacaagtgcttaataaagttcgcaatttcttacatatttcttctattgatatgcctatttgtcatgcctatcaatatggaaaattgtaccatttttcttttcattcttcacataacaaaactaatgcaccctttgaaatagttcacataaacctttggggatcctcccctcacccttcatctgaaggatttaaatactacatatgcttcattgatgattgtacaaaattttcttggattttccctcttactgaaaatctaaaacaaccattgttttcaaatatttcaatagctatgtagaaagacaattcaatacaaaaatcaaatccattcaagctgattgggggagagaatacagaccattaaaacctattctctatgatcttggtatcatttttagacatccatgtctccacacacatcaataacagcataggattgacagaaaacatagacacatcacttacatgggacttacactcttaagagaagcacaactacctatttctttctggtgggattcctttgtttcatctacatatctaataaacaggcttcccatacaaaaaaaaaatcaatacatatctccttataaaaacatgtttcaatctaaactagattatagcttcctaaaaacctttggttgtgtttgctttcttctccttagaccatacaacaaacataaatttaattttagaacatcaatgtgtgtctttcttaggtattgtccttctcacaaaggctatcgatgcttacaccattcaggcaaaatctgttggaaatattttaccaggatctagatttaccaacaagtatgttttattaacatc

SEQ ID NO: 297752 - DNA, 1724 bp, Cannabis indica
gagaatattgggttttttttaataacataatttgcagaaactggttcttgtacatatatataggcacagaaatgtgagtaacatataaattcttttcattaaattaatatcatcatctcggtatagacaatgtgatgtataagtatataatatttaggtcttaactgtagcttctgaaagattttaagctaaaccaatcacaatgatgtctccttcttctagattagtactatggtgtgatttcaattttaatgttattgctgtagtatggtgtgatgtttatttcttatactggttatattaagacctgtttataattcaatattatgtaatatatggtacttttttcatttattttcttgaaaatttacatttaagcttgaaaagtttatactgatttataaaaactgaatcaatgcaattcgtaattgtatgggacgatgaatcaaattggttgagcataaaaagcttgaattagattagatgagcactcatatactgtagtgtagctattgttatgtaaatagctaggaggaactcgaacatatcagaccttgtttgtaagaatttgaactgcacctgctggatttcagcagctttgatattataagctttggattgtcaataaattcatccagagttgtttctattagttcatatgaaatatagggaagaaactttaatgttaggctatagtatatctgcaagtagctaggtgatctgaggattaagctataaggtcataatgagtttgattaattctatgcacataattatattcttagcaaaatatgcattttgtgaagcttacaacataaaactttacgagattttttgaggtttcatttcactattataggttaattgattttgctgagaatagattctcgattccataattgcagattgccatttgtcactgaagtataggaggaaagtcccattttcaatacaaagaagtaagaacagaagagacaaatcttaacatcatggctagacctgcaagctccgccaccagagcagcagtagcatcgtcatctgccaccgttacaacaaccgttacgctggagaaacccgaagaatccacgtcttcttcttcttcttcttctcagccgcagactctaacaattcgccttaaccgaaagaaaaagcaagtaacttggaaagaggggactgtggacaatgagtttatgcaaaagaaaagttccaaaaagtgttgtatattccacaagcaaaagccgtttgacgaggacgacagcgatcaagaagatgaagatcaccatcttcacaacaatgacagcaagggatgttgctccaaagatcatgatcagttgtagctttctttgaattgtgtatgtagaattatatgagtgattaatttttgggattttgtttgtagatactttaattttgtacctgaaaataaattgaaaacagaaagaacaccagtcaatgactcattgctgcattgttgaacagttatatttcttatttttcaaaattctgtcagtgtcaactttttattaaatagagtttttagtaaaacactccatttaattattttattttgtatgaaatacatatttttaacttttgtttctttctttcctttcaaattctaacaataaaattaaatctacactatttaaaaaaatatatttgaaaataagactaaaaagttatagaaattaacacaaatagatatgaaagaaacattttttttt

SEQ ID NO: 297753 - DNA, 4420 bp, Cannabis indica
actgccttcaataaaatagccataactcactcaatattgatctgattgatgcaattcaaattgcattttgcagataattcaatgatatatcaagtcatggcacacactttaattgcaattctgaatctatcatcgtcgaatttcaccccaagtgagttgtaaaaataagctctgagttatctattgtgggtcccgctgggctccgaaaaatggccatcaccaccaagagctaattttcactgtaaaatcatcataaacggtcaaaaacatctaatttttatttttcttcgattttttagggtctccttcacctataaaaggagagcttccttagctcatttttcactttcagaaaactacccacaagatcagagcttctctctttagaaattttagcctctaatacttagtctttttctgtaattaccatctcgtgagaaataataacttgaagggcatgaaatccattaacaaagtcaaaatataatttatgaattttattgattgaaactaagattaaattgaaattatgctttattaagggcatgaaatccaacaaattgcatgagcacaaaaatagtggttctctcacatttaaaaattgaaatttgaaatccttttaaaatgatgaggcaaggacacctttaagccttattagcaagatcctatttacttaataagctaattaaatatgattagtccactaatgaggcctacaacaaattcttaatcaaaagtatgtgaaatgttctacccaattggggtgattggtgaagttaatgttacttgtcatctctattgacgtgataagtgcaggtacaagctgtcacttttggtgttaaaaaagggaatgtcagagagaagattgagtgtgtatatctaaatgtttatagcctcttttgtaaatgtcataccttcagggaaaaaggtctaacctttatagtatgtatggaggggacaagtctataatactattgtgacataaggaattattgcttgtaagtcttctggcccttttggcgggaatcacatttgggaggaagtgttaaaattcattcaggacgatgcttcctttctcttaaacaacaaggtcatattgctttctgagcaacatcctggtcgggacgttcctctctctccactttgcttacttgctaatgataggagcatcttcttgagaaggctcaacatatggggatcttcccaaggctagaataatccttaagttggtctatcctttgtaaatttttgtgtccatcatattgacgatacatcatcactatatttttctatgtggtggtaccacttgtccttcaaaaaattgggacaacaatgctcataccactacacagaagcctaattttatttttttaacgtgcattaattaatatttaaaacgcaattaaaaaaaattactaaaactgaccacaaccgactgtaactgaaaaatcagttatggttggttatacactatcatactgtcgggtacaatgtgttaaaataaaaagctaaaactgcctagtacaaaaaaaaaaaaaaaaaacctaaccataaccccaccccattatgctatgattaagtttcaatattttgttaataagtactctttaaccccgattcattatgttgggaataagttcacttggaagcatagctcaacctatgaacgattggattggggaattgctaatgacaagtggcttcatcattatccccaagccactcttcaccatcttaatttttatggatcggatcatagggttttcaaattagttttacttgatgatagcatgtgtaaagtgaaaaataaaagatttatttttgaaaaccattggcttactgacccttcttattttaatactgttagtaacccttggagtcattcttattctaataatcatcctttgtcaaattttctcagcaagcagaatacttgtgttaatgctattaaaactcgaaataaatcttttaatagcttaactacacgtattaataaaatagacaaaaaacttagtgacatattatcttctcttcctacttctaaggaggctttgcttgaagcttctaatcttcaatctcagttagacagtcttctttataaataagaatttttttagaaacaaagatctaaagttcattggcttagagcaggtgacaaaaacactaaattcttccacaacaaagcctcttataggaaaaaaactaaattcattagagctctcaaacttgatgatggtagcaccatttccagtcaggttgatattgagaatgaagtctgtcgctttttctccactcttttccattctcagggtagtgacagggaagctactatttactcttttcagttattagcacttagttaactgctcaacaattcaacttgttggatggtccttttgctgctgaagaagtcaaatcggctttgtttcagctttcaggagacaaagcccctggctctgatgggcttaatgcctacttttatcagaaaaattgaaataccttgggggaggatctgtatatggcaattcttgatattctcaataacaatgccaccatggaatccattaacaatactcttattgtcctcatcccgaaaagaactaatgcctcctctcttaaagattttagacctattagtctttgcacaactttgtataagattgttgctaagactatcactaataggattaagtctgttatggaggatattatttctcctactcagagtgcctttctgtctgatcgtctcatttttgacaatattttcattgctcaggaaatgatccatgccattagtcatagaaagcttggtaaaattgggtgggtgggtctcaagttggatatggaaaaagtttttgaccaagttgaatggaattttctcttggccattctcaaacaattcaactttcctgagaaaatcattaaccttattcataactgcttatcatcagtatctattcggttcaatattaatggtcatatttctaaggaaatctttccttctcgagggctaaggcaaggggatcctttgtctccctacttatttcttctttaatctgaagggcattctgctgctctttgcattcaggaaagacttggccatctcaagggtattttaattggccgttctgctcctatcatctcacatttactctttgcagatgacacacttttgtttgctaaggcttctcaaccttcctgtaacgctcttaaggcatctcttcagctttataatcaagccactggccagcaggtcaattttggtaaatcttccatccttttttctcctaacaccccttctcatgttttagattattttttacaataacctaggtctagccaataaaccctttatgtgcaagtacattggggtgcctcaatgctttggtagatctaaaaaggttagttttaattttatccttgatcgtgtcagttctcacctcaatgtttggaataataaacttttctctaaagcgggtaaagaagttcttttgaaagccatcattcaggctattccctcctatgttatatcctgttacaaaattcctgcctctatctgttagaaaattgagaagctcatggcccaattctggtggggttttcttggaaaaaactctaaacctcattggaaagcttggtccttcctttgcaactctaaattctttggggggctggctttcgttctttgattcaccacaatcaagctttgctggccaagtaagcttggagagttttcaccacacctgactctcttgctactcgtgttctcaaagctagataccttaaatattcttcctttttaaatgccagcaaaggccatttcccttttttttttcttggactagtttactttggggtagggatctccttaaggaagggcttatttggaaagttggtaatgaaaaatccatccgtattcttgaggactcttgggttccaaatctcagatttcttagatacaaagataatcaattttctccttctgataaagttaattttttcatcagtcctaatggtcactggaacatgcatcgactttctaattattttgatgatgatacggttgataatattctccaagttcctatagggggccaaataaaactgactgccttatttggaaaggagatccttctggtcttctcactgtcaaatctgcataccatcttgttaacactgcttctctgcctccttcatcatcgaacactagattttataatcgttggtggaattttttttcggaatttatgtatccctttaaaaatttaaaactttggttggagaactttttatcacatgttttctactgcttccaatctttatacaaaaaaaaaaaaagtttcttctccttcttgctcttcttgtagttgtcctttagaaattgtaactcatccactactagattgttccagggcgagac

SEQ ID NO: 297754 - DNA, 1825 bp, Cannabis indica
ctaacgatccacatgaattcatcagtgatcgattctcgttataattagtagtccttagaaagttcaatctccagagaataacaacaaacatatcagtatgattataattaggaaaatgttaaggagtacttataagtactaagtaatattattagtgtattttataatatcagtactcccatcacaatttattttaataaataattaattatgatgcgatacattataatattatatacagtgtcagacattttaagttgggtaatatatatagcaatgcttttataattatatatttgtgtgcctaccaattaaggtgggatttacttcaatattttgctacacgtgcatgtgtgtatctactcaatctacaaatgcatgtacttcaatatttttattgttttctattttaaaaacctggagttaataattatatagtcaatctagggtttctttaagtgtatgataaatatcatgatgatcatttggttgatgatggagttacttgtagcttcttatttttgtattttaattaggtaaaaagacttttgatatataaaataacaagttcaccctagtaataaaaagagccaaaaaaataaaataaaaaatctctcgactacccttttataaagtgaaaacgacataaattatcatcttcatcttttggtgttccaaagttcaatatttgtcctctaactaatgatatttgtttacagtaaatttaattattattattattattatttaagtaattaaaaaacgacaaatgagtggcatatttggcgttaaagttgcaaagcaatgtctccctcaaaaactcgtattaggacccactacaaaagcttggaatacccaccaccaccacaaccccaaccccacctttcttctcttcctttcctttaaaaaagcttaataaaagagctatcattaacaactttgagatcaactactatacaacatactccaaatctatcttcattaacgcttccttatctggcaaactaaaaactttattattattattattattattattagagaaattttaaattattatattgttattagtgtaatttaatattaaattttatttatttaataattattaaaaatgtaattactggtaaaatattatttgatggccgtagatatattactagtatagtatatggtactacactattattattatttaaatatatatgtgaattgtttttttttaaaaaaataagttcaaaagagtagggcttgacttattgctccactttagtatatatataagtgtatttcaacgtggaaagaattattacttttacagtaattagttgaatgtatacctaaatttttattgtaattcacatatatatgttgcttaaattaatatattttgcagctttcttagacttaatatgactaataattcacccttagttatgttagattagttatatcaatattataaataaataaatatatattctttattcaaaatgtctatttcatatttatatattctctcgtgtgtgtggtcaattttcactggttttgacatttggctacttactgagacatcgtcagatagaacaatatagaagaattttacaaaaaaaagagtcctcgcgtattttcttctctattatatatcttttcaattgtataacacacaaaacccagcgtgcatgtgttccattattagtcatgtcttccatttacattaaattaagtagctcttagttatacgaattagggctcgtttggaacgccgtattagatcgtattgtattgtattgtattatattgaattgtattttatgcaatattt

SEQ ID NO: 297755 - DNA, 5067 bp, Cannabis indica
ataattacataaagcatcattttttataaaaaaaattacattttcatgtttacataattttttttttatatatatatttttacgatattccataaaacaacatgaaaagaacaaaaaaactacataaaagtaatatgaaaataacatcaaaactacaacaaaaaataacatacagataacaaaaaatcaacaacaaattaacaagagtacaacataaaaagactgtattttttgtaaataaaatcaaaaaaatcgtaaaaatatttaaactttcgtaaaatcgtatttttgtaatttttttgttgtttttgtgtatttgtaaaataaccccttgaaaaaatatatataatttttaacacactattgattttagttttatctttttatttttttactaaaagtgttaaaatatataacacttctattgagatgcttttagcaattaaatattattttatcgacttcacttgtgtggcaaaaaattatttaatatataaagataagaaaattaaaattgatattatgtcaaaatttaattaatatttattttcaattttaataaaaaaaaaggcatcgtttcaaattttatcctaagtctttcatcaccttaagaaaacctgtctaaaaatgacgcattgtgattgattaacaatactgcataaaaataatatattaaaatatatgacacctaatatttaattgtaccaatagtgatattacactttgaaaagtgctaggcactattaatgtattttagcatttctctaaaagattatatatgaacaagaaatttgtagtataaatatttatttagtttgttttgttgttaagaactcaaaactcaaattttctttactcccatcatacctttttcaacagattgatttgaatcaatggtgatttaatttccttttatattatttgcagttatggatattgatgcagttggtacattcacaatgtgtcatgaggcactaaagtatttaaagaaaggaggattaggtaggagccaatgtggtggtggaataatattaaacattagtgctactttacactacacagcagcttggtatcaaattcatgtttcagcagccaaggttggttggatcatatatttacattatttgatattatgatcatgttgaatttcttaaacatttcttctactctaaattggtatatataggcagctattgatgcccttacaagaaatttggcattgggagtgggggactgattatgatatgaaggtgaatgtgatagcacctggccctattggtaatactcctggaattgataaattagcaccaaagaaaatggaaaccaatacaaatgactaccttgccgtgactaaagttggggagagttgggatgtggctatggctgctctttatcttgtttcagatgcaggttgttcatctatctcattttcttatgcaaaaccacattaattagcttaatattagcaccactattagggtcgaccctgagatttattgggtcttaggtagcaaaaaattactaggtcatttttaaaatttactaaaataaacatgtgtattttaaaatgatttttttggggttcccaaactgagtgtttttaagcgcaagtcttgttcgccttagcctaaactcaaccctgtcactgaggttgattgagatgtctgtttgggatccatctatttagatcacagacagaaagaattttacgagattattttccctagctcaattttttataaattaaatttttacacatcaattttggaatattttttttcctctaaaattaatattttacgagattgttttttatttttatataattttatttttatttttacaaaatttatatttttcatttttatacttacataatactcttttatcaattttgtttgtccccactaagaaatatggcttcaaactccataaatttcactctggttgattttttttttggtaaaacattctcttgttggttgttgatgtattggattggacttaatattgttaagatcttcacttatcacatattcacatggtgtcaaattatgaaattaagtgttgaatataagttttgggtatgtttaagtaaacctcatccatgtttttgtgatagaaactttcatttatcattttttttttcttgttttgaactatgtaggtagacacataaatggagctaacatggtggttgatggaggacaatggatgaaccgccttccgcatttaccgaaagagggagtaaaacagctttcaagagcagtggagaagaggactagagctgcatctttactcccaagaagcaaaatctaagccattcatcatagagaaagagaatatatcataaaatagatgtacctcaaatactatgcaaaagtacttctaaataagcacataactactaaagtgtttaaagaaaagattttgatgcttaaataaatttggattgtattcctctccttcttatatgttatgattttttaagcataggatacaaatttggtatgaaaaagtaattcaattaatggcatttgaagtcaactgtggcctatgctatataatttggtttgtaggctcaaatatagaaattatggctccaacattaaataaagaagacttttttcctatagatatatagttgttggcttcttaaaacttgttagagaatttatttttttttttagaagaagaaaaacaagttagagaaagtagtaataatggagtcaccatttagagctgatgttgttaaagataaggtggctctaataacaggaggagcttcaggaattggggttgaaatatcaactcagtttgggaaacatggagcttccattgtcatcatgggacgaagaaacatgtcattgactctgctatctctgctcttcgatcacttggaatttcagtactttttctgtccttacaaaatacaagtattttttctttgttaatgagttgtgtttggttggtgattatatgtatgtttatcttttgaatggaaatcttgttaaagagactatgttccattaatctaatctaaggttggccttaacaaaatttcatcctagaataagggcagaacttgagttgttctatcaatttttgggtgttaggctgttggttttcaaggagatgttcgtaagcaagaagatgcaaaaaagagttttggagtcaacttttgagcattttgataaaattgacattcttgtcgattcagccggcggaaacttccttgctttatcagaagatttgtcccctaacggatttcgaacaggttggttgatgataaaggccacaattaatctccaacataaaatttaatgttgtggatgtgttgatcaaactgtccacataaaatgttcgtactgcatcacaccgtataaataatgtgatttgaaatcttttacattgcgattgtagtttacaattttgtcaaatcacgcgaccaagtccagttagcagttttgaattgaataattgcagaatatattataaagacactaattttttattatttttttcatataagaatatgtgttaaaactttaataattttttttgtttttgtattgttaaaactttattagattgatttttgaatttttattataatgatgatagtgtaaactactcaaactgcaccgtatttttgtggtgtagtttttatgtttttaagatcttacagtacggttgtggtttgaaaaattacatatgcagtttgatttgactttttctaataagaaatattaatttgtcataatttactccaaatgtgtcccatgaaataccatatgactcctttacaaatttgtattttggatttgaataaagagaatgattacataagaatatcccttttgattatggtttgcagttatggacattgattcagttggtacattcataatgtgccatgaagcactaaagtatctaaagaaaggaggattaggaaggagccaatgtggtggtggaataatattaaacattagtgctgctttacactatacagctgcttggtttcaaattcatgtttctgcagccaaggttggttggttggtctcatatattttcaatctcatatatatgtacatatgatttacatactgaatttctcctaatgcataggctgctcttgatgccataacaagaaatttggccttggagtgggggactgattatgatatgaaggttaatgggattgcaccaggtccaattgctgacactcctaaaatgaatgaactcataccaaaacaagagatggaaacaaaaacaagtgactaccttcctgtcactaaatttggggagacttgggatgttgctatggctgctctttatcttgtttctgatgcaggttggtcatctaattatcaactgaggttgaggtttagtgtggttgggatgcctgtctgattcattgggttgttgttgcattggattggacttaatattgtcaagatttaacttatgacattggtgacaagttaagacattgaatgttgaagatgggttttgattttgcaagtatattacaaaagtctaagctgaaattgataatgtaaagtttatcaatgttttttgtgaagtagaaaactttcatttctttttattgctttgaacagtgtaggtaaacacattaatggagctaatatggtggtcgatggaggattatggctgagccgcccccctcatttaccgaaagagtttgttaagcaactttcaagagcagtggagaagaagaagtctggtgcagctgcaccattatgcccaaggagcaaaatctgattagaaaatatttatacatatgatgcaaaatatcaataattaaaatcggaataaattaatgaagaaatgtaacgaaataaatgaaaaataatcggaatcaatatttgcaatatgttgtttactaaaattttttaaaaatagaatgatttatcttgtttactttattaggaaacgtaatcggaatgcttaaattgactaaattgcccttttgagttaaagacatatttaatagttattttgcaagacatattttaaagagcaaaattgtcattatatatttaa

SEQ ID NO: 297756 - DNA, 2298 bp, Cannabis indica
tttatttagggcataaaacgcaacatttactccggtagcttgatgcttaaggcagtccgctacaaaatcttggccttcactagctgcagtagcaaaatgattcgccacaaatggagctagatcagtgccaacctttggcttgagcctttttacaatatttggacggtcgaaaacttgaaggtaagcatctggcctctttgccaaattcccaaactcagcattctgcctagttgagatcatggtggcccgtttccttacttcagtagcgtccacattataatttttgtggaagaatttgttggacgtgtccagttgggcacggtcttgttcaaatattaccgatggtcaaatgggcaagatcattctcaaaatttgaagtgttggaaggtttgtcttatccttttgcatttgggaaatagaagcaaaggacgacttttgttgttgggactagggtccataatttctttattacaacataagttctgcctaattgatctctcagtttcctaagatcccccttctttatgcccagatggttccaagtcctgcttttggctagcaaccagttgttgaagtttatccattggcttctgccctactccttttgttgtctccactaagggcagagatgaatcttttaaggtttcagaacacaagaccttcttcttcctcttcctcttcctccacgtcaagaacaactggcacctgttgaaggggcaccactataagggcagtctcaacaagttctccttaagaaggagcatccaccgcaactgttgagggttgggatctagaagctttcgccatagtcgtggaaacttgggtgtttgggacagattccaaggccgaaacctgagaaaatagcctcttagctcatggctagaggtgtttgatccttatgaatgtacaaccttgcatttacctttatcccttggcaaccccctcacctcagaggaattctttgaaatacttcctaagaagttgtcaacaagccccatttgaagattgaattggtttttttgcaaatgaaaacacaaatattagtatcacggtagcaaaaaaaatgcatgcaattgaattcaaggaaatccttaagcaccctgtctaaaaagctcccatagtgaaagaaccctaaaaaattcatctaaagaaaggaatctatcttaacggtttgagtaggcaaaataaaatgattaagactcctaactatttcatctgtcctatagatatatcgtgccactgtgaatctacgacgatctaagttcaaaaaatatagatcaaatctgccttggtcaaatccgttagggatacttgtctaacgagattacacaagtaataaatttaaaattataaattaagaagaagtcttaatgaaataataaaagacaacggataaatatgaaaatgtctaattgagtgggagtattaaatgtactaggagtatatttaaaagaccattcaataagtgaatctatttgtaacaagttattagaatttaagattagagagctatttaataaaagaatatatatattaaagtatcatttattaaacgagaataatttttttttattaattaagtaatcttaaatattagaatcacttgagtttgtcagtgatctagagggttccatattaattaattttaaaataacgaattttgaaaaaataaatatttaatttaagaatattaaatgattaattgaaaggatgaacccaaaggaaataaaataaaaaataagctaaatatactataatcaaattttgtatatttgtccaataatgatgtggtggtctccgagatctagaactacattatgtggagagtctcgtttacatgacttagcctgaatagtcaaatgagatataacatctataagagttatagaacatagatcacttacttttagtgcaagttggaaattattgagatttataccctaaaagaaagtaattaatggataatatattacaaaatatatgaaatacaattataagataaataaattcattaattatagaattgtaattaataaatatctaaaaattccttattcatatgaagaatgtataatcttgtaaggatagacaatagaattaagattatacaatatgaataaaactagtcggttgtgtaataaagtaaaagaactcttaatatagaactaataagtacaatttactatacgctatactctagtgtgtgtgattttgattcagattcacttatgttgtgtataatttgattatgcatgaactcttatttgtgttcattgagttctttgatttactcgttaa

SEQ ID NO: 297757 - DNA, 984 bp, Cannabis indica
agaaatgtgtagcacttttcatcatatcatacttcaaaaattgcaaattaataaactcaataacatcatactaatccctaacagaaaataaatggatggcctttccattattacagaacagctcgccgggctgcatttcccaaccggcctcttcttatgttagcacgacgtttcttgtagaccaagccaccaaacacacccaatccagctgccgccaacactcctatcgctatccccgccttctttccaccgcttaaccctcctgcccctgatactggagacggcggcggtggaggaggagccgttgacggaactcctcttgctggtggcccgggcggtgcagaaggtggtggagtagatggtggtgacgatggtggtggagtagatggtggcgacgatggtggtggcgtaggtggcgatgatggtggtggtggcgacgatggtggtggcgtaggtggcgatgatggtggcgacgatggtggtggagtagatggtggtgacgatggtggtggcgtaggtggcgatgatggtggcgacgatggtggtggcgtagatggtggcggcgatggtggcgtagatggtggcggcgtaaatggtggtggtggcggcggagatggtggaggtgctgtatgaactggtaaggttagtagtactgaaaagttaacaaagagaaacaaggttagtagtaagggcctcatgacttattgtatatgacagttgagacaatgcgtatatatgtacacaaaatattattatgatttcaaggctcactaatgaggctcactcaataaaattaaaagtctatatatattatgtgtatcgatatatgtttatagaaatattagacggagatatctatagttggtaaaataaaactattagatgaataatcaagaaagtacatagtattaaacgctatggatatggacatttattacctatatatgatgtgaatatttaaatgaattattaagtacttgaaaa

SEQ ID NO: 297758 - DNA, 2650 bp, Cannabis indica
aaaaggttattagattattaccttcttattttttttagtttcacatcaatgggtattacccattaagaagtgttcctatatatatatgtttaaaaatttgttgagggtaactttgttttttaaaattttcaaaattttggtaatcaattttaaaattaaaaagtgaaaaaaatttacaaaacatgttttgaaaatatttctacttttttaattaaaaaaatataaaacagattaaaatataagtctttctccaaaaaaaaaaaaacaatatatatgtttttaaaataatattaaattaattttacaataaattaaaacggctaaaaagacaccaaaagtaaccaacaataccaaaccacaaatatcgtatttttattgttgtaatttaatattgaatcctacattaatcaatagtaatcaatgggaagacatcaccttgtaatagtgttaaacactaatagtatcatttagcaatgatatatttatcattaattttaataaatataattttacaaactatatttttaaaattaatcaaataagaaaatattttttttttcatactccactatggctttctggtgttctaattttatttattgagtttgcgtttgataagttgtagaaagaaaatgagttaaaattgatgattgagctctttaaccattgctccattttaagcctcatgcacttgtccacactcccgtattaactagggctaaacgtcggataggttttaagttagcgagttttagacttaagaaaataacattcgtacctctcataaaatggatacgagtttgcgagtttcaagttcacaagtggctaggtcatgaatagttgagtccatcagattggttggttgacttctattttatttatttatttttaaaaaaataacctccattttctccttttctcatcgcaatcccaaatcttaatcattatttacaataatatttttttttaaaacaataaaaaataaaatgacatgcatgtacaaagagggtttccccattgcaatcccaaatctcaatcacatatttacataaataatcatcttcctaaacccatttgaatcatatatattcttattcttttttaggtacctgtagagattgtagagagacatatgagatatgagattaatatttttttcactacactattgcttacccaaaaattaatcctggtgacatggacatcaatatttgacatatgacaagaaaaaaaacattcgctaagataagtgccccaagtaatagttgttacctctaggaagggttcatagccctgggcccaggttgacttcgggaactaaagaatgggtgtctggatctctcaagttgtttcttagaaaatggaccgcgagcgagcttccaaaagaacttagacttgggagcgcgaacctacgggtccttagcttgatgtggagcggtcacctgttagagaaacaaactacgagcgagcaaaaggactcaaactcgggattgtggacctataggcacaccacacgccactaataggaccaaccacaatcatgcttgaagaaattcgagcaatggaagaaattgatcacctccgtgggattctcttcaccagtctaatgagtctaggccacttcatgaccctacaaagggaaaggggcttgctgtcaattttgggggagggacacgaaagctctaccatgaaggtggggagtatgagattcgaagggcgagcaccagcaaactactccacactcaaaaatattctatgatgcacgtggtggttggtgtaggtacttcgtctgaggtcctaatggccagcagtaagaatacatctcgtgggtgcatggagatgtgttgaacttgaggaatcagttcaattccctttacaatgtcactttgaggaagactattttgaaggaaataatcaatatattactacaagcagtcgctcatgaagcaaacaatcaagagacaactctgtcgctatacaagataaatccccacagttgtcaacaaggccacacgactaggaaacaaccataagtccaagtcaatcagcttctttgatcaagtcagaagactaaagaacctgtgaagtaaaatctgccaataacgaccaactgatacatgcatcaccacctgtgatgtaataaccgcatgattaggattagtagagaaactagcattaattatctttactttataattatatgtaaatatttatgtggtaggtttcattttcaaaaatgggtattagagttataatttctcaattctggagattttattaagctctaactgtattatgtatactatatgtgaaatttttaatttttataattttgctcgttaatgatggaaaatacaatggatggtcattagattcatatgggtgagtttcaaaccttctatttagtggggctagcataggtgatatcttggaatatcgggtttaggcgggattatagttttggactattttacctgtagacctatagagtatttaagttggaagtgaggggtaatcttggaattttttcccttagttattattaatattctgattattattatgttttaagataaagatttgttttattagtaaaatcatttttgaaggataaacaaaagaaaaaaaattcaagctctctctctctctc

SEQ ID NO: 297759 - DNA, 2262 bp, Cannabis indica
ttatttttttaaaactgaaaacacaagtagcaaatcacacgacatgctaaattaaatagaaaatactaatgttcacttaaaataataaataaataaatattaatatttcaaaaaaaaaaacaccaatctaaaatatcaataaataaaaagtaaaaatgtcaatgttggtaaatattgtaactgtttatcaaatttttcagaaactaataaaatataataaaactaaagaaatataataaacgaacaatgaaaccgtagttcaagaattaatgaactttagtagacgagtcgatatcattatgataacagtggaaaatccttatgaattatgcaaatatttgaacgctaaaatttacctaagcactcaaggaataaaattctaaccttttgcaaaaatgagttttcttatatttgtagtgctagggttctagtatgtacaccttgcccactcgtgagataaatacaaatattaaaatgactttggactcatctcataaagcccaacccacgaggtattgatctttcgctgatgtgaaagtcattgatagttatcaaatagtactgtcctacctttgtggataataaaaatacattaatgcttgattactaattactttgtttctatattctaaagatattattcttggacacaatcctaggaattaagtcctgacattgtgggatttgataatcaattaattaattaatgttatatggatctagatatctgaatgcccatcaatcatttatctagaagatctaatttgatgccatccagagatacaatgtgttggaggtgtatcttgtcttgacgagccatttgtccaacatccataaggcttgacttcgctaataaatccagtctattatcttggttgggcctgcgattgggcctgaaataactgagttgaaaccaacttggtttctggttgataacttcttgctttttgaaatgaagtggcattatttctttgactcatgaaagtcacgcttacgaggaaggatgcgtgttgcgtagaattttgaaatgatgattgattaaattagtgaatatcttgaggagaatattgtgatgaggatacctagtttccaagcgatgcattaaatgcaaaactggtcgtttttctagatcattggatgtacaatatgttttcttggatatcgacttagcccttggtctgagttcacgcggatcaccatctttgttgtataaatacagtaaaattttcccatttactacttttgcccaaattttatttgagtttgaatttttagagagagaaaaatcaaaaatcttcttttttgaattcatgagcgagaatacccaagagcaccacctcagtcttaactattgattcttctataccatcagaactattggatctttaaggggagatcaaagcactcatcaacaaagcttgctcccttcagactaggcttgtatgacttgacgaatgttgatggtgaaaacttgtcaactaacttaaggtcaaaaaattaaaactcaaacactagacttagactgaagatgaagaggtgaaaattcaaaaacttgaagaaatattcagagcaataatggaggaagataatgcttgaatttgtaggcatgaagtgttacaatgattttccaaccccgtctcacatttgagaataaggtatttataggctctaatggcttggggtacaattgtggtcccgagggacaagatgacatccatgagctgcaggtttcaagttgtagatggtggtcttgtgttagggtttatgtcctgaaaagtctataaagaaatttctaattattaataaagagttgaacattttgatatatgcttgaatattaaattattaatatttattattgaataatttatatataaatatcagaaaattccttactcatatatatgaagttgtggcttgtagctgtacaaagaactaagagcacttagctatgaataaaacagtcagcaacatattaaaattatggaatctttaatcaatggttgctagtacagttcactgatgcctgttcttcggtgcaagtaatctcggttcatatcataactatgatcaatagtcgatcggtttaacctgagtaatcatgaactcctgttcatgttatttgtaataaccgcgtgattacattatggattagtagggcgattagcattaattactgatattttatgattatgcatgattttatatttattgtgggtcccatttttagaaaattggcattgtaagcccaagttcttgtct

SEQ ID NO: 297760 - DNA, 2355 bp, Cannabis indica
accgaattttgggtataacagaaagatttgaaagaggaatgtttccacacagaacgggccctaggacattctagtaaggcatgagaaactgtctccacccttcctttacagaaatgacaatagggatcgttaatggattttttatggtaaaggtttagggaacaaggcaagatatggtggaaagctcttcaagtgaagtgcttaatttttccagggatctgaagattccaaagagtttcctccaaggtgtaagagatctagggtttgaggtggaggggtaatccatattagcaagagaataggcataatggtaggcagagttgacagtaagaatacctgaaggatgatgtcgccatatgagacagtcttggaagcaagggtcaatgggaatttggatgacaacattggcatgataagatggaagataagtgaataatttctctaaattccaggtgtgatctggctacaggaagaaagagacagtatgcccttcagggttgagatcttgaagaaaggttggacggttaatggtgggaatcaagttatgggcagagagggggatattattcccattaccaattttccaaacaaggcctttgcaaaggaggtctctaccccaaagaaggcttcttcaggtgatggaagaattatgacctttgggagcgtttaagaaatcagagtgcttaaagtatctagcttttaggagtgagtgaaggaggcagttagggttggtccaaattctccaagcctgcttggcaagaagtgcttggttgtgattagtgagagatttgaaacccaggccccaaaaaacttggaagaagtaacaacagaccatttcttccaatggatcttgtttttttccaaaagcagacccccaccaaaatctagagatcaatctttgaatggtttgagaagtagctttagggattttaaagcagaacatggcaaaggatgaaattgcttggacgactgctttaatgagagtctccttatcagctttggaaaaaaaattatcattccaaacattcattttagaggagacattttggatgagataatgaaaaacaaagtttcttacacgaccaacacaaatacttactaaatgaaaccatcattggtgagaccaagagaattcctgaaatggagctgggcctccgcagaagtattaggagaaaaaaggacagagaatttgctcaagttgacaagctggccaatggcagtgtgatatgtattaatggcctaatgacaaagttgatttggtggtaatgtcatatcgaactctcccaaactctctaccaattacctaactctattatagaatttcataatctctttatgaactaagtgagttttgaacaactaaaatctcttctgctttttattagggaaacttacaaaaatactagaatttgagttaacttttacaaaaatactgtcacacggaaattttttcaaaaatactgtgtttttataaaacaccagtaaaacacaaagcagaacaactcaaaacaacagtagaacactagtaaaacaccagtagaacaccagtaaaaacttaacatagtatactgcagtatgaaacttataaaaaacacagtaaaaaagtaaaaataccgcctgacagtatttttataaaaaaatggcaaaagttagtatactatgtaaatttcccttttattattccttaaaaaaatttcagcattttaaggcccaagctttaccttcacttcagctgaaatggtgattgtgaaataatattttgttttgtacgattatgtattaatgtatatagattttgattataaaattttatctaaaattaaatattaatagtactctctatagtaaatatgagggtaatggtcttttttttttttgtttttttttttttttttttttctgaaataagtgatctggacattattgatgcatatgtagacattttttcttgttattattcttttgtgaagtcactaattacagaaaaaaaaaagcttacttaattttaagaaaaaatattttccagtgaatgttttaagtggaaataatttaaaatttaaattaggattcaaaacacaaccaaagatctcaaatttcatggtttaaactttctagttgagaaactcaaatgatgaatagaaaatatacctcatctttttctttctttttttttttaaatttttttttatgaatacatcttctctatcttttaaaacttgaagattttattttgatttgtgttcttgggggtaggggtgttcattggatcacatccaatgtttttagggttatccagatccgatccaatcatatattggatgttagattttaccatccgatccgatccaattaatt

SEQ ID NO: 297761 - DNA, 1597 bp, Cannabis indica
ttttagtggttaagtgttacaaaccgtaaagttcaggtggtttagccgccaatatccctaatttttatattatcattattgtttgttaactttataaaacatctccaattagtagagtaccaaaggtacacggtgtcagtatgcattgttatataatattagcattttttcttataccatataataaaaaaaaatgtgtaaaatttgagatttactatgatttttaattgatgattactaatattaatttgaattatgtgtattgtaaaattgagctaaatataataacagtatattattatgattagtaatattaatttaaatttttgtgtattgtaaaagttttgaaaattttatggttcaaaattaaaagtttttgtgtattgtataaaattttgaaaaatttattgttctaaattaaaagtttaaaaatatgttttttttagtatagcgtaatagtattttacaatcaattaataatagctttatagcatcttgagttcaaactccctcccttgtcactaaactaactttagtggcttgtttaaaaatatgttcgtgatataaagtatcaggttgtagttttcgagttagtgccaaactttcaaacaatgtcaatctcctggtaagaatactcctaattgtaatttattttcatttatttttgtaaaatgtaaaataattttacatatttatactaattagataatactaacaatttactaattaggctttataccactttcatgtaacaatttgtacacatgcatatctagtttcaaccatcttaaagacaaaaaattgcaagatttttaattataataaacaatacttaaaataagatcatctctttcactgatcatagatacccaaaagaagataagctaagctagctaacatagactcacacccatatacattatatacatatatatttatataatatgcaatgtatctatacatatatagagaaattaagtagttagtactgatgtcttatcattaattccatgtgtagagaacattaatcaacaatcaagatgaatgaaattaagagttgattttcccatatgttttatcattgattttcatgtgtcatatttttcttccacgtctctcctcattttttggattaattagcggaggtagctaagtatgaattctcaattgaaatattttaatttacacaagaaaatgattgaaggcaaatataatttatatttatatatatgtactatacatgatattgatatatatgaacataacgaacttgactcttctgcaactactgttactgagattaccacttttgactagcgttttaattatatataaatatgtgtatataatacacgttatataaggttacgagcatacatatatagggagtatatatctgtgttgtggatcttctaattaattattaaaaatcaagtattatttatagtaaattaaaccttaattaacatagaggagtgttaccgtcaacgtcctgttacaatgtcttagtcaacttctacgttcgaaaatatatgttggtatatttttttttcatttttttttttcacgggagtgttcgttatgcttacaacatcat

SEQ ID NO: 297762 - DNA, 5765 bp, Cannabis indica
ctggttttcatataataacattttatttcaataaaaaaagatttttttttaaatactacattttacattgaaatatttgtatgtatatatttttcaaaaaatatatgttttaatatgtgtaaattagattggatcgattacttttatatgttaattaatattcaatttgtacaaatacgaattttaaaattttcaattgaatccaatttgtataaatgtgaatatctatattttgtgaattagattgaaacattgatttttggggaagttaagtttggctttggccacaccccaaaccgtgtctaaagacttttccttagcaacaccaccacacataacatagagcagttgacttgactagcatctgatgaatttaccatgataccctttaaggtcatgtcagttttgtaatttggcaaaacctttctcatatctttcaagttcaggaatttgtaatcagtctctttttctattttcctttgttcaaaagtgacatctttagaagaagaagaacagaaaaggttcagagaataatttgaataattctgatcacattctctagcaaaacccaaactgtaagtttaacccacttttttttttccctttattaattctggatgtggattttgctagcttagttgaaatttatatccattgatatgattgtattagtgtctactgaaacttcagggttcaaatttgacaggaaattaagcaaacaaaaaacccttttctataccctgttttggattctactcaactcaactcaattattattattattattattattaaaaatcatacttatgaaaataattttgaactttgggtgattttgaaacttgaaagcctcctatttctatttctattactatttatgtcgggttagcatgattatgattagtttaagtttttcgttttaactaaaaataagaaagcccctttccaaatgagcatttccataaagactgcagtagaagaatttaacttagtaatgtgaccaaattagcaaaagggtatatttgaatttcatgtgtttgtatcagaatggagtattttagaatttattattattttccaaggaagggaaaacactgaatgtgttactttttctcttttctattagatatcttcaaagtcaaagacatggttgatgctgttgtgtctgtgttcttagaaaaactgcttgaagctctatccgaggggagtcgggttttgatcgaattcagggatcaattcgaaactctacagaatgagcttcagttaatgcaatgctttctcaaagatgcagagaggctcaaaagaaaaaaccaaacacttcgcctaatcatggtgaacttgagagagcatatttatcaagctgaagacatgcttgctgattgtcaactccaatcaatggataatgattcttcattgtctagtggttggttgatgtgtttcaatccttcaaagattccattgcagtatcaaactggaaagcgcctcgaggaaatgattgagaagatttttgaaatcaagaagaacatttcaacttatcttggagtgccaattttgagccaaccagggaattatggtccacacgatgaccaaataccaagatggagctctcctgtttatgatcataccaaagttgttggtttagaaggtgatactaagaagttaaagaactggcttttggaaggtgacaaggaaattttggcaattggggttgtggggatgggaggattgggtaaaacaactattgctcagacagtgtttaatgagagggaaatggaggattatttcgaaaggagaatatgggtttcggtttctcaaacattcactgaagaacaaatcatgagaagcatattgaggaacttgggagatgctagcattggtgatgatgcagggcaactgttgaggaagataaaccagtatcttttggggaagagatttttaattgtgatggatgatgtttgggatggtgatattggttggtggagtagaatatatgaagggttaccaaaagggaatggaagctgtgttattattactacaaggattactgaagttgcacaaaagatggctgtgaaagaatcaagaatgcatagaccaaagtgccttaataagcattacagttggcttctgtttcgaaatgtagcatttgcagctcatggaggggtgtgcaaatatccagaattggagggtgttggagaagaaattgttgacaagtgtaggggtcttcctttagcaatcaaggcagttggaggaattatgctttgtaaaccaccgcgttaccctgaatggaagcgaattgcagatcattttcgagatgagttagctgagaatgataactctgtcatggcttcactccaattgagctatgatgaacttccatcttacctcaaatcttgctttctctgcttgtctctttatcctgaggattgtgtcataacaaaggatcagttggtacattggtggattggagaaggttttgtgccactgagatgtggaagatcagctactgaagccggtgaggattgttttgcgggattaacaaatcggtgtttgcttgaagtggttgacaaaacttattacgaggcgatagacagttgtaaggttcatgatatggttcgtgatttggtcattgatattgcgaaaaaagatgcattttcgggccaagattattcgagtacgcgccatttaagcattgatacccccatagcaaacaagcagttgaccgccaattcgaagctacgagcattgctgtccacaaccaaaaccggggaagtgaacaagattgctttaaacatagcaaggaagttctgtgattctcactacttaagagccattgatctttcaagatcaatctttgaaacccctctaaaaggtctgctaagtcaagttggatctctccaacacttgacttatctcggcctaagcaacactcacccgttagttctacttccaccatcattggaaaagcttcaaaatctgcagattttagatgtaagctactgtcaaaaacctgaaatctatccctacatacatagtcacattcaagaaactgagggtgttagacgcgagccactgtggttcactcgatttcctgcctaaagggttaggaagactgtcacagctcgaagtgttactaggtttcaaacccgcgaaatctaaccagctagaaggatgtcgcattggagagttgaaaaacttaatgagactaaggaaactcgggcttcaactcactcgtggagacgagattgcagacaccgaagtccattcgatggtgaaactaccagagctgcagcatctgtcaataagttgtttcgacagtcacggtgatgatatcatagcgaaactagacaagttctttcctcctgaacagcttcatgagctgagtctcaaattctatccaggaaagattagtccaatgtggctaaaccccatttcactccccatgttaaggtacctctcaatatgttctggcaatctttgtaagatgaacagaggattttggggtgatgacaacacttctgtttggagaattgagggactgttgttggagtctctctctgattttgaagaagaatggtcaaaggtgaagcaagttatgccatcactaagggttgttagtggcagttggtgccctgaattggtgtcttttcctattcaagatattgggtttaggggtggagtttggaagaaagaagagccagaaaatttgtgattattttttcaacaacaaattacaactagtttattcatatttcttttggtacaaaataaatataataaacaatcaaaatctttcaattagtaacacacagtttcatgaatgcataattttatttgcactagttcgtttttgatcaaggaataatcagatgttgtttggattaaaacctgtgaagaagtatttgaagcatgaaccaccagttttgatatctatgcctctaatgctaattatatttgtgtaactaaaaattcagggcaaaaaaatacgtgtagtgaaaactttgatgttttcattaatcattttttttggtatggaatgcatgaaataagacttaacgaatttctaaaaaaaattatctttctccaaaatggaaacttaaccttcaaattctatcgtcaatgcataagagattaccgatataatatatatcatagttttgggtgattagaattgtagaaattttgtccaaactgagcatgaaatcttagtaaaactaagtaagttgcatccttgagacttgagaggcacttaagggatgggagctcttaaggcatatttgcttatggcccaatgaagggaatgctatgtatgaatttcctataggctacaggtagcatgtgatttttgggattgtcgaaggcaggagtaaagtcatagtatataaaatgagaattgctaaaagatattattggtacttaacatattcttcggtgtcataccgctatcagtataattaagtatctgatcctatataattttaaaaaatattattaactaatcatagagcgctacctataaaaggtgttggacactactaatacctaataacaatgcccttataaactactgagatgagtacgaatttaaagtgcacataatatttggtgtaactttttaagtaaaaatatagtgagttccacataaatttaatgcgaataaatctaaatcataatcaacttaaaaatcattatctaataatatatatttttaaaaaaatagtatgtattttgaagtataaacatatataactacatgaattgtgttggtgtatgattgaaagtatgcaagtgacatgcatatagccttaggtaatatcttttaacttattattgttttctttttgaaaaagaacttttattgttgaaattaatatgtatatatacttcataatgatgtatgggtataataatataatatttactcattaaacaaagctttgatttgaaaatgaattatcatattatatgatgtatgattgaatatgagagtttggacatgttttgtgctcatcatatagtaaatgtattaatgttttaattaaaaagttatatatggtagtgagtgagagtgtggttctctaatgacgttgtaagttgtaacctaactaattagtaattaacccttattatttatttaattattaatagatgatgcatgcacatgaaattccaaatgcattgggtaatctactttcttttaatatatacaaataaatacatacgtagagcttttcaggatacttgtggacacactacccatcatttcaaaggtcaagcttccacaattaataaaaaaaataataaaatcaatttgtttaatgctcaattatttaaaaatttaaactgtactttatgtgtatatatattaattatatgaaatattgaaatgtacagctccactaacctaaatcaggtcactaatttccctgcccaccatgtgatgatgcatgtagtaagattttatatttataaaattttccctaaaatatataagatttgtaattggggggcatgtcacatgtgcatatgctttttttttttttgaaaaaaggcatgtgcatatgctttaattaccagtttcttttttttttttcatcataaaaagaatcaatattacctatttttttcttcaaaaaaaataaattattacctattttaaaatgtttaaatagcatcaaatataatattagtgcacttttaaaatatataagggaattatcccatatattattttttaattttttttcaaatttacggtttgggtttct

SEQ ID NO: 297763 - DNA, 3453 bp, Cannabis indica
gtggaataacttaaacaagattttatgtatttttcttgtatgcgctcatgcatcacgtttgtaagtaattctaaaatgatatttattattaaagtataatcattatgtcactttatttatttcagtcatgtctactatgagaaattctcttactgcttcactatcacttgaaaaactgaatggtgaaaattctttgaaatgaaaatctaatatgaatttgatgctagtttgtgaaaataacaaatttttcctaactgaggagcgtcgtgaggatccaactaccaatgccttaaaaaatttttgggatagatatgatgcttagattcaatccaacaataaggccaaatgttttatgactgttagcatggacaatattttgcgtaagatgcgtgaagaaatggagaatgcatctcaaataatgaattctctacaggtcgtgtttgggcagtagtctaatcaaacaaggcatgatgctactcgtagcaacatgaattgtaaaatgaagaagggtgtccctattagaattcatgtattgcacataattgagctaatgcatgaggcagagacacacgaggctatcatcgacgaaaggactcaagtgagtatgaaccttgagtcactatttccttgcttgaaagctttcaccacaaactatgtgatgaacaagctagagttcaacatgactcaattgctagagttcaaaagagtccacactcaaaattgactatgtcaaagtcttcaacaagaaactagattagacctgtgcgtaatgttccaagcagaatgtctttagcgagctaagaagaatcctccacgaagaatgatgcggtaaatttagattctttaagatattgtccttaaatatatcctcatttatagcatggttaaattcgtacatttatgtgacttattttacatataggagagtttttaagaattaatgttagtttcctatttcctttcctattattttaagaaataatattcattgtatcttccctaaaaatagtagaaccatttcacttttggagatcccgagttcatattttcgaaaaaaaacacttatgttgtcaaagactagtaagatttcataagattgttgagtaactcacttgaccagctccttgcgacctaagaatcttctaagtaatacagcaaaggagagtaaactattaccataatcacaggaacgaacctctataaattttctcgtgttcttattgctcatatatgtttattattattattattattattattattattatttcattgctttaaagactcagtgtcttgggtaaaagtgaggttatcatatattaattttccctaaaaaaaaatctaagcaattattaagagctctcacattaacttctctactctatcttttataataccttattaaaattttatttttttttattttaccttaaacatttacattataccatacattaacttttcatatgttttctatatcaattaaaaatgatttcatttaatatactttatttattataaagattaaataaataaatataataatattatttacatatttttacatatttttaaaaaaattaaaaattatataatatttattctctacgtgtagctaaacactatagtctatagaatagtacttttgtttacctcttatcttaatttttttttggctattactattttagatcttctgaaagtcctctgttaggttaaaaactagtgaaaataatttggtaggagatagtagatgctgctctgggagggggtgtgtgttaaactactctacatacagctcatcatgcaggaggggaccactgctgagcttcagtcccagctgtcacatttagctcttcaattgatgaacttttttttttattgcgttgaccaattatgaaccactctctactctattcaggtgttctgtgtgtgatagggttgtgagttgtgattgcacaatcaaaaaaaaagtgtatgtatgtcactctgatggacggctcagattgtgactgcacaatctaagtgtgtatgtcactcagatgtacggctcagattgttacataagttggttttttgataatgatatgtgcatatttaaatcactacaaacttaagaaagtctaaaaacatgagtatttgaccccggtacaatgaaagggtgataaagtaaaaaaccaccaaactgtgttatgtatgtacctaccactttcaaaatttaaaccgaccaaattactccatattttagtttttctccaactatttctcattttcaattgtcaccaaaatggactgtgtttcgtttttaagggcctgtttcgttccatattgcaacaaaagtaagaagaaagctacttaactttttagtgtgaaatagtctccatccaaaagcaagaagacattgtcatacaaaatcttaccactttctctataattaaataaaaatccataaatatataaaattattcttctaaataaaaggaatacacataactcccaacaaatatgttttgtttcattcaatttcaaagtcggattccgttccttcccaaactttcatacccaaaaccgaaaaaagaatatcaaatgccaattttaatgtcaattggcatttaataattttaacctctaattgcaattaataaagggaaaaaaaaataatctaaaagcataaaagaacaacagaagaggaaaccataaacccatagatcaagatcaagaaaccaaaatgcagagcccaatttctcttgaacttaccaaagtaactctcaggtggttcctggtaatgaatctcgaactcatcgtccccaactccatcaaactctccaccaggtcccccgccgccattaacaattctaatcttcatctccctgagcttttcggtggcgagtccaagggtgagcttgtggcatcgcctctggtacttgaacccattgatgcatctgagggtctgggctacggagacgtagaagataaggtgggccaaggaaaggaggataatgggaacccagcaatggcgacattggaggcgaagggactgagattcggccaagaagacgagacccaagaagatgaagaaaagcaggaagagcttgtgaagctccttcttctgaaggtctatggctcgtttcttttcgagggtcttctcgaaatggagctggatgatagtgtttaaggcctggagagctgtctccttggggatcattgactgttggtgatggtggtggtggttggcttcgtagtccgccattaatggaatggggttattgtgagcttggacttggagactccactcagtgactcacacagttcaacttcttttacagtcttgatttagttactagttttagaagtgagataaaggtgggtctcatctaaggtgatgaaggtccgatctcgatgagtttcttaattatgaaaagaaaaaaaaaaaaaaaaaaaacgaaaacgtac

SEQ ID NO: 297764 - DNA, 4882 bp, Cannabis indica
attctctcctaattggttggaccataggtgcaatgatttacttcacgggtgaggtctcatcctcaagtctaagatggcctagctgcacaaaggaaaataatagaagaagcatttgaatccttcatgcggaaagtggggttttatgatccgataaagaatcaaacttatttaaatgttcctgttattctatctttccttgaaaaaggcgctcagcctacaggaactgttcatgatatttcaaaaaaggcaggggtttttatggaaatttctgttaatcaccaaccaaaattcaattaatcaaataaatttaaagtttggattataatcttgccaccttgcaacgctaaattgtaactccctaaccaaacaaagtttaaaattttacttaattttcttttatttttggtatagcttttctccaaaagttgtgtaccatatttgaaattcacacttccttggttgtatttttcaaagctaataaatttagctatgttttagtcaaatcaagaattgaaaacatagaaaaatgaaaatcatacttaaaaatctttttgaaattaggcaattaaaatcttacataagcctaatcataactagatttaaaataacttaatcaaaatattacaacttatgaataatatattgatgagaaaaaaatgttgtattgctacaaatttgatgtgaaaatttaaaagcctgtcttgatgaatggtaacaacaatatttttgtctatatctgaaattaaaacaacttaaagtaacaaaaaggcaaagaattcatagcaaaactgaatctccatgtaaacatataacaacattatttggcagattaagaaaggggataaaaaagggtatgagaagatgcaaaaaccgacgaatgaggtctgttcggggaggtcaagcagcacccttttgtttcaaggtgatcttatccccgagactcagagcaataccttgcgttttacttcttatcctgatgtacccgcttagcttaccatcggtttgcttttcgatacttacattcaccaaagcatcctccccgaacacactctttgcgtataagttggaggcgaggaaaccgcactccccttccagtgcagatctaagtacatcatttagcagcgagatcaaaggttagtgattgtatgaatggtggaatgaaactaaaagatcgtttgtagttatgaaggcgagaacttacagaggagtcagacacttcatgtttgtggattttatgatgtggtctagaaattccttctcgctttgaataacggtattaacagcaacctggatcaaagaaatcgttccacaatagaatcattatatttggaattagaaagggttggtaataaaccgatgttaaagaccaacatgcttcaacatacttatgaaaaattaagctttcattaaatggatgtaaacaattattaaggtaagaagagaaggtgagccatagagcactagccattttttattctgtcgaaacgatgatccccacttaaccttacaatatttaggaagcaggaaactatagcaattgctatgtaagtactcgagagggactcgagtctcagactttgtaggatcaaaccataacgcactaccaaattggttaatataatccaccaattcattcaaattgttggttagttatcattataatacatatgagtagatagttctttaaaaaaggagaaaagtctctatttaacacatcagacagatcaattgcatgaaggaagtcatcaggttaatttaaaaaataatgtcgaaaagttaacgataataaatttaagaggaatgagatattggtgttaccttattctcccactcaaactcagcccacattgttcggaacgccacgtcagcgcagtaggcaggggagatgtagtccatgatatcaatatggatgtcattgaggacaatgaccattctatcatgtacatttgaagaggtctcataaacaatgttaccaaaaataactcctgtttcagtagaggatactttaatgttggccttaatctgtttgcttgattcaggagcgagtgtatagttctgaggacgctctacaagtttgagatcacccatagtggccaactccaaacatagattctggagcgtctccttggttcggttaatgacagtaacatctagtacaatgtcataatggtgaactgtgacatatgcttctgcataaacaggatcactgaatcctgtgagttgaataatgcgattgagtttatttgcatcatctccatcatttgtgaactctccggtagcacgtttgagatcatcttgaacctcgtcctccagctcaagctggctcataccctgaaatgccatttaacaaatatttcttacttgaaaaatactaaaacagatgaccgcagagtgtatccacccatataaataacataaacataaaattcaatatttagataagatgtgtttgtaaaacagttcacaatatctaaatgagtcagtgttcgacaaggaaagacatgttaaattgggtgcaaaccgaaaattaaaactacaaaatcaaatgggatgatgaataatattgaaagaaacaaaatttttaatgcctttgagagaaaataaacgagtttcctaaccttcctgctcttcaaatggtagaaatcaataaggtcatctggttgtgcatagatatttgagccatagcttttaattcctctgtttcacgacgctgcttatccgcaagcattttcacaaagctttctctgcaggactgcagccatatctttctagcctcatcacccgtattgcataacaatctgatacacaacacaatcctctcgtgagaatcattatccataggttgtggaagggctgaggattgacccaattgaagcatagagacaaagatcaacaaaacttgtgttgatgctttgttaacttcagtttttaatgtctggacttcttccagtctcaagacaagctttgtcaatgtgcaagccacaactgccccaagaaaaaagtcaccagagagaataagagatctcaaatttccaatggaagccgagccatggacaagtgtcggtggagacagggctgtttccagtacagcactctgggttgcataggtaccatccgcaagaaccacgggcctcctagaggacacagtagtggaattcacaggctgtgcggtcttctgagtatcctcaccctcaacatcctcagaagctgtgaagaaaggtaaatccccaagacattgcttgatggtcgatattccaccctcaacttccgaaagagacagacagtactcgccaataatccaaagagcacaagcacaaaccctggaagcacgaatctggtaaaaagtatccaacaacctcgtaataatagaaacacgcaacttcgggttggtttcaataatctcccgtacaaaaacagccacatcaatagcagaaccgacattgctgtcacccaaaaagtccatcaaaagatgaacaacagtgcttgcaacctcaggaaacttaatggcacaagtatggatagcttgcaccaacatctgcctatactcaccattcttctcatgctcaccactctgagtcttgacaacctctttcttcaacataagaacaacctcatctacatttctatggttaatcaaatcaagcacaatatcaagtgtctttttttgaatatcaacattcggactcgaaagagctctaagcacatccataaccaattcaaccataatctccctatgagaagccttaagctcattaagtctatcaagcacaatgagcttgacattgttatcactctgagataacagaagctggcagtaagtactggccgcggccctaaccgcggttggggcagaggaaagcgaaacaagagtcccagcacattcatagataacagcactagagggtgcattcaatagagatataataatcttaatatactttcctttctctcccttattagttctacaaactttcttaatcaattccaatacaaccatctgaagctgttcaccccaatcgataatcttatcaatatgagtaaaaagataattaacagcacgatcttgagcacaagtaaagagcataagaaacgcattatgcttactcgaattatcctgttccgaagtgagaaacttctcaataatctccggcgcatcaacgagcatttggtcaccaccaggaagacggtaaacaaacataacggcgagaaccgcgttacgacgaacatagggatgacggtgctccaaattctgaagaatcgaaggaatgagaggctcgacgatctccggttcgttaagacggcaaaggaatcgaagagtaacaccacggatgtactcattagggtgctgaagattgttacgaagattctgacaaataagaatcatctcaggaaggattttacctttggaatcagtcttctcgatgatctccaaatacaaaaggagaagcttctgcatagtatgatcttcagatgtaagaacaaagcgaataatggtgatgaagagattaggaatggtttcgccattgagaagaagcatgatagcttttttcatagcgtcgatcttgtattcgatttcgcttccttgtaaggcttcattgatctcgttggctagagctggagttcctttgtcgaaatgaacgagtaaagtacatgatttctccattgtcgtcgagatcgagtaagttcaccagatctgaaaatcgaattcaaagtttcagattttcagatctagagtagtgttagcttagctgaaattttcagatttgagagaattgaagtgagaattgtgaatgtatagatttgggaatggtgaccatgagaagaggaagaagaagaagaagaaggaagacaacaatggagatctggtctgagaacacactcg

SEQ ID NO: 297765 - DNA, 1011 bp, Cannabis indica
tttttaacttacaaaaactattacaattagtgggtcatagtgacactaaaattccaaatcttgtatgatgtataatgtatgtagttaccaatataaatgtatatttatttatttatatttatgttgaatggaatgggtcctttttttaataaagagaaaattttgggaccaaaaaggagaatctttgtgtgttattttcttttttgatttgaatattggtttttcagtgagaaaattcgaaattccttctgcaaaagaaattatgttaaaagggcttaatggagaaaagggttggatttgtgagtcatattgcaaatgggaatttattcttttattaagtttggaggttattagtaagtcctttatcaaagggggtattattttaagttattttgaaattttagtccaattttaatatttatttgcaaaatagcctctgaccgtgtagatagtaagtcgaaaaatttatctttgtgttaagtttgtcacaattgataaataaaataataacatatttatttagtcaattatcacattaacctctcacaatgtagataattagttaagggtcacaatctatatcagtcaaaataacacgactcgaaactaacatgaaataacaaacctatacacacataatatgtggtaatgctttttagcttaataagaccatcataaaacaatttgataagtttgaaaacattgtcattttttttttgtgtaggcatatcattgttcatattaaatactaaaattatttattatttattttatttttttttaaatttaaattaatatatatcacatttggctatttgtaactgctagaaaaataataattttactagtaatatattttgctgtcatcactagcataaaataaaataagtgaattattgatggaagcatgtcaaaatattaataaaaaattataaccaatagtatttacccattatacaaatgtaaaggaacctaaaaaaaatctaacaaatgtaatgagaaagacataaa

SEQ ID NO: 297766 - DNA, 8740 bp, Cannabis indica
agattggtttcattcattgtaaaaagatagaggttgattaaggggtctttaacataaagatgctcttttctttgtaattgtttgtacaaaagtattgtggatcaataataatcttgctgatttatcaaaaaaaaaaaaaaaaaaaattatttaccattagacttattaggatattacatttgaaaacaaaggaggtttaaagactacaaaatggtgaaaaaaatgaagacaagtggctttgtgtttattaataattaaggttaatccacgtgatttgaaattaacagctcagattatctcctcaaaaagcataaactgatcagatggctagggagttgaaaagatggcatttaatgtccctcgactaaaaccaaaacatttaattttcatcattaaatacctcgagcctaatgagcataaaagagttctcacatcataactctgtcatcagttggatttccccacaaaaaagtaattattgtaggcacatgttatccatgagatcattaaacacacaacacgcatgcattgccatttgttcccagcaaaaaatttttgaccttacatatatcgacagccaaacgagaattattcttttgcatcctcaaaattctcctacgcatcataggtatacttcaactatcctaatgaagaatgcaagattctgctactcaagagtcctaaaagcttgcgggtaaatgttatccgtgttttagaagaagggacacatggcaaaggataagaagcattagtttaaatatttgctaaataattccccttaattagctaggatcacttgaaaagctatactggttcgggaccaagagatgaccaagttctttatacttctaggagatgcttagaagccatttgggaagtctaacacggacattaattcaatagaggtaacggtatgtctatcccaaagcaagaaccaaatagtccaagcaacggtgataccttttcagacataggatcagatcttatcccctgtgtcagaccatggtagtgtacacacctcaattctgaatacatctttttctcctaacggcctgtctaggcatcttattttcaaagtgctacctttaggcgactgtgttttgtaccagcaatagtccccattgtataactgcctaccgcacgagaaagaacgttcttaggagccaatagtcagtattttatatgaatttcaccccaatagttttctctttgacagaaaccctaaatgggtcatgggtacacccatacccgtactttagcttataaatacctcattattttcacatagacgaggggatcacaaaaaaaaatagtcgaagctctgctgtaattgctgtaagctttcttctacttctagagaaaacaagagacagagttagagttctctaataaacaccactataaaaatattatacaagccttttagagccaatatactactcgtggactatgactcattaattctcgaactacgtaaaactctttgtctattttacttattgcattaattatttctgaagttctattttaatgtttctgaaaatctcgataaacattaaatatgatctaaatcttttgagacttaaaagggatatttacccttatgtcttggtataattaattatcatctattattttagtgaaattatcattgttcattcaagtaagtttcatgtttaatcaattgttactaagttgccataaataacagtttgttcatctagatcttgtgctagaagtgttggagctagtagttagaatttgaatgatgcaagagaatatccatttctaggttattcttagtaagtgaaatagggatattttactgccttgtataactgtaagaattggtgattggattgtgttcttaaatctgatttaatataggaaaatgttgatttagatgatagaactttatccatgagttgtggaaaaatttcatgaacatattgggaattctagttaactctgtgcgtttttctgaagtgatggtgtagcaactgggtagtttggacatagggggtttagctattcaagtttgtcataactttgatacattttcttgtagttaattttctagcatttgtagcgatattttaagcatattttaatttccactattttattttagttgcattactcaaccaattaatatttctccatttttcatgttggttttacatcaaatttgacttgcaatccctattgagacacgatcttaattatcattatattacgtgtgtgactgtgtatacttgtatatattaattttcacaacaagttattagcactgttgtcggggattgaaattaaaattttttatcattaagtatcttaaaatttatttatgcttttttggttctaaccttgcttgtttaggctatgcatttttaaggattattgtatgaatgaacaaaaagagtttgaacatgctcttattgaccaaaaagttgaacgcacttttagacaaaagagaaaggaaggaacaaagggctaagaaatgttgcaatgttgccgaccagtttggagaggttgtgggtgcccataattttgtttatcccattactttggcagatgataaagcaagattaataagggaatatgctgcccctatgttcaacgagcccaatccatgtattgtgagacccgaaattcaagcacctcaatttgagctcaagcccattatgttttaaatgctccaaacagttggtcaatttattaggttgccaacgaaagatcctcatatccatattcgctcatttttggaggtgatcaactccgtcaagctacaaggagtgagtgacaaggctctaagattaaatattttttcattttctttgagggatcaagctagagcatggctcaatatccttcctcctatattggttaccacttggaatgacttggctaaaaaaattttaaggaagtatttccgtcccaccaaaaatgcaaagtttcctagtgagattatttcctttcaatagttgaaagatgaatctatttatgaaacattggaaagattcaaggagttattgagaaagtttccacaccatgatatcccccatcgcataaaaattgagatattctataatgggctcaattcggccactcatatggtattatatgcttcagccaatggagctattctttccaagtcttacaatgaagcatttgagattttggaaagtatttctagtaacaactatcaattgtccaatactagagctcctacaagtagaaagttagtgggattgcttgaagttgatgcattgacagctttaacagctcaaatggcttccatgaataacattctaaagaatatgagctttgggggaaatgtacaaccagctgttgtagttcaaatgccaaggtatcatgtgtctattgtagagagggacgtacttttgatagtttcccttcaaatcccaccttgacttgttatgtgggtaatcaaaacttcaaccattacaacccatgtaaacactcctataatccgacatggagagagcatccaaacatttcaaggcgggtcaaggagaaacttcaagtagagcacaagttcaaggcaaaccaatatgtccaccagggttttctcaacaaccaagagctcaacaacttcaccctcctcaagggtctcaatctagttctcttgaaatcttaatgagagattatatggccaagaatgatgttttagttcaaagtcaagctgcttctctctaaaatattgagattccattggagcatttggtgaatgatttgaaaaataggtgccaaggtactttacctagtgacactgagaatccaagaagagatagcaaagaacattccaaggcggttatttatggagtggaaataatcaagaagtgaatgaggagaaaccaaagggcaacaaggaccccacttcaatccaaaaaaaaaagagaaaagggtgaaaaaacaacaaattcaactgttgaattttcccaaaatgttacaccatcaggtgagcatcctacgttagaaaagaatttgcacaagccacctctgccatttcctcaatcattcaaaaagtaggatcaagatgactgattttgaaaacctctatatgttttgaagcagctcctgataaaattcccttggtggaggctttggagcaactacttaactatatgaaatttttgaaggacattttgataaagaagaggaggcttgatgaatttgaaatggttgctttaatagagggctgtaatgccatgctgaaaagtaaaattccctcaaagttgaaagatctaggaagttttacaattccatgcttcattggcggaacagatgtgggtagagctttatgtgatatgagggctagtatcaatctaatgtctgtgtcaatttttaagcaattgggaattggagaagccaggtcaaccaccgtcactttacaattggcggatcgatctatgggccatgtggagggaaagattgggatgtgttattgaaagttaacaagttcattttttctattgaattcatcattcttgactatgaggtggatagaaatgtgccaataatttttgggacaccaatcctacaaagaaaatttagattgatgtgcaaaattgagaacttactatgagggtgaatgactaacaagtgacttttaatgtattcaatgcaatgaagtttttgtatgatattgatgaatgctctagattgagtttgattgaatcacttgtagttgaaaaaatccacaaagaaaagtagaattgggagtgagctcacttgaggagattaaagatttaagtgaagaggaggagtcccaagttacatggatagaaacaaatcaaccatttactaaattctgcaagccttttgaatctttagacttgttagaaggtaactttaagcctccaaagccttctatccaagaaccaccaaagttagagttgaagcccttgcctagtcacttaaaatatgtgtatttgggagatgatgagatgctccctatgattatttcagtcgtgttaggagctgatacagaccatttactgcttgatgtattgaagaaacataagatggtgattggctggactatggtagatttaaaaggcgtaagtcctacttttgtatgcataaaatcttactggaagctagctgtaccaactcatttgaaaaataagtgttaacggtgaaaaatcatcaaagatgaaaaggcaaaaattcaaaaacttaacgaaatgtttagagcaataatggaggaagagaaacacttgtatttcttcgaatgaagtgttacaatgattttctaaccccttctcacatttgaaaatgaggtatttataggttgtaatggccaagtttacacttatggtcccaatagacaaggtgacatccatgagttgcaggttgcatggtgcaggtggtggtcttgcgccttgtacccctatctggtgtcaggtggtcgtgagttgtagtggtagtggttgtgggcactcttggttagcatgttagcacttgcaggtgtggtgcctcaattactcgtacctccttggcatcgaagcttgtaggaggcgttgttgtacccaccttgcatgcacaccttgtatcgttgagtgactttaaggccactatggctgagtgaaattcttcctggtcatcgccgagttacctagggccaagcatggttgagttaccctgttccttagcttcgctgagtgacttcaaggctatatggttgagtgattttctatcttgtcgatggctgagtgactttcttccttagcttggccgagtgatttcatgattgtatggcccagtgaatttctctcttagccatggccaagtgacctaggaccaagcatggtagagtgactttctctcttagccattgtcaagtgacctagcgccaagcatggcagagtggctttctctcttggccattgtcgagtgacctagggcctgtcatggtcgagtgactttcttccttagcacggccaagtgactttaaggttgtatgtttgagtgacattctctcttggccatggacgagttacatagggctaagcatggacgtgtggctttctctcttggccatggtcgagtggcctagggccaagtatggccaagtgactttcttccttagcttggctgagtgacttcaaggttgtatagtccagtgactttctctctgtcatggctatgtgacatctcaagaacatggtcgaatgacatctcaaggctcattagtgattagtctttcaccaaagcctttggtcgaattgcctttcgttgaccctggccaagtgatcacccaagatagggttcggtcgagctaccctgggacatatgcgtcgactcagtcattcctcgaccaactcttaaagttgatgtatgttgcttcctaagaataattgttgactaatcttgagaattaaccctgtcaatttttgaggttaacactttcccccatcctataagaattcttttaaactctctagtagactaagttcggtaagtgctatccctttcactctgttatgtggttgtccctttaagcgcttgtgccttgatatcatttgtatgagggaatcttctgccacttgtgctttctcaacctcttatctagtgtaacataattattaagggagtatagaatttttgagcagtatcaacctcctgcagttacatattagaagttaagggagttttatagcgtcttgggtcacgcatagccttttttaagttttttgttgaaggttaagggagttgcttagcctcttgtgctgtactctacctttttcaagttttgtgattctattgatgaagcaagtagcccttgggcggaactcgacctcttgcattgcattcatggaacttaaagtgtgttttgaatgggagaaaataggtattccttttatagaaacatccctctcatagtcataccatttcctttgtttttcttctcgatctctcttttttatttttcttttatttttgcctttattaacgaggccatgagtgtctttcaagtctcctttcctggcctaccaaagatgtagcatttttcgtggcatagaacactcaagtttcaatctcaatatttttagactgaacatccacattgaagcattcattaataacataaattcaagatatcattttccaatcatcttggtttcaaaataaaggggtctttcacttgtttacaaagatctaaaagataaatattcctattgggggtcacctaacgagtttccaccttgattctaagcaaacttaaatgtgatacccaaatgatatcttggtggatttttctttacgaaaacactttatttcttcttatttttctttattcttctttttgttgctcatcttcaagtctttggttctctatgcggtacgtgcctaggtatcctcagtgtatcaactccttgatttcaatcttcatatctttgcattcctttgtaaaatttccaatgtctttgtggaatttacaatacttgttcaagtccattttggacctatctttcttcatggggtggtttcttgaaaggtatgcgatgctcaatggttaagaagatgtgttcccttgagtgactcaactctgtgtagcatgtgtattcctagaaatgtcgctccacctctctcttgaccttttcgctctgatcatctccttaatgatcgaactctctctctctctctttgtgcggtttctcaatttaagttttcccacattggtcattcctgcccatattgagaatctcgtatttttcttctatgttgatttattttttggctccctcatagaaatcttctagtctggtaaattctctcttgaacaagctattccacatttcgcttttgcataggactcccatggcaatcgccattgtatattcttctttctttaacctgcccactttagctacttcaacatcgaagcattagattcaactcttcatacattcgtgttcctcttacttgatgtttgttgggcttgtcctgaggaaggtgtagtcgcaggaggtatgatgttgagccaagaactcatcagcaagctctctccacgatgtaatggatccaagagatacccttttgaaccatttgtaagttgcgcttctaagcatcacgacaaagaactggcatctcactttgcttgtgatcctcttcattttaatcacctcattaaaggcatctagatggtactttggtcggtaatccactcatgaagtggcaaattaggctccttaaattttagtggcaatagtgcagcttgaatttccctcaagaaagaagattcatcatcgaaatcttctccatcccaattgcactctttggatgctgctgatgttattctccttttgagttcttccatctccctattgagttgctcttgcctttaattcaatttttctcgaaggtccaatggtatgggtgtaacaccctaactagcataggcgtgttgacgtgatttttaacgtactgtgcagctcgttgctaatcaacgaggttaatgaaaaacgtgattaattaaaattttgcttatttaattaaatacgtgtaatatagcatacaaaatactttgggatcccatttacaaaacactttacaaaaagtttgctattcaatacaaaatatttgtcgcccagtgactaactacaaaagccttgacgtcccgaggatcgaacgctccaggcctaaccccctcgacttgtacaatcttcatctgctcatcctcacagttcctcagctttggccttgcccttac

SEQ ID NO: 297767 - DNA, 4591 bp, Cannabis indica
tatttataaacgaaattatcctaattcctgtacatttggaatatttagggagcaaatgtgtctagaacgacacatttttgagtgtacacttcagcatagagcttctgtcttcttctcaataagtgtgctttggcatcaacttgctacattgcaaataactaaagtcatgaaaaaatttcacaaatgtcgcataaaaattacacaaatatcaaataaattaaacgcaaagtaaaattgtatagtaatcgcacactaattgcatagaagtcgcataaatataaatatatgtcgcacaaaatttaaaacacaaaatttgaagagttaagaaacaatttatagcatcgtcgagccattcctcttgcaccatcactttcacaaactaagactgattggctgggctagtgtgaacatccctaagacgtcgttgtcccttgagtaagtaatccacttttggaaaaatttatacagtcgtgagtctgctgaagtgggcctcaaagtgtctacttcaactggcccaatttgttgtttcttctttccctctgtgttgtcctttaagaaaatcggcttccattttctcctaaccctcaagaattccactccaggaggtggcccatccaactcttgcacatcctgagactgtgtatcacccacggtaaccataatggcatctgttggagtagaaggaacctcatctatgttgggttcccaatcttccggatacatatcatcctcatcaaaattgtctccataatgtgatggttgtgtcagctctaatggctgtgttggcgttgatggctgcttctgcaacaaacttataatggccgcaatttgatccatgacaagccttcatctcagtctgtgcagtcataatctcaagtttttgggtttcaacattctccaatctctttgctaaccctaagtagtcggcggcattggctatagtagaggttgggggcacaatggcagatgtggagggctttggtgcttctttcaatggtgatggtggaattattttggcactttgataataggccacccattttgcttgggtctcgaatacggtcaaattttaagtaccaatttgtatttcttcgacctcatccaagcccatgtccaccgtggggaaatcacccctcacaattggacttctaataatcaaccttccaattccaaggatacaaaatttgaagaacaactatctgcaaaaagtacgaattgaattaatgtcaccaaatattgcactaaattgcatacaaatgttagaaaatatcgcataaataacgcacaaaatcgcaaaaaacataacaaatattacacaatagaaaatcatgcaatgttaatataaatcacacaaatgtcgcacaaaacaaaacttaaatcacagagaaactcatgcacatatgtcgcacaaatatcgcacaatgtcgcactaaaaatcaaggaaatgctaaaagcataaaattgcatatattcacacaaactaaagcatgaatcgtataaacataaaaaaaaaatgtcacacaaatgtcgcataaatatcgcacaacaaactacaacaattgcacataaacacaaataacacttatagcaaaataaatatcaaaacaacaatgataaatagagaaagattcacatacccttttctcaaacagtacaaccacattaggttgcttcacatcatctttcgtaacttaataaggagtgctccagttcaacattctagggaatctagtccctttgcactggccatacttctttcccaaatattgcatgagctcaaacacttaatattgcagggccggtgcatattcgtacacattgtacttcacctctagttgagtaatatttttctccttcttcgtcttatctttcttaatagagaccttatccatgtagttcttcctaagctgcatcatatttttagttgtagaagacaacaacttctgataagaaaggaggccccaaggatactcgaagaaattgtctacattttctactaacttcaacatatctatccagatataaacaccctcagcccttgataataacacaccttaaacaaatgcacacagtcccagcttgtacacattgtctgcaacatcgcacgcctcaaaagttagcaaaaagcttttaaaggtgaccctttttcgtattgtttagatagtcccacagtatccaatcagaattgcattgtgtactcaattcttctgtcgaggggccactgatcatctttaggcctgtgatcaaaccgaactcagaccgctcaaatctggcttcagttttagccacgtaaaaccacacttcatcatttttgacctcactcacttttttttccttaataacagttgatgcacaatcaccccggagaatttcagatcattggcattctaaaaaactccaaagggagtctccttgaccttgttggtcaacttaaagcctttgaatttagcctttattgaagtaaagtacatatcctttctgtaagtgatagccctgaaaaatgctcagacaatgggagaatgagttctggagccatctgtatttacaaacaaaaaagatgattattgcttggactatgttgcaaactaacatgagtatatcgcataaacgttgcataaagattgcacaaacgtcgcttaaaacatgtatatatcgcacatatctcgtacaaacattgcttaaactcgcttaactacagtgaaaagtttatgcatcaaaagtacaaacaatgtctaatgtacatcgtcctataatcgaataaatgtcgctgaaattatcattacttgtactcaggggcggaggtactttagggggtggtgtggccatggcccccaaaattttataaaatgtgtaatatatgtagtgtaactaaattatgtatatacctatttacgtatacatgtgtaatataattattcacatatacaaaaaaaaataaagataagtgaaaaaatatttaaaatttatttttgacactatagtttggaatttttttaagtttatcggtgattttaaataactacaacggtacacaatcatgaaataaaatgcactaaaaaattctgttagatctcaaaatagatagagcctgccaaaacaacacttttataaggtgaactatacatgaatatatatatatatatattacatggtacaaaattattagataattctatagtaaatctcttagaattgaagtttctatccctatctgttttcgtatccatgagaatttttagtccgattttttttatataattgtctactttgtaattattagaatcacatttaaatttttagaaaattctaaatagctgctcaaaataaaattcaattattttgttgatgcatgtctgtttttcttatacatgtggtaagcaatagttaaaattttattttttagcattgtaaaatatttaattttttattttttttgtgaaaacatacgggccttaaaaaaaataaaccaaaaaaccttttttaggtgaaacaaataagagttgtactaaatcaatctttcaaggaggtgcaatattaatttttctaaaatttttatgtccctagtatttaagtcttggcttcgcccctgcttgtactagtgactcctgtgatcactaatatcgaataatacaccaaatgtcactcaaaaataaaaacatcaaaatttatcctagcttataattactcgcataaaattacacaaatatcgcaaaacaacacgaacacaaaaattgctctaactaagattgactactcgcataaaaatggcacataatgtcgcaaaaaaacatacaatccagaaaaaacctatatcccgaaacctaaattcttccaaaattattcttccataatccgaaaaaaacatacaaaacatacaaataaagaaacctagctaaagtcaatatagtagaaatctcgatagccctcatatcattatgacttttgcacaccatattttatatgatgaattgactatagttaattacaatatgaaattgacgatttaaataaagggatatttagcttaaaatttccaaaaattgtagtgttatgatcacgttatgattactataataataatttatgaaccattgagtatggaatagaatcattctcttctctgagtttttcttttcttttttaggggaattatcattttctgataattctaacaattttcttcattcttaaaattaaaaataaaaggcactataattttgaaattttaaagttgtgtctacatccactcatttgaataatgaataacaataataataataaccaagggttcaaacaccattaagtagcttttcttatagcgacttatgagctacccgacttaattacatatattaaatttcaatgaaatcactttttctaatgtttacaaaaattgaattattatattctataataatttataacttaaaattgcctcaaataaagatatagttacgcaattagggagtaaagcaatcgtcatattaacaggaaaacatttcgaaggaagaaaattaaaatgcaatattaatacagtagaacatctatttaagaatactctatttaagaataacttctaatttgttataaa

SEQ ID NO: 297768 - DNA, 5484 bp, Cannabis indica
ttcggcatgttaaacttttttaaatttctctaattactatcagacacgactatgaaaaaaattgaattatgacgaaacagatagggctgcatgagtacatctcttttagggtgcaccatataattttccttatatatttgttatgtgtattaagctctttttcctgcattattgttcagctattatatcacaggcgttcagagctgcatcggttgtgattccgagttccaattgctacgttatcaacaactctagtcgagttgtggattttgtatccttttcatgattaatactagttatgaattagaaaacattagccttcaatggacttttttcttgttaaaattaatttccttaactgcaattcagacaagttggattggacatccttttgaatatgatgcagaggtaatcttcttaaataaataaaaccattttatgataatgaaaattcagtgtgagatttgatatgtgcagatgacttatgttataatgctgacataagagtttgtcttgatagggacatggctcagacttggttgttcgattttgcaaagatgtggaaactagatcacaaacggtagtcaatgtcaccatgttctcatgtactttcttgtttttttttccctttctttatatgagattatgtaataatttatttaatctaagaacaatgttgttacatgcacacctcgttgaatttcagttctgtgaacacttctttcttttttatcatttatcataatcatgcagggatacgtggattttggtcgctttgataagtttaactattttgttgctggggcaggacatgttgactttgttcaagtgagatctttttgtttctgaatcgtactattcaggagattcttttatataatctgaaaacctgattgtcttagctgtctcagtttctcaactttgtagggcttttacaatggagacctgagacagtgcgaggacagttttgataagatgggacgaacagcacaggttggtttcttgtcaaagaccctctatgcagtcttccccactctcaccctactcgcactcaaaagaagggagttggggatgatatgagaacattgttcagttttttattttttaaagatattgttttcccagtattctgtgctctcagctcactagtttgtaatttgcattatttcaggtaaatgtcatatgcggggcttgtccaaatggaaaatgtgaaggtttgagagcttatttatttactactatccggtttgcattgtctctttatccatgatttgtcactgatttttactatatatcatgttttcaggtttacctggatgcatctgcaatatctcttatgaatctacttgcaggtttactcagaatgccttgattttcatttttatttgaaagacctcttaaaatgaacatataacgagaatgcatctctgttcgagaaagcttaaaataagctgtttttagcttatataattaaaaaaaatacacttctgagagtgtttgggtaaaagaataaaaagaccttattgaattttgaagacctttttatagaacctaggattcctagcttatgaaaaaaaaaaagatcttattctgaagccataagtgtagcaatacttttgccaaataaagtatgtaggtcatatcaaccaatattatagctagcagagatgtaggggaaaatagaaaatgtgtatgtactagtataatgccaagccatcttctataaaacccctaataaaactagatttcaactgaagaaattcattcgtagtttctctcaattagctttgagaaacaaagtaatgctcagaaaaaattatcttctggaaaatatgccagtaagagtgatacatgtgatatgttttaaatgtattgatctaatgaaattttattgttcataacctctcagagttttacttgatcttgccattccatgtggggaaccaggtccacgagtatttaaaggcttcacagttggcttccatccacgaacatgggaaattgtgaggatatgtttcattaaatcagatatgtattttgcttatcaggaaagaaaatatgacaaaagattacattttatgaacatgtaggtcaatgatggcatgactcagctgggttttgaagagtctcaccacgagttcgggtatgaaaactgtaccgtggattgattttctttctgcaccgttctcatcattgtttctgtctcagttaatggaataatggtgaattattatgcttcacattcattaaatttacttccaacacttcctgtattatgcagctttgcaactgaacaggctcatgtttccctatacatgactgcaattgcttcccaatcaactttggtgcagaaacctattgtcaaggtagtttggttcccataagctagtatttgaaaaaaaaattagcaattgaatgatatgtttatatttaatctctgttcaaataacaataatcaggttttccctgacaatggccttgaggtcagattatcaggctcaggagcttctggaaaacctcccacaactttgtcacccacagtgttggctatagattggagatgtagggttcagttcttgctgtgctatctatattcattaatattcaatatagttctgacttttaaattatcaggtgagaaggctcgtgatagtccatacaaagttaatgtcactatcccggttgagggttatgaacctgtgcagttcgttcttactaaaatgtgtggtatgttcgcattcattgtgaaaaaaactgctctcaataagctttacagtcttctaattcatagcaaagtattagcagcagttcaaattgtgtaaacatgaagagaaagtaccgattttagtatactgacagagcctatagatacaataaattagtcctttttttctatactaccacagccagtttttattgttggagcatcctttacaatactggaattaatcactactgccatttgcacaattatattgttctttaattgctttgaatgaagaaggcggacgattgggaatgaaaaataaattgtcagcttagtggcagtagaattatcaattatatgctattatatcaaaaaccattttcatattttacttcaacttagctccattccccagatgatactttatcggtttgttcaaatttttgcagaattcaggcaggatcaagctggagatgctacaagaggatgggctacatttggaattttatcctgcatgtatggccaattgtatattaaaaataaaagttcatcaaataatttatactaaaacagttaatgcattctgatatttctgttttgaacggcttgtggcagattcatagtcttatcaactctgttctgttgtggagggtttatttataaggctcgagttcaacaccaggtaagcccttatcttttacttctttattccctttgaaaaaagcttcatttattttattcttctgtggaatgtggtcagtgttttgggttcagacccttttatgttcatttgcaatttaaccaataaactttttttttcttttaataatcatatgcagcgtggaactgatgcattgccaggcatgacaattctatctgcctgtttagaaacggttagcatacttcaccatattataatgaggaaaattttatggtctcacttgtctgagattttagcatagttggtattactgattttgttcttggataggataaccaataatgtgcctaaatctcagaatataatcaataatactaaagtaggttaccaaattttggcaacaaaaaaaaggggtattattattgcagagaattagaatgaatgattgaatgaaagatcattcaagttcgttatgtgataatatatagtattttattacacaatttattaggggtcaacctttgtcaccctggtagatccaatttcaaagattttgactagcttacaaaatcaaagcttagattattttaacaaaggtaaatttttttgttggtgtgaaaataggtgagtggaggagtagggcaaggttacacccgaacggaagatttgaataacgcttatgctagtgaagcttcatgggaacgtcctcctgtccccgccgctgcccaacaaggaacgagaagacaaaccgaaaggaaatacggtgcaatttaaactaaactactcaataagaaaatgattcaactttcaacaaccttattctgttcctttatgtaatatctaaactcatttgagtagttcttgtagttgtagcctttgttgcatagcctagctcatttgaactcaaaattttcaccaaaggttttctatttaaaaatatatatattatagatgcttcattatagggtttttgagagacttgtattgtactctaaatttgtggtgattttttattggaagggaaggatatgaagtctttgaatttacaaaacaaaattactcagaaattcaattaattctgcaccacgtaaatttttaacaaattattttaaaattcacatataattatgtggctttagtttaaggccggctccaaattttatgcactctaaaagctcatttggtatgtccatattatattacattaagttatatatatatccattttatataatactatattaaattttaatttataaaatattatatatttatatacctatatatataatttaatataatataaaacaatgtaatgcagtgtactaaactaaccccaaatggcttcattatatctattaacgaggtttcacgtttttttattttacaattctcacccaagagaagaaatattattgtaataaaaatatacactgatgcgttcattgataatatatgtaaaaaaggaaaaaagaaaatcaaataaagtgttcttttgacaaatttttatatatacatatatattgaataatatatatttttttaataatctattgtggttgctctactaatatttaattttattcaaagtgtaaatgtgtatttcaattttttaaaggattttctattgtaaaaataaatactaatatttccttttagaatttttttaacattcaattacttttgagcttagttttagatttttttttggggggtgtaggcgtgtagcatcaccttaaattatttatttatttatcatatatatatttttcgaaatggatcatctatatatatatactagaagaaagttacgtgcaatgcacgtatacttagttttatattaggtgctctataatttaattgagaaagatttaataaataatcatataatttaaaatagtttaaaaactaattttaattagtgtgtggggttatttaaaaatcaatagtgaaaaatcaaatttaaaatttgcagaaagagaagaggagaatggagattagcttgaaatatatttaaaaaataataatgctacacacttactatgaacacttaactcgagccggtaataataaaattataaagaataggggtagcaggcatataactggacatatg

SEQ ID NO: 297769 - DNA, 1735 bp, Cannabis indica
ctaaaaggcccgtaaataaagtattagtcttaaaaattacaatttgttatgactaaatgtaagtcacaatacttgttgtgactaaaactaaattagtgacatcttgtaactaaatactatgttttagtcacaagtaacatttttttgtgactaaaagtcatatttagtcgcaaaaaaatcttggtaaccttcttttaaggtttatccaagttcttgattcttgaagtacttttttgaatctcatgtgcatgctttggttttaagatcctcgatttctttctttaatttgtttacatctccaacaataaaacccttctcattagcaagagcttcacacctcttaagagatttgtttacctcgagtgtgagacgagtactattttgttgatgggattgaaaactaaggttagccattagaataacctaaagaagagatgtgtaattcaattagaataaaaaagagagaggaaggggtaagaagtgataaaagaaggcttatcgagaacatccggtcttcactcctgttgaggagatctgaggagaagccatagatgatgagatcccaataatcctttacataattcctaaaatagcaattcgctcaggtaataaagccaaaataggcttttgcacctaagacttcagcttcactgggatggaaaagaattaggtccaacaattgaacctcaaaaaaattaagattgaaggtaactttgtttaggtcaccagcaatccttttttccttatcctgatctgcgacttcagaaatttcaataggagaagtctgaggtttggaagtagggatcttctcggtagcaggaggagatgaagttggggattttgccttattttcactcttccttttccttggagctttgggttgtttcaaagatccatcatcatttaaggcaacttgtttgtttcctctcttcactggaagagtaagactattaagtgcctctttgaaatccacctcaagatccatgtctacaaaataaaaatagaagggcacaaataagacaaatttatcaggaaagtatagcattaagattacgaggacatattcccacctagactacactcagagatgttacacgaagataagttagtttgaaaattactagattccctaaagctagtaatcatgtaaaggtcaaaagagttaagaggatataaatctgaatcccaacttgcggccccaaggctatatgagctatattgattagcaatgccataatacgagttgttacttgttaattggacatgaaacttggggtgccaactatcaaatctatgagcaataggattaacatagttctagataaaaaaagttatagtgactatccttaaatttgacaaggcaagccaggtctgtattaaggacagtatgtgaccatccataaatataattggtattaccttggggagccccttcaggggtcttaacaacttcatgagttattgtgttataattatacgcggctcgggcggtataatcctgatcttcttcctcaggaggaatgggagagttccaagtcgcatatttcctgttatcatccatggttggttgttatttgttgagcagaccacattttttttaaagtgtggcttgtataaaagaaaatcaacttcactcattccatagggaaaattaaccagtgttgatgtcgcctttcaatggttttggtgggaacaggccttggcaagtgtaatgtccctgcttcaagcctccatt

SEQ ID NO: 297770 - DNA, 1588 bp, Cannabis indica
gtaaaatatattccaacaacctccaccctacagtgaatttacagctccttgttttctaggaatgacgagttgaccatgcgttataccctgtccagggtagattatcagaatccatacccactaacctagatgtcctactcaggccaaagtttttatcttgtctttcaaatggtcacatttgttggtggtataaccaacatctctatgatactcacatcacttgctctaatccctttctttcttccctccttgttacattttaggataattcttgtaatgaaccatattgcaagttgccttgtatactttttcttgagtatcgatcaagttggtatactcagtttacttctggtcatacctgtttcttcctttctttagaacctcactccggttctgaatctttctacttctcttgttctgtgattgacttacatttgatttttggaacttttgtctttgcttgtttaggagtggcactacatatgatttgtactgctccgtacccagaaaagttattctgagtaggtttgtattcaaaggtagctggtccatagattgtgggaatcgtaaactacaataagctaggggagctttccttttatagggaaggaggtccaattaaattacaataaaataatagaaaagtcgcatgaaattcgccaaaaaattctacactaactcgtgagttgattttgaggcccaaaactccaaaatcatggcaacagtgtgagacacacctagatccacctttaaaagcgctttaatatgccatttgaactgcaacatttagataaacaatgagtgaattatggatattttactgagtggtgtgcattattgaaaaattagcaaactaacttaacagcgaccaagttaccgcaaatatcatcttgggtgcctagaacttgcgctttttggggtttctgtatatttttatatgctaaatgatgtgaagctattgttagttcattctttgattttggtgaagttatcttggcaattttactcgatgcaagcatggagatcaccgattgtggctgggtgacgaccgggtgatcactagtgcgtgtaggtatcggtggacttgtgcgtgacacgtgtaaatgagataatgatttgagcaatcatccaaatcttattttagaagaaaaataagattgattcctagacaagaactattttttgatggacaaaacactatgctctaggttgaacgtcaacctgggcgcccattatggtgcctggtggtgcctgtggactaagccaccactcagaagatattttcatcgaatcccaagtctcatatcttgttttgggaaaaaaacaacaataatcctcgagacaaaattgcaatcgaatcgatggaattacatgttcatgtagaacatgtcaacttaggcacccagtgtcaagggagttgagctggcgactcataggcagtggcttggttaacggaaccatttggagcatagcaaaagcgagtcttcataggaaaattgtcactgcttatggacccaaacttgggtgatcttgttggaatttattttaccaggatcttagatctactcacaagtatgttgtttaaaca

SEQ ID NO: 297771 - DNA, 494 bp, Cannabis indica
caaaagattccaaagttgggtgatggtgcctttgaaatcatttcaaataaaatattttgtaacaaaaagtctccctaacaatcccttcctgaatagcgaccgtcctttagcctcaaaaatctccgcagcaccttgtctcatcctctattatagcaaagctaatcctatttccaacaaactcatccatactacaaacacacaacacaaactagaaagaaattacacaaaatggcaagaaaaactgaccactgagagagcaaaacctcaagtgagaaaggagagtttaattttttttgaaaagtatagttacaacctcaaggaaaaatttcaattttttactattataaacctctttaaaaatctaagaaatacaacatgcaagtccttcactttttaatcatttaaaaatataatagttatgtgtacatatatgaaatataagatatgatattttaatttttagtttgataattaattatttaaatgttggttgt

SEQ ID NO: 297772 - DNA, 1673 bp, Cannabis indica
aaaaattaacttaagtatttatttacaactgggagtcaattttaaatatttataccacaaatgactcatatatatatatttactagggaatagtttcatttcatattagtagagtagtgatatattgttattttattttgtggatgttttggaatcattcttaatatgttaatgagttggcgtgtagtatgaaatgatataaactataactctagttctttggggtgtgttgtttcaggacgttatagttttattgtctaaatatttgggggcagttttgtcccatgttgctcgttgactttagcagttcatagtttgacaaagcatgctcttcgtttagacgatgagctatccatgttcaatgaagttcttacgttatttgtggatgtctgcatcgtaaattcatgagcaattttaataactacgtcaaaaaaaattaaaaccaagcaacaacacctcttaaatttatcaaaataagaattttttttttttatattggaagcccaactacctcttaaatttatcaaaatgagcaaaataatctttataccaaattttataaatttttagatttaaccattaaacatgcacaatttcataatacaaaattcattaattgtagtgctctgagattaagtggactttaagagaaaaaaaagtattgagtcctttatttaaaacgtatgtagtatattattaaactactgaaaaatatgtataattttaaataaagataatttttttcacccctagattgtaagggctcaggcccgaccctgattatagaaatctttataaaattttgacttgaattctttataaattttcaatatagtccttatacttcacataaactagtaggaacaccctttcaaaaagaaaacttgaaaaataggattaattgctaattacatttaatttaatgacttaattatttaaaactaataattcaaggggtcacttaccattttgctatatttaagcacgtttttaataattaaaaataattgggtgaatcggataaaaccaaatccaaataagcaatgacgtggaatcccatccatctctacttttcacaatcccaaaataccctccaaaccaatattaaattacaaaaataccctcaccaatcccaacactactaattaaacctaaccctacacccgcccgtactcaatccttttctactctgttttttttttaattttttaatttgtgttttttttttcaaactgattttttttttttttggtccgaaaaacatgtcattctaaaaatcttcagtacttgtcttcaatggcgaaaaccaaagctccaagacgaaccctagactcgtactcagtgaagcatatcaatcgaactgttaaacgtaagtaaaaattagtgaactttccttcattttctcgagaaagttgcagactttgttgttttttttttttgaaaaaaaaaacctaatttgtgaagctttgtgtttagctggggattgtgttcttatgcgtccttctgatactggaaagccttcgtacgtggctagaattgagcggatcgaagcggacagccgtggagccaacgtgaaggttcatgttcggtggtattaccgaccggaggaatcaattggtggccgccgtcaatttcatggttctaaagaggtttttctttctgatcatcatgat

SEQ ID NO: 297773 - DNA, 2421 bp, Cannabis indica
aatacccctagagtttaataaaatctctagaataactctaatatttatttctaaatattggggtcgaaaaataattaattcataaataattataaaataacagaaattagtgctaattgccttttactaatccaaattacaaaagcggtcattacaattgtggaaatcggaggagcatgtctgtgcaccaagaaccaggggaaaagagggggtccaccaggaaagaccccccggtcaacctacaacaaaggcttaatgccaaacacggagacctcaaggcacgtcttaaccaaaaaaagaaatttgcttcagcctcgaagagtatcctaaatgaaggcattctggttgaactcactatcctctagagagacatagcaagagtctttcaaaggcataagggaaataattcagaatctgactatgaggattgggagccctgtgccagaattgtactcaaagtagagctctcaaaaaatttcaaaatgcctataatgactttgtagacaagtgacacaaatccaagtgatcacttgtctcgattcaacagagtcatgacaatcttgagggtcaacaatgacgccaagtacttatgcttcccactaactttagggggatccgtagaagaatggttcaaaaaattagaacctcgttttgtggattgttggtataagctacaaaccgattttggaagacagttcattgcatccagaaagataaacctcgaagttagtgccctgactaacattaagaaactactcttggagaccttgaagaacttcattaagaggttcaaagaggaagcttccaaaacatagaaagttgatgatggacaataattagccttgttacaaggtggtatctggacgggaactcccttctggaatgaactccaacaggaaggtgcaactagctttcaagattttttagaaaagagctcagaaatacttcaatttggaagagacccaaataatgatttttggagggtattatcctactggaggctctgggtatgcttttcgggtgcaatttctcgaagtgcttactgccaccctttaatccagtgggatgcccagtgtgcaattccaaacgccaccatgatattctcaaaatttccccgtagcaccatcccattctgattatgggttgccaaatagtggtcccgctctaagagcatgttcgcagtaccccgctcaatctacttcacttgcggcaagtgtggctacaactccccaagcctcctagagaaaaaggttatctaatgaaagcacctggagtgagaacaagaagccaaagagggtgtccgaatacaatccccagtatactcagcatactgatttggtggacactcaggaacgtgtatacttggctataacatagaacattcactaccgaaggccacctcctttattccgagatagttcatggagagatcccaacaaaagattcaagtataataatgatatcaggcatacaactaatgaatgcaaaaatttaaaagatgaaattgagagcctaatatggctaggatacttgtatgcgtggataagaaaatgtttaccacatatgagagagaggcaatatgaagttcaagcacctcccagagctcaagctctagatgtgtcggctcctccgagagcactcccaccaaatcaaggggtaccacctggataccaatatctcccccaattgacttgatctcaaaacattctatttttccaaattgttacagcttcattaaaaaagtttcttgggcttgaaaaaaaatggcttaagcccttttttcatcatgctggatattacattcttggctttcagttgaaacattacaaggtccatcccttgggcccaagtcaaacggcccaccaggaggcacaacaacctttaaactgggcccatcattaaccattcccacataaacctccaaagaaaattctttgtttttagtagcaacttcattcatggaacgtgggtcaaccatgtttgaattattcaaattaatagagggaaagtcagaacctcctttctccatctcagttgacatcacagtggctttattacccgaagaaggaggtaaggacaccagcatgcaactggggattttgggtaaccacactgcccgtttccccttacccgatgaaggacgtggcccaggagtggtctttttcagcatcctcgagacactggcattaactttgttcttggctggagcaccaccattgacgttaccgttaccaaccagtcgacgaggagaagatgtaacaagcctccccatcgactttcccacctccgaaacatatccagggaccaccgacccaacaccttcaataggttttccaacaaaacagtcaacgtatgaggagcctgttgggattttatgccctaaataaaatccattacaatacaatctgatttgttatcaat

SEQ ID NO: 297774 - DNA, 1385 bp, Cannabis indica
aattcagattataacaatggtaatagaaaaaatacctcttgatgcctatcaggtttacttgctttcttttcgtattaatttcgatcatcttatgcagcaaggtagaaaatgatgatgatgaaactcacactgtgatcttccaagtcaacccaatcaatgattagtgtgggctagtaagattcacaaaatggtatgttcttatttttgtctcaactcatgagcaagagcagtaaaaatagataaaatgatacaattagttttcctaaatatatcgtatatataaatttatggttatatcagtataattaattataaccaataaatatattatttaaattttaattaattaatatatttatatttaaataaatatcctaactgattatgttatatatattattttaaatttaaacatttaattaaatatccaataactaaatgagagaatatatcaactgattggagagaatctctcaaccactttgagagaatatcacaaccatattaaatatctttaaccaacttttaaatttaaatttaaatttaaataaatatttgacttttgaataaattaaataatccaaattataatccagtggggtctaccttttatggtaggcgcctacactgttatgacacagtgtaagtggtgctacatgttgtcctaaagggacacctgtggcgtaccactttgtcctaacaaacaaaatggttccatcttctcttgtctatacaaagttcaccaatttatttaatattaaatttaatattatttatttataataaaattaataattactatttttcacatgcaaaataaattctcctttctcttttattttgtgatatccatacccttaacagtttgatatagagccaactcggaaccatggatctataacgctaagctccaataaattagattattaattgtctcatcaatcaaataatcatatttattaattctattattactctactgtaaatataaagttaaactcttagttattatagaattatatttactgagtttatttacagtgcccattgatatgatcaatactagtagtttgccctctttgtattgcttcataattagaattggtcaaattacatttttactcttttaattacctctttatcctttagtaccattaattcactagtagtagttaatttataatcatatcacaaatttgcgtgcaacttttcagtaccagaattaaaacttaaaggaaaccattattcgatctgttaggaaagtcaagatttcatattggaaattaagtttctagtcatccatattattagattccaaaacaaaaattgtaaaaatcatttcttgaaaaactttaatgagtgaatcaaagaacctaataacatga

SEQ ID NO: 297775 - DNA, 1133 bp, Cannabis indica
ttttttttttttcttttttggagggaaagaaaagagtgagagacatgaagacagctcaaagataaggcaatgggaatgtgtggagggaaatgaaaaccagattttgtataattctttctaatatcaaacagtttctctttttcgttttcacaaatgttttctcattcttctaaaaatctgccacgtctgagtcgtcctttttttggcttgttctttgtgagactaaacacatttgctttttttttttcttaatatcttctctatattatttaaaaattatttttttataaaaaaaatgtaaagtaagcttcaatagatgaacaaggagaatctaagtttcagatacattgaccaatttagaaaaaaaattattaaaatgacctctttatccaaagcccattgattttctggcaaaattgtaagctaatacattgttatttctaaaaatatgactgaagaaaatattaagaaggaaagataaagagttttgtaccaattgaacaagatcaaaaagagaagatctgtcttttcatttatgcttgattttggtaactaaaacttggtaatctgtgtccaccaactctattggaaaattcacggtcacacaccaagataagacaacatgcaatgtcgtggcttctgcataaataggagtagagattcttgctaagaagaacataacccagcaacaacagccccgttactatcaatgatcacaactcctataccgatttttcttgtcttgacatctaaggaagcatccacgctcaatttaaaattctcagtagaaggcaatctgcagctatcgttacaattctgatgaacaccgctactaaaagaggtttgagccacataattttgatgcaagccatggttttgagccttcctctaatcctacaaaaaataagcacaaagccttccacatccacaaagttacgagtaagtttattaaacacagaattatttctttaattccataccatccaacaaataccaaaaagaagagaaagttgatcatgattaaatttgtcaaagctcttaacataaatttcttgatgtcacaatgcctattagatgaatagaaactttctaaattagtatgtccacaatagatttagctctggaacactcta

SEQ ID NO: 297776 - DNA, 3831 bp, Cannabis indica
aaaattggaaattgcacctcgccaggccttctctcactcattaaaaaaaaatgaaatagcaggagggaaaattcactaaggcagacaagctctccaacaataaaagaagacatgattatggaatgaaatgcaataatccactgtaatatttagtcttacccaacagaatgaggaaaagcacatgcctacatacagccaaggcaccagaactccagatatgtcactgctttcgtaagaaaggacagatccaggaagcctaggaaagttgttcaggttccaaccagatttgatatatggttgttctgaagcggaaacatcatgtttggacatcttgggaaagccactaccaaaagatccagtttctagatcagccccatataccacctaaaagagaaatcatccttagctctattaaatggttctttagtcaatggctaagcttccaattcacagaaaggaagattgttgaatgaggcaatggtggaaaatattttaaacaaaagcttaataaacatagatgatgtcaatatttgtatcaacccctatgtgatacctcaatttcttctgtaggcttctctaccattcgccaatactccccttcaatattttccacagatggttcactgtgttctttaagagtacttgagctacctccaacatcaacggcatctgcctttttgctgaagtattgactcttgaaatcatctgcatgcttttcaaatgtttcaagagtaaactctggaccaggttcaaacccaaatgtttctgcttcctgataaccagcatcaccaggtgccttattaccaggtgcgctatcagcccccattcttgagcatctcctccttttcctcttcatttgattttggtttactgacatttttctcagagaatatctattttgaagtttgtcaattttctggacacgagtagcaaattttgaatttccccaaatctttttctcctttagtggacaaggaggtttccaagaagaaggaggaacaattcgacatattccaaagggttcagctttagcgcgaatgctcgctatatatcttaaagtgtctttaaactcctaaaacacacaaaataactggctcagttatctaaattcaccaaaacattttatattcaacaaaataaaatgtgcaggtaagggtgtgagaatagtggcattttaatataaaatagtaaataattacctcttcagtcgggtagaagacaggagcatcctggatgtcgggtcttcgagcatccccaggacgccatcttgcaacaacctgttccaagtgattattgtaaaattagcaaggtgaaggatattatgtttaaggctaaaactaatcagataaatgaatataagaaatgaaccttttggcaactactacattcagcacatccacggaatacacccttggggaggtgatacctctacaaattagacaaagtatgagacattgtgttagtatcacattttgatgcaggaaatgataaatgatccaaacgctcataaataactaagaacaaaaatgagcggtgaaaacaaaaacaccaacttgattaatacgctcagaatcacactcatcctcgggactgtaatcatatcgcccatgatttatccatggtttacgccggacggacctggtgacctttccagtggtatcactagcatcagtattagtttctatcttaattaaatgtggctcagaagcaccagtagaggatgaacaaccaggcatgtttttactctcttggctttcagtatcatctaccctttttaagttgaaagaagtaaatgactcaaaacctggtggaactggagggaagtcatcattgtcttctttgatgcaaactctcatgagttctgtccccattggactataaaactaaattctcaatgtttaatcaatgaatatctacaggagcacaatgacttctgttttggcatatgaacttcactttacaaacaatagttaagaagccacaagtgaaccttgcaaagcactgaacagctaagcagcctagctccaaaaagttactccagattgctgagcatagtggtgcagaaatgtgaagaaagttgttctacctgcaaggagaaaatgtaatatttaaggggacaataatgctggaaacctggaatgatggcattaccacaaaaaaggtagtttgatcgataatagttaattgtagaaaacaaaactatctaatcctgctattcattgcttcatattcaccctaacgctgacactgtatatcctaattcattttttctcccaaaggcaaggacctaagataagctttctgcaaattccccctattcacacacaaagggtaattcacttttcattccttatatgctcctcatcctttaaatagcaacaacacaacttaatagaacattcagaaaaaataaatttaaaatttcaatgaaaacaaaaacaacatacaatatgatagaatttcattatagcagaaaaagaatgaaatgtcaagcaaagtaacataagaacatttcaagagaagttagattgaaattgagctcctaagttatcagccacattatactttcaatctgaataaattgttacaatgaaattttattatttgatccttatgatcttgacataaggcccacaactgaaaatcctgacctaatcctacataaacaaacaacacattcttctccatcatcaaaaacccagtagtacctaagaaatttccagaaggtttcagctgaattccaattaatcaagaaatttcattgcactgatcaaggtccctaaattttgacattaagaacaatacgtagcaacataacaaattacagaaaaggacaaagataacccaaaaactaaaattcatttcaaatttaaatcttaatggaatttggccttacaaaattgttgatccaaacgtctgcaaaacacctcagagctaaatccagctcagaaattcattattagaccataaccaaagattataaaaacagcccaattggctaaataaatcccagaagctgaattaatatttttgggttaaaatcctcgtgaaattttcatttatttcaattaattttaataataataataattatgaatccggttgagcagatccaaccctagccctaaccctaaccctaatactaacaagaaccctagaatagaaagcccaaaaacagtattctattcgctacagaagaattggtgtaataggacaagcaacaccaacctttcaaaatatccagaaaatcatcaaaggtactactggactgggtattcaagaaatcacagatggataagggtaaatctggaagaaaactatattgaagaaacttaaatttagggaataaaattgggaattaatcccaaagttctagaaaccctagcccaagaacagaaatataacttatatcatcaaccaaaaaaatatattaaaatcctttttaaaaaaaaaaaatggtaacaaaattttgagtagatagctgattatggtttctttctttacttagaggtactaaaataaatacctttcatttaagctgtgcctaaactaactaattaaaccatctaataatagttaagtaaaaaaaaacatctaataataatattaataaatttttttggaccaaatttacgtaacgtaagctcatccaaaacaaaacatagccccgttcaaaaccattttcttgctgaattttttattattattattatttgtgcaaataaaattaatgggtcggtgattttcttcgtgttatttcaaagaaaaagatatgtatattatagggaaatcgtatcctcttaaaatgaatatattgatgcacccttattt

SEQ ID NO: 297777 - DNA, 1474 bp, Cannabis indica
gcacaacacaattttcaaaaacatttaaccctaaaagtcacccaaatagcgaaatcataagcgaaatccgtctacaaatcatacgattttcaagaacacttaaccctaaaaatcacccaacaagaaaataaataacgaaaaaaccctagaaagataaccctaaatctgctgaccagaaaataacaaatcaagcggggatgtcggtaaaagaatacaataccagaatcaggtcgaaaagcgtggcctgatcaaccttgacgaactcggcgtcccaggatttgagatcgtcatcagcgacgcgctcatcagggtttggggaatcaacatgcttcctgcagtactcgatgaccttagcaagaatcttgctggtaacgttaggcaaaggaatgccattatcagcgcaatcgtcttcaatcatgtgcttgatcgtctgagactggagcgcaaccgcctcttccacctcaaacgattcaccgtctgagctcttgaggatgatcttcttggctgatgaagacatggttaaaacgacggcgcttagttccttttcgacggtgtaagaacacccaaaacgacgtttttctccggcgaaggcgaagagttatcttttctttcttcagcggaagcagaagagacagaatctgaataagcaaagtttgggaatgagagaatggactcatggcttttgggtttatttataggtgctgtgatcgggtgtacgagtttctgtaagaaaaggattgtcacctatatacgtggcgttttcttattggttatagctttctattgacgtgtcagtatctgtattctatcgaaatccgatagataataggacgctttgtatcgatgggccacgctaatacaataatgaatggtcatgtcggtcattttccattttttttacattaattatcttttttattttatattttttattatttttttaagctcaaaaataatatttttttttaattttttttaaggtaattttgttatacttacaacattatctctataaatttttttaaaaaattaaaatagcttaccatgtcaaaaataaatttaaaacacgcgtagtttactagaataacataaactagttttcgatattgtaaactattcaaaaaatttcaaaaaaattaccaagatgatattataactataataagtagttaagtactgctatatatatatatattatttttttaaatactcacatataatttggcatgtaaaatttaactaaaagattataaataacattcctcttctcatttagttaaaaaaaaaaaacctaaaatcatgttgaagtcaaaaaagacacacctttaatgatagtaaaaaaatttcataaaaaaaaaaatgataagtaaaaaattaatttgttttttttttggtttggaagaaataataactggtaaaaaaaatcagttggtacgattttcattaaccttaaaaaaaaaaaaaaaaaaccctg

SEQ ID NO: 297778 - DNA, 953 bp, Cannabis indica
gagagagagagagagttgagaggtaatggtaaggttaattcagcgattggcaggcactgagacgcttccagccgtgtgggacaccgtgtcgttccggtccgtgtggttaggtcgtgttcaagctcagggacgaggctgaagctggtttctgaatctggtgtctggctctgaggctctggttctggttcaggagggctctggtgtttactgctaggctttcacaaaattctctctctctctttctctttctctttctctgtgtgaagtctgaaatagtgttggggtgcgctaaagtgcgcctcatttagcacccaggagaagagaaagcgaggttttaaaaattagaccttgaattttgtatatttacgattttgccactatgaggatagtttttgtcgtattgaatttgtattggtaatggtatgtattattatgtaatgtatgcttattatttctggtctgaacagagatagtgcgggttgctgtcttgatgacgtcatcttttgcaagagattttactggcttcgcagacttacttttgataaaacgacgacgtatagttctgctttttcttctactttttcactgcaatcacagtagtagtgttgttggaaacaaattaattttacatgtgaattattcctactaaacaatttcctcatactaaaacaaaattatgtgagttatttttactttctctatttttagctaaaatagttgaaaaaaattaaaatagaatcattgttggtttaaatatattttttagttaattattttaataatattttataatttaaattgagtaaatagcggtataaatgcttaaagttttatgtttgtaagcgtcataaatttaatgtttatttttagcggtcataagtatccaatgtttgtaaactataatttttacttctaattttttactagtacagattctgttattgtcttaaaca

SEQ ID NO: 297779 - DNA, 9755 bp, Cannabis indica
aaaacatatataaatttttttttaaaaaaacactaaaaacaaataaacaatattaaaaaaatattacaatgcgatacacaacaaaacataaataagaaacaaccaaaaaaaaaaaaaaaacaaaacaaacaaagataaaaataccaaaaaaaaggacctttatagatggagcatgaataattcttccaccaaaaaaatacattaaaaaaataaacaaaaacaacccatcaagtttaacaaaaacatatataaatttaaaaaaaaaaacactaaaaacatataagcaatattaaaaaaatattacaataccatacacaacaaaacataataagaaaatagttatacaaatctaaatatagaaagttgaatcattaatatatctattataatttaattaagaatttgtatgaaattttgtaaatatgttttcaaatatgtgcatttttaaaattgtgtttttttgcacattttttgtaattatttaaaaaaatgtatacatttatgtaaaatgcccaaataaaaatacacactaatttatacacacacgtatatatacataataacttctttaaaaacaatatctacatatccctaaaatcaaatctgaaacacacaaaaaaaaaaaaaaaaacaaacaaacaaaaaaaatcaaaatacttacctgcaaatggaaacgtacgagacgagtggtcttcaaccgaagaagggtgatgcgtcgctggagtacacctgtgtgcgaccgggttcgaagaaacaaagaagagagggagtttagggatttcaaataaaaaaaaaaaaagaaggaaaaaagaaagtgaagaaaatgagctgggaggatatatatatactattattagcggcaaaaaccaccgctattgccccgtcgctaataataaaaataataatttatttattttttattttttaattattattagcggcgaggccctgccgctaatacttttgaacttaacaggcaagaattttctcgctcatttattagcggtcaatattagcagcgggaaatagaggcaaagcccgccactaatactttaaaaataaatacatagtattagcgcgagatctgggttctgccgctaatactacccttattagcgacaaattttacctgtcactaataaatttgccactattgacgaatattgttgtagtgacatgtgagacttactttgggtaattgggttcgcaacatccgacctcgaacaaaatagttaagagctcgaaaattgtagaattgatggaaaattgtaagggtaaaaactaatttcaggggtataaaaataattatgcttgataaatatagaaaagctaatgaaataatgtggcagaaacagtatgaaatgcaccatttcatcaaaagagaacagagaagaatcgaaacagagcttagaaagcttagaaaatggagcagagcttagaaagcttagaaaatggagcagagctcgatgaaattaagagaggtttgcagagctcgcataacagaagaaaacaggaaagtgcgcgaagatatgagagaaacaagtccacgtggaccaatccaaatgagagaaagagagtggtttaatgaccatatcacctattaataggagacccccatcgttcaaaaatggcacagattcttggccacaccagagctgtcaaaatacatcctcaaattattctcagatcgagaaaagagaggtatagagaaagattagcaagagatatagggaattgtgtaaattggcaaaacattgtaatttgattggatcaaaccctagtgtaaagagtttcatgttctaatacgaatttattgttgagttaattttcacatcaacaacacccatcactgaagctttaggacattttacaaggagttttttagcaacaagggatggggatgaggaagaacgagtaattactattagataggggtgtttgtagtgcgggtggtgtgatttttggccatttttaaactaacccacacatgcagtttttttaataatccaaactgcacccgcactgcgaaactaaaaaactgcagaaaccgcaccacaaaaaatagtgcggtgcggtgcggtttttgcgatttcgactatcaccaataattaaactattacaaatacaacaaagcatgagcaacacttttcaaaaataccataaggcttgaaaataattatgaaaataaattaactttcaataatataataattagtaggctttgggttgaacattcacatattagacctaaataaatataaaaattagtatttttataatgtgcggtgttgtgcggattgaaccgcatattaacaattcaaaaccgcaaactgcaccgtaccgcgcagtttaggaaaaattcaaacatcgaccgcaccgtatcgcaaataatttcaaaccgcaatttttttgtggtgcggtgcagtacggctagtttaagcagtttgaacggtttaatgaacatccatactattaaggagttatttatacaaataaaaaaattaaaaattaaaaggagaaaaaagttgaaaaaatgaaaaaatagacgatgagaaagctatttcacacatatataaactaaaaattaatgcatccaacatactatttaaacattgtttttggtgcatgaaattattttaaatttcttaaaaatttataaaatgtctcatagatataactacaatttacactatcatatataaaaaaaattaaattaaaactatttgaaaattgaaaaccagaaaatgtacatccatacacataatttttttaaggtgtttgcactgtaagatttctcaatttccaaaataaaaataagtttagaatcgaaaacatggagcaagccagctctgcagtagaggttaggtcggtatggtggcccattcctatccgttggattgctgtgactctgtctgatcagacggtaggaacatcataagtctgtgatcaaaaagttggagttcggagctggagctggaaattgtggtgagtgttagatttagaaagaagaaagatgcacctaagccagaacgaagggattgaggggaaaacatttgttgtgactgggggtttgggctttgtgggttcagctctctgcttagatctccttcgccgaggtgctcgccaggtccgagctttcgattttcgatcccaatctcaattctctgaacatcttcaccaacatggagcacaatgcatccaaggtaactcattttccattccttctacttttgaaagatttaaaatttttatttattattattatttttaagtttactcccaatccatcggatcgatcattggccaattttgtttatctatgtctagctttacttttttataatttgcatcaacagaattagggtttgttgtagaagaataatacccaattttattaaatactaaacagtttactttttctctttggttgttggttaagttcagtactgaagaagtagacactatggaataacaagaacactcaattcttattgctttcaccttttgatttgaccccttttattaagattgatcattgacaaaagtctcggtttcaatttgtatcaacaaaattagggtgtgcagtattgagttttatttctatgcaaatgtagagccatgagcagattgagtagtttatatttgttttttcttttatctatctttagttaagtttagcatttcaaaaaagtaggcacttgggtagaaaacaagatacccaattcttatttattctcttttgataaaaatgataggagatgtcacccaaaaaaatgatgtggagaaggttctacgcggtgccgattgtgtgttccaccttgcttcatttggtatgtctgggaaggaaatgctgcaatttggtcgtgtggatgatgttaacattaatggaacatgccacattttagacgcatgccttaacctgggaattcaaaggcttatctatgttagcacttataacgttgtatttggtggaaaggaaattgtcaatggcaatgaggtcttaccctattttcctattgatgaccatgtcgatccgtatggtcgtagcaaatcgctcgccgagcagttggttctcaagaacaatggtcgccctttaaagtaagtactttgtaattctaattcttattcttacgattttgagtttatagttgaagggtttgaggaactcttttgtctatgcactttacagaaaaaagactggaaaatgtcttcacacctgtgccattcgtccagctgcaatttatggacctggtgaggaaaggcacttcccaaggatagtgtcccttgcaaagctaggcctgctgccatttaaaattggggatccaagcgtgaagacagactggatttatattgataatctagtactcgctctaatattggcaagcatggggcttctggatgacattcctgagaaggagagacgtctagtagctgctgggcagccatattttgtatctgacggtaacaactgcccctttttacacctctttgaactttatgacttgaaataatgttcttctgttccaaaagatctaattgaactgaacaaagctttgttgatatctaaaagccaagtacatctgcagggtctcctgtcaacacttttgagttcattcgacctcttcttctaggcctggattatgacctaccaacttcttctttagctgttccgcaagctcttcgcttgggaaagattttctggggtttctatacattgttatatccatggttggatcgatggtggcttcctcaaccactgatccttcctgctgaagtgtacaaggtttctcttctgtctttgattttttatttagatgatataatgataatgattttgtattgcaagataatgattttgtatgtcaaacaggttggtgtcacgcacaacttctcctttcttaaagccaaggaggaacttggttatgttccaatggtaacacctcgtgaaggcatggctgcaacgatttcatattggcgagaaaggaaaaggaaagcgcttgatggacctactatttatgcttggatattcgttgtgattggaatgtgcacactattttgtgctgcctatttaccagacataggacctgtcccatttttcagagcaattagcctctctttttcaggtcagtgtggatgctaagaacggtgttccttacagctacaatactacaccttggagaagctgtatatgcatggaatctggccaatagagttgaccctcataatgcaagaggatggttttggcagacatttgctcttgggatcttttcattgcgtttactccttaaaagaagtgaagaagcaatcataaagttagtatccttacactaatctatttctattacgttacataaagagtgggtttagccttagggtctgattttcatcaagttattttattctttgtgactccatattgtgattgggaaaagacagagagaacttataacatataatatttttttttatatatatataaatatcctttcataataaaagatattatacagattcttctctctcacacatttcaccttccttttccatccatttcgagattttgtaatggtcttttctcctctgggttgagcatttttcaagctaaaagatatccacctcaatcttctttctttctactcttttgggtcgatatttttttttgctttgtttagtaaactctttctcttattagagttttgatagaagagctcaagatgataactatacttgctcttttaagttttttcttcaccactttccccgtatattttcttttctattctccaattcattctacagtagttcagttgtaatttattctcttcacttgtagtagttgaaagcaaaggacctcaccatgattataggttggtaacagcaagaaaagaactaagaagtgtttcggtttgtacaacctcagactgcaactcacagaacaatcctcctttcgagggaatgcattgtcgatttagctacttcactgcaatgcaatggcgaagataattactatgtacagaaaaagaataaattaagcatgtaggcgaacaagaaaaagttatgctgttgttttgttatgttttgttgggatataaattttgaaattgcattaggtcatagtttctttcaatgttttcagtcttttgtgttcgaatatgtctaaaattaattttcattgttctcgcttaatttccaaactttttagttagtgattggtgatttgctcactctcattcatatgtaaaatgtatatggaggttttgttttcccctctaaatcatatgtaaaatgactaggtgtattaattcttgagttgctctttttacatatttatcaatatttgaatatgaaatgagacggtctttcattttgcgtcttctataaaacaaaatgaatcaactgttatcattagtaaatttacttgtatcttagattcaaactgaaatatatacaatacacactccataaacataaaaggagtgcaatgatgcactcctatttatttcagtttttacaacaactttttagttcaatttttatttatggttgctaatattatagttattgaagacattatgtaactttttgaaaaatctggaaaaatttaatatgcagaaaataatttattttacgcgcgtataaaataaaagtcgcgcatgtaatagattgcttgaatcgtatttttggcatgttaaatatttttaaatttatcaaaagtttacaaaatattttaaataagtacaacgtatatgattataaaaaaaaataaattaaaaaatcttcttaaatgtataaataaataaaagatgcattacagggtgcaccttatattatattatatatatttagagctaaatatggagtaaaactttgatccttcatacattttattatacctactatgcaaacaatttctctctataccacaaagtcactaccaccacctccctagcaccatctcaacgctatcattgccattaatgtcgtcatatcccccatcactattgaagcacctattagtttttttttttcttaatgtttaaataattaacgttgtacaattgatgtctaatgatgttatgatttttttttttggcaaaattaatgttttaacgatgttattgcaatgaattcatgcagttttttagaaaagtactatttaacgatatatttgtgatagtctgcgataaaatttgattaaaaaaactaagcaacaacttttcacctgaatgtcaatttgaggtgtttgtttgttttttttattaatttggtattttttttccttcaaaatactcacatgtgatgcgtataacgatgtttaaataattgatgttgtacaaatgatgtccaacgatgctatgagtttttcttggcaaaattaatgttttaatgatgttgttgcaatgaattcatgcaaatttttattggaaaaataatatttaagtatttaacaatatatttgtgatagtctgcgaatttttttgataaaaacactacgcgacaacttttcacttgaatgtcaatttgaggtttttttttattaatttggtatttttttcttcttcaaaatcctcgcatttacagtgtaaatgtctaacagtcattgccaccagacaagtggcctagtggtactacttgctttcctgtgacatgaggtcatgggtggttccctctcgcaagaagtatttaatgaatccaaggagtcttaaatgtgaacttttggtgccagtccattcctcaaaccctctacttcaggaaaagcattcaccactagtaatttggtgcagtactggtgacacatcccatcgtaggtggaggagaccacacaaattgggttttggcgaagattccaaggctaggtttgagctctctcggtaacgcctagagggggatccacactaatagctccctcctcccctttttattccatacaaaaaaatctaatagtcattgtattaatatagtgtataacattcttttggaaatatattttgtatattattactgctataagaacatcctctatgcatgatgcaattgttttttattaatggaaactttattcaaaacaaaaaaagactaacgtctcaaacatctaagttagtggaaacaagaggttccacctcctctttactaaaagagccaaaacataaattaggagcagcccaagctgcaagacaatgagcttgaacattaaaagtcctacgaatccaaataacacgacatgctaaaaaagcaccaatcactataaaatgtcgcagaaagttggatttgaatctccaattttggagccttgttgcaatgaataccatccaccaagcatttgcaatcagaaaaaaaaaattatcttagaccatcccatatcaagcacaaagagaaagcgtgccaaagagtaagagtttcagcatcgaggggtccccacaatcaaaactaacagtaagaccctcaagaagatcatcatcgctactatgaacaatagcagcgccaactcccaacaagcccctacaagcaacattagagaagacagccacaaaacctgcaagaatgtcggccaactcatcggtagccagaatagaaatagctttgctgcccacattcaaattttcaacaatataaagaccctgtagagtattatgaattgaaacttgaatacctcttgctgttgggatcactttttcgtggaaagccttattcctagctccctaaaactcgtaataaagatacaaatcaaagttagtgaaagaaggactaatggccccatgaggcaacacgagagagtcaagtttcaacaaccatttcaacaactctaacgaggtagagaacacaagaaattcactccttattgaccaaggacaggagaaccagaggctcttagccaaagggcaaagacaaaaaaggtataagaaataatcatcgtgaaaatcacagataacacacttttgcacattatcgaaaatttgccccaaacgactagcaaaatgaaggacatccctaccaagtttatagagcaataacttcggcctcacatgatctttgagctatcgcacatctttccatatcccatctcctaggccagttctattcttaatgatagaaagataagtagatttaattataaactacttccatacaagatcatcactatgcctagaagaaaggttcttaatcgaaccaattcgaagtagcaacgctttgaataaactagaacttaaatttattcatgtttcgctctccattctccctcaataaagaggagacatggaaagtatttttcacgatcaaaggattgaaggaagccttgtattgatcccaagtgagccaagaaatccaatgagagtttcaaatgttcacttccctgtcattaccaataagataataagcttcatctctaatcaattatctagaagaaagaattcttctcacaccaaaagaagcattgctaggtaattttaaagaccaaaaagaattaaagggatattggcagtaatactacccaaactacacatttagttacacttaatctcacaaacccaatttttggtggtaaaactctctgaacctcacttctattttgctcattacactcccgtctaaaaatctcagttgagtatacatgtggaaaaaacttagtagtccacgtaatattaattattataaaataattttaaatatttaaaaattttaaaaagtagaaaaaaaataattaattttttttctttttcttcttcttctgaaaaccctaatatctctctctctct

SEQ ID NO: 297780 - DNA, 3150 bp, Cannabis indica
tgcctcgactctcaagtatgaacatttaaacctatatctgccctcgaaattcgaccccccgccccaacgggagaagtacccgtgggtataattatcattcctactcactttctcatcattcagtcaatttagagacttacaagtttgtttaaaagtaacattacgttaccatccaaattattatgtactgatatatcgccttccaaagacacctccatagataaaagtttttcttcacttgaaatttctaatcaaataatcaatcatgcaccattgtacattgaatatctctcatctcaaggtgtcgagtatatcatagataaaaccataaataagccttaaaattgaagataacaatgctgtatatattaagctaaatctatatggcataatatatgtaataagaattagatggatcaaactatttacatgataataacaaacaagtactaaaagcaagtacataggcagggcactgaaaaactaaagagatggtaccagactaccagtacgtatgtatctctctactgcccccatgaatttgcagaatttcctctcaatccaatgttaatgcaataataactgtttaaagaataaactaatccatcctcgtaaatgaaaaacttaagcttttacatctttctctgtctctgcagctgtggaatttgtagagcctgatattggttttgaagagaaaaatgctcctaatgcgtctaagaagaacctcttattaggaacaatgccatctctctccatatgcttcaacaggttctccacaagctccttcatgttggctttagtgtaagctttgtaaagaagcttatatgtagacgcgtttggggcaacgcctttactctttgcactctcaaaaagcttatgagcttctgttggcaagccattcatgcaataaacatcgagcatcgcattcaatgttgaaggcttaatctccttcttagattcacacaacttgtcaaagatttcctgagcccgggaaacacagtcacacagcccatacatcattataagactctcatatgtgatgaaactcggcgtgtacttcatatcagtcatcttcgcatatacatcttctgccttttccaattggcgtgcctttccatagtttatgatcattgaattgaatgtaggcaatgttgggctttccctggagcgcagtaagctcttaaacacctgatccatcttctcaaattcctgtttcttcccatacgaatcgataagtaagttaaatgtgattatatcaggtttggtctgaattgcttttcatcatagctagaacagattccatttctctgatcatcccatttttcccatatgcatccatcacaccgttgtaggtgtagatatcaggggaaacaatgctctcatcaagatctttaaacaaggcattaacttgctgcacctttcgagattgagcaaaagctctcaaaagaatgttgtatgtgacaatgttgggttgacacctttccatacctttcatcttctcaaaatagccaatagctttcgccaaagcctttgatttgtccctggagtggagatgggctgttatcacagagttgtaaacagaagtatcaggcctgcagccgctgtttcgcatctcggagaagagccacatggccattctcgtttgcccttttcttcccataactgatataagtttcgaatacacaccattatcagctatataccatcgctgtttctgcatccatctaaacacctgaattgccaggatgattaagtcaagccattaactatatttccttcctaaaacttccagactaataaccagaaaccataacagcataaattcaactatgtttttattttctttcaaaatgataaaaatacacacaactacatagacattattacttaaattcaacatttatcagaaccccacaagctaaaacttcttctaaaggatcactgagaaaaagaacagaaaaaaagtataaagataagatgatgaaacctcaaggcaatgaatccactcttcgaagctcattaaaatcaacagtatatttcaggtaataaaaatgtgctattccactttatatctattgacatcaaatgtaaagctatactcaactacatacatacacaaaggctcaaaggaatggtaagaagataagataatcaaacctcaaggcactgaagccacttatcgctcttcccaagttcttcaaaaagaagaaaacagtgttccgttctaacaattttgacatacttgttaagcgtcttcaccaatggctccttgtcactgaaactcctgatgagtatgcgaaccaactccaaagtctccgagttatcgtttcttacggtggcttttcttctgggtcgagtcgatacgcacgagattgtcgatatgggtctgtccggaagagaggtgcttggaaaccataactgggagaagctgtaattctgagcgtaagaatgggtgaaggggaaattggaaggttgaagagattgtgaaaagcttagggacattatggcgttaatgggtgtgggtagctatagttggaagttcagatagaagaagtgcatagtggtgggtttggtaaattcgaagtggatttgagggtaaatgggtaaataactttaggcttctaagttttttgagttctgacttctgaggccgccgtagagcaaagagataagagtttgggaatcaaatgacgaaaataccctcattttctcaggaggaggaaaaaagtattcaagtggtgggactttgaacccgacgtgaatcgaacacgcaaccttctgatctggagtcagacgcgctaccattgcgccacggatccacttgttgaaagattctagctctagttaatatttattctaagtaagtgaataattatatattttcttagaaatttattattttacattattgtattttggatttgtttttaatgttaattttctgctgtatttttttcgttatttcttaaaaaagttttagaaaattctacaatgcacccccttaaaatggatatattgatagatccttatctgttttagcatccgaaataattttttggtcaaactttttctcatgttcacgtaccttatagttatttaagacattctacaaagttttaaaaaatttggaaaagtttaacacaccgaaaa

SEQ ID NO: 297781 - DNA, 2783 bp, Cannabis indica
aaaaaaaaaaataattaatcaataaacattacaaatcaactagggttgttacctcatgatacaaagatcaccctttacaattgatctaataatctcataactaatctatccctcttagcaaattccacatatttataattacaactcttgctttaatatacaactttatcaattgtaatttgaatcgagattacttgcacagaattacgggcattagtgaatcgcactagcaaccattgattaaaggttcctaaactttactatgttactgactgttttattcatgggtacgcgattttaattctccgtacaactacaagtcacaatctcatatatgaataaagaatttttttgatatttatatataaattattcaatattagatattaataatttaatattcatgcatatgtcaagatattcaactcttgttaataatcaaaaatgtctttacaagattttcagggcataaaccctaacacgttctgccttcatataattccatttgtggcattctgaaattttctagcaaggatgcttctattattattttagtatgcggtttcaaatcctcctcttccgaatctgacacggcttcgctttgtttccaggctaaacattctgtgagcttagtcaatgcggtaatttgataatccagccgcctagtatgttcgtccgggtattcgcgttcccagatttcatggttgatactattcctgagatcgcctctacaaggattttctttcttgcctttggattgatctctttttgcattcaagcttccctggaggtctgctattgacatactatcttcagggaaaatttctttcactccttcactctgcttaacaaaatcaccagggtagttttttctgctgtgcaattctgccttgtggatcaatcgggtgaccttgccctagagtatcgacaaccttctttttttgtgtaggttggttggatacgttcttgttgttccttggagaatttatagcagtcttttttgcaggttccttcataacaccttttcctttgtcccttgtgggatcagaagttccaagatctgtaagattagccttttttgtagtgttattttctagagtaggctcctcaagatcattttcttcaagatcttcatcttcgagcttgatttgggtttgcaatttgtatttgacgagaaaatacctactgggctgccaatttttatttagtctcaagaagctccttagccatccgaattacttcgagatctcgctcgtaataatattagtccacatttttattattaccatcatatttaggatcaccatgctggtcttcctgatcatcctcgtcaataggatcacttgcttctcccactgctgattctttgtggcaggacgactgtccactttagacgtttctccatccctagctacacctttcttggcatgtgcggtagaggtggatcaacatcatccatggtcgaagctgcaccatgagcagtcgatttagagacggtggttctggtgactaccattgttatagtgtggaacgttggtatcaaatctttcttcagtctcaatgaaagcatcaaaatatttactgagatattaaaaaacaaatataaaatataataaaactaaagaaaataaataaaatataaagatttagaagaggattttgacgtgattcgagtattaacgagctctagttcactagtcaatattatttagctagaaaagcctttgagtactacacaagtatttgttcacgttttatgaaccctatttcttaccttaacttgtaagaaataaattttcaaccgtttgcatgaaggattatcattatatttattggcttagggtttctatataaatgtggcccactgatggagtaaatacaaattatataaatgacatttaggtcgatttgatgaggcctagcacatgaggctattgttatatgcttacgtgtaatttacttgacaacaggtggaaaacgtgagtcatttccacgtataataaatgtaatttgatgactgtttgataatcaccatattttcttgtatggaatgcttgatttttggaattaactttcgaaacaaagtcctgatatgatgggattctttattaaatgagcactgaattaaccttgacatctagaggctatttatcatctttctggaagcatcactagtgggtattcggatgctctctttgttggactctttttgtcatctagacgagatatctttccagaacctagatggctcgacttaataaattcaatccattatctttattgggattataaattgggcctttgttaattgaattttggtcttggaagtacatgtgtgtctcttctagaaacacgaataataggaatgttaagttatatcataataacttaatttaagaacactttacattttcatacaaagtgatgatatatctttaagatactaaagattatatttatacatactttattgaaataaattgatattttggaaatttagttaaccacttaaattatgacttcactcattatattgattcatataaatcaatatttaattacattcttaagattaccattaggttgtatcgaggagaaccttaattttctttccattatagaagttagattcatttattgttttgaggatacatctcttatgatgtattatagagtttcatactaggcctagagttcagaattatatttttcaagcctgttatagtgagatttctctcacctagaaacttgagaccaaacacctgtttagaggacacgtgtac

SEQ ID NO: 297782 - DNA, 4785 bp, Cannabis indica
attatctgtcataagtagctggagtcaatggattcagggaaaaccacccgaagtgattggatcatagtctttttattcttttcttctctttcttttgtaaatttggcaggttttgttctattcatttttttttttcaattataagagatgaagctctagaaatgatgcaataagtgtcttaaaagattcaaaagcttttggagatggggatgtaacgtcataattaagctaacaaagaaccatgaccacttatctttttttctgttcctgtgtaatttttgttgcctaggctaaggggctgagtaatttatttgagaaatggattttgagtggacacattttgggggttactatagccagagtgtataacatgtagaaaagatatatgggcattgaatttgttgctacagtcatggcttagtaaacatcagtgtaattgacagcattctgcctaactttagctttgaagcacttatctatgtacaaatgatccccttctcatttgctattatgaagtttgtggctagatcctctggaaccacttagaatggattccaactcttgaaggttggaatatgtgtgagaagtataaaggcattgtaactctacatgttagttatgctttgtaattttgctagtgatgctcttgcacagataattggagtaattatagtcttctggatatagaatggaatgtaattttttggtgtataagtgactggttttaactgttttttttctcttttatctaggccgtaagttacactagcttgtttgagttgagtttagatgaattgaaacccattttgtacaattgtccatctacccacatggctctctcacggggcacattccacaattctaaaattggagctgttctctttcaattgtagtttgtgactctctttctttcacaggcaaccaattgtgttacctctgtgtagagatagatcttatgatcaaagatcatagacataagtatttagatgggaatatgtgataggtacatgtgtgttatatattaggtgtaggactgactgcaaagtgggcactaatggaatcaatgatttgattctactgaaagatctttcaaggttgattttggacttggatttctgtggaccttaatcatgttgttttgaaggcgtacttgtgggcaaaaaaaagggtgtagaattgttaataagtgtggctgatgaatccttttctgtgctactgaatgtttggcacctctggttttcattttaaatggtatcttatcatttactctatgctatctatatagattttctctttacaacgttagtgtggtcatttttgctattgtgaaggtgtattttggctaattaattaagttttatttctgttctgtgttgtttgacctttatttgggaatgagtattttatctttctttagcatagttaatgtgttgtatcaaatattgaacaaactttgacaagtttcacttttcagggttttctgtatagaagaggtgtttatatcaaatttagcttcaaagatacaatttagcaagaattaacacttgtggttcttctaatgcacactctctcttggttgtcttgaaagaaactaaatctgagagaaatctgttcattttacctctttctaataaacaactacaacttctctcttcaattttttacctttttccctatcagattattcatccatggatctatccactgaagagctccaatttttgacaataccaaatattctgagagaatcaatctcaatccccaagcagtccccaaagaccttctacctcatcaccttaactctaattttcccactttcttttgccatcttggcccactcgctcttcacccacccactccttgcccagctccagaacccttatgctgacccagaagagactggtcacagatggaaacttctccttgtcttccagttctgctacctcatattcctctttgccttctctctcctctccaccgctgctgtcgtcttcactgtagcctctctctatacctctaagtctgtctccttctcttctactgtgtctgccattccaaaggtcttcaagcgtctcttcgtcacctacttgtgggtctctctcttgatggttgtctacaaccttctctttgttggtttcttgattctgctgattgcagctatcgatatccagaacccatttttggttgttttttcacttatagtcatagtcttgctcttcttggtggtccatatctatatcactgcactgtggcacctggccagtgtggtttcagttttggagcccatttatggctttgccgcaatgaagaagagctacgagctactgaagggaaagacccgcgttgcagcaatgcttgtttttgtctacttggcaatttgcatggttattgcaggaatatttggagccgttgtagtgcacgggggagagaaaaatggtgtctttttccggattgtggtgggggggttcttagtgggcgttttggtgattgtgaatttggtgggattactggtacagagtgtgttttactatgtatgcaagagctaccatcatcaagggattgataagagtgctttgcatgatcaccttggtggctaccttggagagtacgtgcctctgaaaagcagcattcagatggaaaacttggatgcctgaagtgatgcaagcgttaatgtcgacgagttagtgtgtaaagaaaaaacacagataagaaaaaaaagtttaaagaaacaaattgtggactctgttgtgatcttttacttgcatttcccaaatggaataatatgttctttagtcctcacttttcatgaacttctcaggttgaattattttcataatgatattggcaattcacctgtaaaggaatggttaatattcatttactcatacttatgggcataattattatgattatatttgatcatgtaagtatcatagatttagcattaaatctggttgattttcaagtcatgtatcatatttgttgatgcttatagaaccggaatatatttgattgaatgaatttgatgataacctcttttatttggttacattgttgtggagatttgaggcaggtgtataataataaagaccacacattttgttgtttatgattgtttttttaagagaaaaggaaaaagttgataaaagtgaatgttgaagtgatcatgttaaacccagggcagaacacaagtgtcagctttgccaattgacaccaccaactactattattaatttattatatttttgccttctctctttctttcatatttattttctttatttattttattttttgaaaataaaataacaactttaataaaatattagatgtaaatctgtccaaatattatgtttaaaaatgctacaactaaagcgatatcagaattatttagctataacatgagttactcgattataaaatcgttatataaagagaaaagtaaaaattgacagcaatgaataatcaaactaaaaacaacaatttatatgattagtcaagtgagtgcctctttgtttgatacccatagcttttacaatctcaggagtgtaaacacctccttataacatgttttgacttcaataagtttacttgaactgtcttgtgccataattctaaagctatacgaattttctttttcaaataaagttgcattaacattaatctcgatatagttagttggttaaattcaatacttgccatcaccattgttttcaaaagacaaggatgataaacaaattttattccgagccttacacaaataatcaagagttacacaagccaatgatcaagttttgccttctcttccactaatacatcatattgtcctttattttaattaaattttaggtgaaaattttttgttaagagtggatggtattagattacaatactaattgttttgttagaaaaacttctatcttctttcaagtgttagacacaattatacttagagaattattaaaagatatcattagtactttcggtgttataccgctattagtgtaattaagtatcagattttatataatatttaaaataaaataatttttaataaatattactaaccaatcatgaatcatcctataaaaaatgtttacccaaatgctcttgcaacttccctttgcttaaccttgaacaaccaacatttattggctccatcaaactcaatcgttctttattgttattattattataagtcacgtgatctattattaggcatctccacacacacctaccccatatttctcaatcaccacgtgccagcaacatgcaattagaataatcaaactaacttttcacaccattattatgcttctacttctacactcctaatatttgctaccacaactttaaatcactcactagtacaaaaatttataaaattatatagttcttataagataatattaatgaaccaaattattaagaagactattataaataaaattcaaaatgtaaaaattatatgttaaaattaaataatttttttaagagtaatttacagcgtaaaatattcaagtttaactctcagttacagataaaagtgtcaaatcattatttatattttattttgttattagtatatttaaattaatttttaaataaaaaataaaaatttaatgacttagactaattaaaataccacgtatcaatttatttatcatttaacagcctgatagctgttatattattatcacgaaaaataaaattttaaatatttatttataattattaattaaatttaaatatttatgccataaattatatttttaataattacat

SEQ ID NO: 297783 - DNA, 3789 bp, Cannabis indica
aatccattcagtctcttcttctctttcacgaaagtcgattggaaagacattacaccattggagatcaaccatcaaagccctctgccaatctgtctgtgagctcttcaagattttctacaggttcaagaacaagtaattacaatgggaaaggtggtgccccaagttctttcaaccatagcaaccccagaccccatggtcgtggatatccctcaaataggttagtgtgtcaagtttgtcccaaacttggtcacactgcctcggtttgtcactatcaattcgataagaactttcaacctccaaaaaccagtgaccatcaggcctttcttacagaatttgaggaagatgatccttaggcctacttcaccaattctctcccagattttgctcaagatcacgaatggtatgctgacagaggggccaacatgcatgttgctactggaatggaacaccttgacaatgaaactccttacttgggatcagattctttagctgttggaaatggcaaacaactccaaatctctcacctaggtaactcttccctaactacaagtagatctcctttacagttaaattctgttttaaaagttcctcaaatcacaaaaaaccttgtcagtgtctggaaacttaccaaagataatagtgtatttcttgaatttcactcaacttgttgttttgtgaaggacaagaaaacaggaggggtcttacttaaaggaagagtcaaaaatggtttgtacctactcactcaacccaccacaataacacctgtccagatcctatgtcaattagcaactaaggagccgaaatgtctttctaattctgaatgtaataatgtctgaaataacgagactactactgtagtctccacctcatgtactgattctaaaatcaataaagattccagttttcataacattgatctttcacttactgcttttactgctactagctcccaggacattaacatatggcactccaagttgtgtcatccgggtcccaacacacttgcaaaaatcatgtcaaaaattaattacaaaagcactttcaaacaactcaaattttgtgatgcctgcaaaataggcaaaagtcacaagttaacataccctgtgtccaccaatagagccttggtcccattagaattggttcacacagacctttgtggacgtttacatatcccatccaaagaaggctacagatattacattcactttttagatgactttagcaagtttacttggatttttccattaacaataaagtcacaggcttatcccacattcttacaatttaaatcccttgtagaaaaacaattctctcctcccattaaaaaggttcaatctgactaggggagagtataggagttttgcctcatttgtagcagccaatggtgttcaatttcaacactcatgtccccacgatcatgagcaaaatggcagggcagaatgcaagcatcgacacataaatgagacaggcatgacactgcttgcacaagctggtttagatctgtcatattggtggttctcctttcagcatgcaacatttgttataaacaggcttccaacacctgttctggacaacatatctccctatcagtgcctcttccataaacaacctgactatgagtttctcaaggtgtttggttgcacctgttttctctatcttagaccatttcagcaacacaaaatgaccatgaaatctgagaaatgcatttccgtggggtactcttttcagcataagggatacatgtgtgaaacacaaacaggcaaaatatatgtcactcgcaatgtagtgttcaatgaagaagagtttcctgccttactcaaatcagctacacctcaggtaaactcacaaccagctcaaatttttgcttctgcaacatttaatacagcacctaataatttctctccttgtgttactgtgcaacaacctgctgtcatcttgcccgatgagccacggcaacattctaatccaagttctcaatctataccacatcctacaaacaactgtcacctatctcagcacccatttctgacacagctcttcctatgtcgaatactagcaccttatccatcccagcatcaaacatctcaccaaaaatcagtcccacatgtcctagccagatacttccacccacttagacaaccaacacacactctatgcagactagggccaagtcaggtattcacaaacccaaagcctacctagctacaaagtatcctctaccagagtctcttttacccagagaaccaacttctctcaaacaagccttagccgaccctaaatggaatggtgctatgagtgatgaatttgttgccttagttcaaaatgggacctggactcttgtaccatacaaaccaggaatgcatgttgtatgaaacaagtgggttcatagggtcaaattgaacgctgatggcactcttgctaagtgcaaatcacgtttagtggccaaaggatatcatcaaactcttggtatagattactcagaaacctttagcctcgtagtaaaaccggccacaattcgaataattctcacaattgtagtctcatatcagtcgaaagtcactcaattagatgtgtcaaatgccttttctcaatggcatattgacagagaccgttttcatggttcaacctccagggttcgaagacaagctgaaaccgactcatgtctgcaagctgaacaaagccatttacggcttaaaacaggcacctagggcctagaacgagaaactaaaaaatactcttctcagcaagggattcaaggcctcaagagctgactcctccatgtttatctttggctcacaacctcatctcattattcttttgtttatgtcgacgatatactaatcacaggtccaaatttgactagtatcaagtgcctcatacaagaactcaacaaagaattctctcttaaagacttggggtctcttcactacttaggagttgaggtacttcaaaactccactggtatgtacttatctcagtctaaatacatcacagatcttctcaccaaactcaacatggaaggggctaaaccagctgcaaatcccaccagttctgctcatatgtcctcacattagatagtggaaaaccctttgaagatcgcactctgttttagtaggtgctctgcagtacttgaccttaaccagacctgacatcatgttcattgtgaacaaactcagtcagttcatccatgcacccactactgtgcactgggaagcatgcaaaagattgtttagatatcttaaaggtacaatacatgagggaatccatctcagaccagctttacatctatctctccatgcctattctgatgcagattgggcaagctccccagatgacagacgttcgaccggtggttatgcagtgtttttagggggcaacttaatatcatggtcagcaaaaaagcaaaatgtagtagcccgcagcagtacaaagagtgagtttagagccttggccaacactgcagatgaagtgaaatggctctgctatgttctctctgaattacacttcaccttacctgctgtaccaataatctaggttgataatcaaggtacagcatctctggttgcaaacccagtttttcacgcaaggtcaaagcacatcaaaattgatctgcattttgtgcgagatcagatactggccaaacagcttgaagtttgatttgtaccatccattgatcaaacagctgatatcctaacgaagccactcaccaaagaaagattcaactatctaaaaaccaagcttcaagtgtgcaccacaccatttcgcttgaaggggggatgtcaaccaact

SEQ ID NO: 297784 - DNA, 5823 bp, Cannabis indica
tcttacaagtagtattgtctcaactgtatgggggaccatgggcctatatacctgagcttccaataagcagctatggataatgcatcctcatgtcagactctagttccaatgtggcttccttcaccttgctatttctcttgagtaccttaaccaatgttatggtgttgttcctcggaattttatctttcctatcgagaatttgaactggttattcctcataagataaatctagttgtagttctaaggtgtcataactcaggacatgggttggatttgatatatacttacttagcattaatacatgaaatacattatgcactgcggacaatgcttgatgtaagcctttccagtatctcaaatggtcgtgtaaacctaggggacaatttgcccttcttgtcaaaacatttaacacccttcatgggtgaaacacataggaaaaaataatctcctaccttaaactctatatttttgcgtttatgatttgcatagctctttttcctactttgagaagtaagaatttgagccttgatcttttcaacagcatcattgctcctctatactgtctctagacctagatatttcctttctctagtttcatcccaatgaatcggagaacaacatatcttgccatacaacatctcatacggagccatccctacagtagcttgtaactattattaaaaggagaattctatcaatggcagatacttgctccaggaaccttcaaagtgcataacataagctcgtaacatatcatacaacattcgtattgtgctctcagactggccatcgatctgaggatgaaaagttgtaattaattttagctttgtacccatgactttttaaaaactcttgcaaaacttataagtaaatttgggatctctatctgatacaactgactttagaactccatggagattaactacttcctttacatacaattctacatacggatacactgtataggttgtctccactggtgaaacgtatgctaacttggtaaaacagtctacaatcacccatatcgaatcatacaatcctttgtttctaggcaatcccacctcaaaatccatagcaacattttccatttctatttaggaagggtcaaaggttgtagcaaacctacaggtctctgatgttcatgttaggattttaagccctaaataaaacgtattttaatataatcagatttactaattaataaaagatcagaaattattttatgttgtatggttcacattattactttcatgattatatgtttaaaatataaattctattaaatcatgaacatatagttattcatgattatagtgttctctacacaatggaaaataatcataattatatgcttcaaagtatttagtcccatcatattttagtgcactagatttacactaacgtgataatcattgacaaagtttacttacacaatgagatgtggaatgtcctttgtagggcattagcaaagtattttagtatcggatgtattatgtatacattgaactggggtgatattgatagtagaaatgatgtcataaacttactattatgttcttttctaagtcaatatcacttagttaatcttagatcaatagatcttaatcctggggtggttaggttctggcctaaatgtattatatatgttctttgacttgttcgttaaagctgaccaaatagatcgaccccatacttacatcttgggagcatgatagtacaattgagtgggagcgctaatcatagatatcgaatctatagatgctataactattagaagtgaagcgatggtttccttaaagcatggcttaatgcgataaatgatggagcactcatttcagtaattatattagtttactaaaatatcatttacaagtagctaagtattttaaagataaaatacattgaagggtagaactgtaaatttgtccctactcgttgtagatcatctatacagaatttttgattatttagatttaaacaatggataatttatagcgtatctatacttgttatagagcgctttatataatcaggagtgcgattctgaatctacagttgagtcagtacgaattaataagatagagtatttttttttttgataattaaaattttattgaaacgaaacgagaatatcacaccaaactagtagccacaaagggagctacatcccttagacaaccctctgctttagccttagcacatctagcccagcaagctaaagcattcgcacaagtgttatcaacacgagaaacatggctaaaagtaacaacattgaagcattgacacaaaacaagacatgcatcgaaaataggataagtaccccacgcaaaaggcaagtaacccgacttaagagctcgaactgccacgagagagtctgagtggatgtggattgtagagccacctctttcttttgcagaccgaagtgcaagccatatagcctgtaattcaccttccagcacaccagaaactttgatgcagtccgttgccacctaaggatcatgtaggtttgcacccgaaacatccactactgctaaaccagccacatttcccaccactgaagcatcagtgcagagaatggtggctccctcttctgaaataggaacaggaggacacaaattacccgactctagacatcacacacaacctttcattctgatcaatgaaccccagcctagatttcacagggagacaatcagaccatattttctagagaagaagttttaatcgggggtgaatcttgcttttccacagcttattcctgggaaggtcttgatgcttaaatctcttactttggctaacccaatacgcacttttgacagagaacaaacctgacttagaggccttccagaaaagcacatcctcatcacactggagcggcttaattttgaggatagaagacgcaatctcctctacaaaacaagctttgataacttcatcattccactccttcgagccactcacaaacaggtcagaaactttccaaaaggcctgagtcacattataggaaaatccttctttaagttcttcaacaaatcgatcaggcaaccagggtctgtcccacaaactcacattgcccccccaatcaagataccagcccccaaaagacaaatctcacgagctcccaggataccttgccatcccctcgaatccccaccatgtttctcaacacaccatatatcagagttctgatagtatttgttaagcaaagtgcgaacccacactttatcctcttccttgaacaaactccagcacagtttcgctaggagagccatattcatatcatgaaacctcctaaatcccaagccccgatagcgcttcagttgacagatttcactccaactcttcaaagcacagtatcttttactatcttttgtgccaacccaccaaaaatgagcaactattctgtcaagataagatagagaatttacttggtaaattttagaactacttattgggagcttgattatataggcccatggtccctacactagttgagataatattgctttttagactcaattaattaattttattaatcaattagaattctaaatcagactatgtcttatttatgagttttcactaagcaatgacttatttgagaagaaaagagatcttagggattgattattaattaagagactttgaaaggcctaattaataaataagttaagtggtaattttatttgataattaattataattatgaaattgatagaattgacatttatagatgtagaattaaaagatggcatttgagaaaagaaagataagtttcaaataaaataacaaaattgaaactcaataggcccatgaggaattcaaccataaatagaatacgttggctcttattttcaaacctcataacataacctaattaactctttatgagacaaaatagaaagtaaagagagccacaatctattttgaatttctcttcttctcttattgaaatttttgaacccttatagtgattgaggagtttcccacacaattcaagttaatactcaagatagtgttgaagattgtgtagatctatcaactgaaggagaatccaagtttagatcttgatcatactctacaatagaaagaatcaagggttagagatctgaatggaaggagtcatattattctgctacaaccaatataaagttttatatagctttatatgtgtttatttaattattttagaaaacttagattcatgttgttagattataatttataatcaaacatgcatgttagtaaatctagatcctggtaatataagtttcaacaattggtatgagagtcatggtaataatttattttcatgaaatatgaattgaaaacgatatttggttattggatggtttatgtgtgtttaacgattgattgtgatattacgaaattttctataataaaataattcaattttttatctagaattattttgtttgaaaagttagtaaaaaattaacaaaaattatccttatatggaaattaatttggattaaaattgaaaatgatataattttttgatgtattaaaaatttggctagggtgaaaccctaagcaagcgcggaaaagggcattttcttttgccattttttaatatttttcatgttttaaatttttttaatgaaataaaattcaaattttggtagatttttatgtagaaacttattttttaaatataaatctaattatcaaattaaaattaatttttattaattgaattgattttagatattaggagactttaaatttaaaaaaattgatttttctacaaactttctattatggttattttaaaatttgattatttattgattttacttattgtttaaattataatattagatattatcatatttgatatatttattttaaatataatatattaattatcttataaaacatttaaatactgataaaatttgaaattaatttagatattttatagatatcataacattaattatttaaattcaaaattgacatttttaattatcattttcattgtataaattatgagttaagaaaaatgataacatatataaatattttagatatataattatttttaaattattagagatttttaaatttaaagatacattgaaaaatgcatagagattttgtaaaaattttaaaatacttaaaattattttagggttttcaaatcctaaaattcgtgctccatatatatactatcaatttttattgttttaacattaaaaaaaattataatatcttaactataaatatctaatttttaaatttggtctattttattagtttaatttattaaattataaggttttgaaaatcatattagaaatatcttacttttcaaatttagatatgatattatctttcttattagttatttaattcattaaaaataagctagagatttaaaagttagttggatatttattttgaattgagatattttaggatattgttggatttattatttttaatattatctaactacctaatttaaaattcaaattattacatttgtttttaataatattttatttattaaaaatataaatatctcaatcaactttttttatttgttacatgtttgtttgtttaatttaaatttaatttttttttaagaaacctattatttatttgatttaaatggctatgattaacttgttgatggatctaatgatccaaattaatcatagttaattgtcaataaataaaataaataatttgtaataggtaattttgtaattttcttttatttgtgataaacctagtaatatgatagagcccatctaaattaatgcttatgtgagcctatatgtttgctattgggct

SEQ ID NO: 297785 - DNA, 1277 bp, Cannabis indica
acaatttaatctatgaaaaatttacatttttttaaagaaaaacttacaattcgattgtgtttaaggtgtcgttgttcgtggtggtctgaactctgttcttggtgatggtggcatcgttcaacactaaaaatggtggtggtggtttcaaacttttattaaggttcgattgggtttcgtgttcggacctttgtgatttacgctagtgcgtcatggtgacggtggttgggcgacagaagacgaggacggggtcatcgtgggtggcgaaagacgagggggggttgtcgtgagcaaagagtgaaagggaggaagatagttgggcggcgtcgtggtcacggttgtaaggtgcccttggtttgtaacattaaggagctcgacgtttaggttcagtggagagggaaatcaggggaagagagaaggagagagagagagagggagaaattaaatgaaaatagcagtttgggtagtttaggaaaatagtggcattattttgtacaaattagtggaaagtataaattttgatattggagttttattatgtatagataataaatttccaaatttaaattttacatatacatcatatgatgtatattctttaatttcgtcaatgaattattatacctcatctctatttgatgagttgctattgaaagaaaaatatcaaagaaagaggatatgaaaggaaaggaatgaaaacacttttcttttctaattgtttggtgatgagttgcttttgaaagaaaaatgttaaagaaaatgaaaggaatggaatgaaaatacgtttcttttctaattgtttggaacgtaagtagaaatgaaagaaagttgttaagtctgttttattataaagttagtatattttttttagaattattagtataatcaattttttaatatataactttatttattttattttgttgacattgaaaaaagagaatttgaattcaaaactttctctttgagagtaaaaatgtataactactaaactatgtttatgaccactgtaactttattttttatacttttatagtatttgtgcaagagattttttctctaattttcttttcaaaatagaagaaaaaaaattagtagatcccatactatttttttaagggaaatttacatggtatactaacttttgtcattttcttacaaaaatactgttaggcggaatttttaagttttttactgtgttttttcataagtttcatactgcagtatactgtattaagttttcactggtgttctactggtgttttactagtgttctactg

SEQ ID NO: 297786 - DNA, 3800 bp, Cannabis indica
gaggaggagttgatcaaatgagcctttaataagttttggcatgcttttccctccaaaaatttagtgggcaattactcttcctataaaatagccatgtagaataccaaggtcctgtagtgggatcatgtgcagcaataaaaaaaaattcccataatgattagcaaaacatcattttttgtcatgatgtgggtatgtgaaaggccaaatagctgaccggacaatagttgcttggttaaggttttaattgccaaagctgaagttgaaaattccttatctgtacaaacatttgcacaggaacttgagggaaaatgttatcacaatttttttccacatgatgtggcatgtccacatagacaagattaatgccacgtggaattcagtgtgtcactaggcgagccaatcatcatgcataacatatctattgacgaggaatccaaatactcattcaagatgaagttataagaaaatggccaaccaggagggtctgactggaccacccctggctggccaaggaacaccatgtgtcggccagccctaagcaaagggtgtgcgagccagcaatcgtaaagggtgccaaaaagaaccccaatcgattgagatttctacagccctcatcctgcacagatcacaacccaagttcacccatgagacaactccaacaacccacaaaaataaggtttcaaccccaaaatatctacctatcttttaaggatattaattaattatttttatagcttaaatatatgttaaaaatggaaatatctccaatttttaagggatattaacctatttgaatataaatcttttgtaagctctaagttatatgaagatcattaagccatatggagaaaacctaagttctatgtcctaaaagacctagagcacccttgttttctttctctcatgtgccaccttcaggctattagagaatcatacattattctcagtattgtaacattcatagagaatcatactagaaattgcaaggtaaaagcctgtaatttatgtggtgttatctctcaaattaatacaactaaaaggggagtaggtcattacccattaaacgagagggttgaacctctataaatcgatgtgttatttctttattcactttatttacttacacgtggtgattattgatcataaaaaaggcttcgctgtcagttgaccaaatctaatgtgaaccacttccatgaaaaacatgactctcatctctgactacatgagcatgcccatctgttctaactttgacaaatacctagaacttcctcaaagctttggacgctcaaaaaatcaagcatttcattacatcaaagagtgtgtctgattctacattttgaattggaagaataaatgtttctccaagggcaagaaataagttctcttaaaagcaataatgcattctatcccttcctatgctatgtcctgcttcagactccatgttagcatctgccactctttagagtctatgatggacaatttttggtggcatataaataaccataaccaccctaaaactcactggcacagttgggtcaatctttgtaaatctaagaaggatggtggcctaggtttcaggtctctcaagcacttcaatcaagccatgcttactaaggaagcatggaggctattacaaaactcaacttccctcgttaccaaagtccttgctaatcgataccatcctcactcctccttcattgctagtagggttagcaatgccccttcattagtttggcgaagaattaattaggagaaagatttacttaaacaaggcctgtgagctaagattgggaatggtcaaaacactcaccccactctagattattggatccccaacattaggtttgtgtccacttctcataaccccctagttaggttgctcttttcattaacaaaaacatgacttggaaatcttctcgtcctaatcaattttccccaagccatattattagtgccattcttactatcccccttcctgctcacactagctgagaacaaatttatctggaaatactcaacttcaagatcttacactgtcaaatctggataccatctcagcttctcaagtgacatatctcgtaagaaaccctttacctcccatccatctccttggtggaaaacactttggtccatcaacacgcctttcaaaatgaaacactttgcctatcgagccacaaaaaattcgcttcccaccctcctaaaccttcataaaaggacaattgttccttctcctattgttaaaaacatgcaacatatcaagtcttttaatttaatcattttgcatcttttaaatgttttaactacagataagttggagttttttgtttgtttggcttggcttatttggcacaataggaatgcacttacccatgggaaagattcagacggtcaacacaatcacttgctagacaatgctagatctttgattaatgaatattcccatgctaaagagccagatcaagcccttcaaatagatcatctcacttgcccaaaggcccctgctacttggactcccctctcctggttttgccaaactatccactgatgcaaccattgattcctacacaaaaaagttaggttttgtaggagttcttcgtaacaacaattgagaaacaatcattgcccttgcagtctcttatcctggaattaggaaacctcatatccaagaagtcaaagctctaattattacactgaagtctcagtgaagacttcctcattcattttatagagacaaattgtaagacaataattgattctttgaacaataatatggattaaacatatttcccaagtaaggacacttctttcccactgtcaaagtatcaagattaaacatatttgtaagattgcaaacacagcagcccacgatttggcgaagaaggtacttcagcttgatgaagatacctgctagattggtggcgaggcttgcattataccttcagttctatcttcctcgtagcgtagcatcctccttaccctagaaaatgtaaatgaaaatcttctttaagaacatcaaactaattcaaattaataaaaaaaaaccccataaagtacgaatacctagacaattataagacaaaaagaaaaaaaataaaaaataacaataataaaatttcaaactccattcatgaggaatccaaattcaaattggatttgaaattccaactcctatatatataaatattgttagttagatatatttgcatgatcatggtcttaaagaaacccaaaataaaatatgaatgacgaattgttaatcataaacttttaccacttatgttcttcatgaatatgaatacccactgagtatccctctgcccagtcgatggagccatctccgactatggatcttcgaaatcgacatccccatagagatcctagaccaacaaaactccccaaaaccccacctccttctctcgttctctctcaaagccatcctcgttgtgtctccctctttttcgttttcaagatttgcagaagttcttagacctgttaaccaagatttgtgaagaagaataaagggaatgaggttgaagaagaagaaaagagatgttccactagagttggacagagaatcgtgtgagagagaggattcacaagagggaagaaactttaggggtttgagattttgaagggtgaatatctcgattatagacttagcttgaatatctcgattataatttcagttgctcacttttttttttctttctcttctctctctctctctcttaattttcttttttatttttttctattctcttgtgtctttcttttttctctctgtatatataatatatata

SEQ ID NO: 297787 - DNA, 4804 bp, Cannabis indica
ttttatcttgaccaaaaatcagttcagtgtcctattttaacaattttggaaaatacagggtccattttgtcctttaacaaaacaggaaatccaattggtaacttttacaaaacataggatccaaaatggtatttatgtatcacccattcggactcacacatccctaaatgacgaaatggcaatttagtaaattaacaaaaaatataagtggtgtttaaacaattacaaacaacattgagggcaaatttgcaaaagtaataattaaatgaggggataaaaggaaaagagaaaagaaaaaagaaattagatgagctggactggagtcgagagctgaaccccccattctcatcgtgagactacgaaactaactcgcatcgcagtgactgaagacacaaggcccagagagagacaccagttttcagaatctttcggcttcagactcagagaaagagactcaaactcagagagtctctcatgttgttccatttttgagctctccaccacagtgtgacgcctttcgtttttatttgttttgaatcgttgaaaacagattttctgagatggatttgattaaaaacgtcaagtctcgaaactgggagaaggaatcgcatccacaataccaagatttctttcttattcctttatttgctctcttcttcttctccgttcgattctttctcgatagattcgtatttgaggtacttcgttataacatatgtatttatatttgctaatcttttcggttgcggaaacggtgcttatttaaatgttcattgtttgttggttaattgatctattcttggattttttgttcgttgagaatgtcctttgttaatcttttgatacgcccagatgagattttgacttgtctttgatgggttgtgcttagtttttgtgtttatgaatactgttggtcaatatttaacaaatctgtggaatttaacatgtagtttttgctattgtgacgagcttatgctttgaatcagtgttggagttgtttatgtttttcgttttttcttcttctcttttacatgccttagtttgactttatcttcctgtttataacttcatttattactttcggatgagcaagaagagagtattttaactgggaaaattaggtgagaatgagtgttaaaaggattgaaaattacgtaatctagttagtgtgatttggtttttcattattccaatagtaattataccggtgagttgagcatttatttgggctggacgcttctcaatgtttttctataaaatgttgttttcacatgtttttccatacttttgtatgtcataaatttgatgcatgtcttttatgacattaagcaattttgaagtcctaaacttacttgctcctactctaggcttgaggagtaaatttggattctcagcaaaattgaagaaaatagaatatcaatatcattattgattggttccctatttcttacactatgagttgccattgtatacgcttttgtttaataatttatgcactttaaaatcacatcataatatgattgtccttttactaataatctatgcactttggaattaatgtctggcaaacatggtaagggtgcattgaatatggtgggctacacttagtctaaaaagacttagctaatattgtttaagttacccaatttcgaattaggcttcatcatttattgttcaagatcagtttgttttaattggtaaaaaagtgacaaaagcttcttacttatttatttattttgttaaaccatatttatctcgtgcacaactcaagagattcctaaacctatttgcatttgtacttttcttttatgattttatgttctcactctcatctttgcagagcctgggaagacgattgatttttgggaggtggcgtaatgtaggggcactagagaatgaggatacacggaaaaggataagaaaattcaaggagtcagcttggaaatgtatttattatctgtcagcagaggttctggctctctatgttacatatgatgaaccttggtttactaacacaagaaacttttgggtaggtccaggaaatcaagtctggcccgaccagaaaataaagtaagatcatctagagttggatgtcaaatgacttttgctcctaaatcagatattcacattctactgtttttgtagctgatattgctttacctgtgcatgactaaaatgagaatttcagctttgctaaacaccggaataaatttatatggatgtcaggttgaaattgaagggattgtatttgtatactggtggattttacacatactccatctttgctttgattttttgggagacaaggcggtccgactttggggtgtccatgagtcatcatgttgcaacattcattctcatagtgctatcttatattttcaggtgcctttcatgaatttcatttgaatttggttctgttttcttcatgtcaacacccccttgctttgaggctaagtacctacataaaatacaaggaaggggcttatgtggttacacaagtgtattgtctcctatctcatgatggagaaggtgtgaaggcaagatttaaatattacaaaataagattgaaaaaaattcttgcaggtttgcccgtgttggttcagttgttttagctattcatgatgctagtgatgtatttctggaggtagggaagatgtcaaaatacagtggtgctgaagtagtagcgagctctgcatttattctttttgtcttgtcttggatcatattgcgcctcatttactacccattttggattctctggagtacaaggttagtatgatataatgtctaactgacatagacatgtttggtttggcttctaaacgttggttcgggatttaaaacttcagttttagtccaggtcaaataagaatctagtatttctatagaaatctattgtgaatatattctttattaatctataaagcaagtgtcatttaaaatgttgttttaagtttgtgatcagagtatagtggtgtcaaaacactaatgccaaatctgtgaaattatggatcaattctttgcattttcagtatcttctgaagctgtagttgtcagcctctttttcctccctgtcaacactttatggctgcatggaatcaaaaccatattctgccatataagtataagaacagtttcatgaaagttttaagcacactacacaaaatatgtagtatgaaagataaatcttgtttgagaatccattctgcacaactttttggggagataaaatttcttctatcatgcaattagaagcaatattttttccattatgtattattcatcaaatttcttctcaaaatgtttagatcgaaacattgaattaagaagcattagaattaattatttctttctttccttatttttatggtggcagctatgaagttcttcttacgttggacaaggagaagcacccagtagagggaccgatttattattatgtgttcaatactctgctatactgcttgcttgtacttcatatttattggtgggtgttgatgtatagaatgcttgtcaagcaaatccaagcaagaggacaacttagtgatgatgttcgatctggtgagtaaaatcttgtgttttctatagtctaggcatgtattttgtgcacaatcatccatgatgatattgaaatagaatcatagtttttgctttcaaatgggtttgtttcttacttatactagacgtccttatatgaccattaacatcttcattattttgttataagtaatttttatttaaagatagctgtttgctcaagttgttgattatccttttatgtgttgtctgatttttgggtgttttcttccataatttctccacagattctgaagatgaacatgaagattgaccaggagacaatttactgctataattttgacactgcaaaaggtgctttagattagaacaagctattgggacccccaaataaactgcattttatgtttgataagcatacaggatgttgttagataggaatggacactatagtttgcatatggaatacattcttctttcttttcgtaaaactcaatatattttagggggagtggtaagactactgtactgcaagatgattttaatatttgcgagctttcaaattgcaaattataaactcgttttctctctatttccttcacttatttttgttgagagttgtggaacatcaaagtgcatcgtttcattttctcgttatatcatactaagggaaactcttttgttgatttcttctgcagatcagaacagcatacatttcatgtaaatgaaaaattgataaatatatattggtggaaaatttttcttcgtatttgaaggttccgtataatacctcggtgttcagatttgggagcaggttgaaaaagggtctcagctgcttgaaatgagaagcttgattcttgatcttgatcatagattttggatattgtaaaccagaaatagtttagtgttttggctcaagtttgatatgttttgaggaagttaacattaattctgaactgtataatttggataggaacacagtatcttccccaagatttataaaatgaataaatcatttttttccactaaggcattgattgtaatcatgagtttccttgtctttgaacttttcagttatccattggttgggttgtctgggttaaactgttttattatttgacttgaacttaatcacttatagtcagacaaataataatatacataaaatggctagtactttttagtgaccgtaattattcataggaaataggaaaaaaaaacagaaaaatacaaaaaaggaaaagaaattacaaaaatactttgggcc

SEQ ID NO: 297788 - DNA, 6220 bp, Cannabis indica
ctctctctctctctctctgaattgatgatgatgataaaaacttacctttgtggtctgattatttcctgaaatccagtgagatccatattccacgaaatgtatcgtgccctgtctcacccattggaagccctttattgaactcaagatcaccacagcacctaagtggaaggatgtctccgtctcctatctctagtccacggaccacttcaggctcttccacacccctaactggcggcagtggttccattccatttggtcacctaaaacagtcggtaaatttgcaagagggttttggaggcatgccaaagcctttaaccagccactatataaatggtccctcttatcacgattccagtcatgatatcttccgagggatgcaaccaggatcacacatgttttcagaacttttgccctgtgaaaatgaggttctgggactgcaatttccgaggcatggtcatggagagtacgatggacagtcagttttggctgatcgtgtatctcgacagcttttgagagataatgctaaaattaacccatcactggacttgagttgcagctctcctttgcccagtcacacaaattgtgtctaacatgaggcattttttcaaggacccaatctatgagagtgagtacatccaagtctttaagactatttttggttctacaggatcaattcattcatcatgttaaattgccaaagaagctaatttgtacaataaggacctgaaatggaagaactgtgaataaggtctaacagttggaaagtggaaaaagaaatactgttaaggctgacttatttcacctatcttaaggctggcttcctggctagtaagaaatcttgtgctgggtgatatgaggcttttcctgctcttacgaagttcgccgttcggagtgtcatctcacgttttactgaaccaaggtactaaaagatttgattttgcctaggaactttcctccataacaaaaaggattcatggctgtgagaactgtatatttgtttagatcatggtatagaaaaaagaaatacaatttttttccccttttgggtctgaaactgctgtacagaagatggaaaactgaatttgggtccggagatggaacaaaaagcactaagccattattgagtgaggctgccccttttgatttattagccggcggctcaaatgtaactttgtctactctttaccacctaatttgttgtatgtaacatcattcttcacttcaatggaatgaagattctaattccaaggtcccatatttttaagatttgcttgttgccttgaataagactagcatttgaccctgtggcatgcagattgaaaattttcccaggaaaatggacggccaataatatcaaactccgagtaatctggtagtgttgtgtattttctcctttggcttttaccctttcatgtcttacaattgggactttatcaaaggagaaaattacatacctttgaaagtcaatgcacattttaatctttttcatccatggtattttgagagcctttctattcatcccgaacacgagcacaggggaggctgtttcaattgggatgtaaagcatttttttggtattttattttgattatgaagtgctactacaccaacaccacccttttttgaatattacaaatttcatttttctattaacattcattatccaacccaagcctgtaaaatactattcacatcaataaatattactaaaggcttgtttagaaagttacggtaattgtataatttgatatatttgtttgatcgtataattacactataattgtatatagaaagtaattgaggaatttcaatcctgatgtctccataaaaattgagtgtaattattaaaaaatttccatttcaattattaactactaaaaaaaatattattttcttgtgtaactattaaatattttgccaaacaaaatattaggaattcatttgtaattatcacttcatattcaaacacactatgaattttaaaatataatatgattataattaccaccttattggaattcggattgcattggttccataatgttgatataaaattgaatgttgagcactaatttttgatgcatttacagtgaatagtccaacttttatacattactatgtttgttaatcaaatctgagctgaagttccaaagtttggttgccaaattgggatcattagcttgtgaacttgcttctgctatgttactgtctgcaaaatagtaaccgcccttccctttcacttctgaatgtaatgccacatagcacgtggttgccgccccctactcacaccatttcaacaaataataagcaatgatttacatatacacaaattacacacattctataatacatgtatatctatgttctctatctgaataagcctccaaataaggcttatttatactaataccgaaacatgtatctttgtttacttctctttcatcaaggtgatttaatcaaattttgcagatgtatgtatggatggacacacacaagactaatgcacttaaagagacagacagggcaagtcatgagaagcattgacatctcagtagtatcagttagttacctgctgaatatttttcataaaatatttaccaactaggctggcaagagctgcatcaaatttaaaagaaaaaaaaccaacattagttactcaaggctacaaactcagatgctagtgacatataaatgagatgcaaataataacactaaacattgaacagagggaataggcataaaaaagttgttaccactgacaaagctgtgatgacggaaaagattggtgtaaattgctcctggatgcagtgaatttgcggtcagctgtgccccttcttcctgtttagagggacaaaaaactaatgggtagaggaaggccaactgtactttgattatcaaataaaaactgatcaagtatgctcagttgttttttcaacagtgaactagagtcctaccttcagccttcgagcaagctcattcatgtgcaaaacattggcaagttttgactggccatatgcagatagacagttatacctgtcaagttaacagattcaatcatttaattctgaaagaacaagcttatctagttccttaatggattatgctttttttatgctccatatccctttttttaagctaggttccttacacctatatatttaaggaggcacaaaactacaacaactgctatgtgggtacctacgaagattcgaacctcagatacccgattgcttgagcaaccaaagtatgactcagatcaaattaaagcacttagtttatcataaaggtaagaacttttcaaacacaaagaaacacaacaaaagtaaaccatactctatctcaaatgactattctaaatggtaccctgattgatcattgattttgtcaaaacgaatcccttctttgtaagagaatttatggcggcgggatgagacgttcaggatccttccttctctcttacattctagtgctgttcttctcatggtctccaacaaaagatttgtcataagaaaatggcctgcagaatgaaaagaacatcagatgaccttgttctgtcattatttttggatatcattttcaataggagtaaaaacaatgtaccctacctatgtggttggttgcaaattgtagttctattttatctttggaaagcatgaatggcgttgccatgattccagcattattacttgaaacaagaaaaatcagtgtctataaggaaatctttctcaaatggcaaatttcattaccctctaacagaaaatatattaaaaaagcttacacaaagcccaaatgagagacacaacaatacaactcaatcaaattgaacccaatttatcttacatgagaatgttcaatggaagaccagaggaattgaattctgtggcaaattttctcactgaggcgattgagcttaaatccaactccatggcattaacttttgcacaagggttttccttaattattgtaccttggacctcattaccagcagctctgttcctaactgccataaccacatggacaccacgtaatgcaagaactcgggcagtttcaaatccaataccacttgatgctcctgcaatatatattcaacccaaaaatatatacaaacttaaatttaagtatcagtgaatatgaattaatttgtttattagtctgataaggaaattgaaccagttacttacaaataaataaataaaaaaggttaacctgtaacaatggcagtgaggccagagccatcaatcccttcagttacttgttcagctgtggaagaggccgaaaacccagataaatcatttctctcaaaccaccacatctctcactctctcttcttctctttcttcttgcactatccctactatttttatttggctaattagtatttttactccaaactttaagatataataaatcatgtcccctcaacttttctggctgataaagatttaaagactttgtccaatttcattcaattttgtactaaatcatgctccctggactttgatatctactaaatcatgtccctcaaactttgacatttgtcaaattatgtcccctaaattttcatctatgctagacttttcttattaaaattagacaaaagtctttaaattaaacaatctcaatagtttaaggataatttttaacggtcttcaaaatttagggagcatgatttagtacaaaactcgggggtaattaacctttttatttttaaatatacttttagaaatttacctagtagaccataaatggtcgtttgggtatatcttttctaaaaattttagtttattccttttaataatcgcttacgttgtagttatttaaatttaattaaaaatttagagaaaattttaaataatgtgtaatgtcgaaaataatgtttaaattgttacttactatgcatatataaaaaaaaaataacaacacttataataaaatatataaatcttatttttcacattgcaaaccatttaaatttttttaaaaatcccatgtcaccattgttgtttgtgcttggaatgaaatatttcagcagaataatgaagaagctagggaagaaaaaagactttagctaccatgagagatgtgctgaaatgggtttaaatcacctaagttttgttgatgatgtgttaatgttctgtagaggagatttaaaagtatttacttaatgatgcaagctctgaacttgttctccgcaactttaggattgttgcctaacaatgctaattcaccaatttactgtagtggaatgggtgaatatgaaattaaaagggtgttagacatgtcgggttttataaggcagcaggatccattcaaatacctgggtgtgccaatctgtgcaagaggggtttctgcatcagaatgcagcaacttagtgtagaagatgacttctcgaatcagggtttgaagtaccaggcacttatcctttgctggtaggttggttttggtgaaatctgtcctgctttcaattcacatgtactggtgtcaaatcatgttcattctcaaacggattattaaagagcttgaagctatttgtagaagttttttgtggacaggtaaaaagcctcgtgaatggggtaggggctgttgcttaggagaaggtatgttgtccaaaaaaaatcaagaggtttagggctgatgtatatccccaattggaatggtgctgctatggttaaacatgtatgggcaattgaaaaaaagaagaataacttgtgggtgaaataggtccatagtgtgtacattaaacaacaagcttggtgggaatacaaggctcctatgagtggaatttggtattggaggaaaatggttgaactcaaagacagaattaaagccattgtacagcataatacattttctgctactgaatacataatagcagagggcatgtcctggtttgatcagaacttggagaaggtttcttggaccaatgaagtatggtctagattgaatcttccaaagcatagttttctactgtggttagctatgctgaatagactcaaaaccagagatagatggctcaaacatgacctaattgatactattgaatgcactttatgcaacactgatgcagaaacaacaaaacatatatattttttttaatgttgttttgctgcagattgccttagacaattgaagacctggctgggatggaatagcaaagctatttctctttaaaacttgattaaatgggtgaggaaagctaactgtgttgggttttatgccc

SEQ ID NO: 297789 - DNA, 1046 bp, Cannabis indica
aatttaaccaaaaacaaatatgtcagtattttgataatagtcatctccctaaaccttattatctttagaagggtgaagctctttgacatatttttaaaagcaaactaagtgtctaaccccattggtgaaaaatatgcttataatttttaagttgtataaagacaacataatgtgtatatttcttcagttgtttaaatgagagcgtatgacattttgaaataggagaagtgcccaaaggataagttcacaaaaccagaaaaaaagacattttagcagcttgtctaaaactatagactttttcctttttcattatgttaagaggaacttacactaaatggttttacttgcagcaaaacaagaaaaaagaaagaaaatggaagccctcctccaatttatcttggcttaagttatggtatcagcatgtttgaatcaaaatttaacataggagtgtatgaaaaccaaaataaaagtgaatcataagttaaagtcccttaaatcgtttccaatatgaacttacaatatttgtagtgcagataaatttcccagaaatgttggcagagttccactgaagtaatttaagtcaatcttgctgcaaacatgtataatattattagtaacaactcatgaagctatctgttagcattgaccaactgaaactactactaataatcataacatagaagtattgttcttgaaatttgaatcatacaaatacaatagatatggcagtgctgtgatttcctcaggaatcactccatgtgcgtccaaagattgcactctcctggagaaacattataattagttagaatgtacaataatttcaatgcattttcctatgtgttttttttttttccacaaaaactaagtatggtcaagcattaatgtttactctttagccttatgcatatattattatgtatttgctttttatttttcctatgaaaaattgagcaaaaactttacaatatttcaattgaattagataacataaaagagtacctagaactctatggcatgtttactaataagtaatgggaatcaatagt

SEQ ID NO: 297790 - DNA, 3394 bp, Cannabis indica
aaaataatttccaacaacttattcatctacaagtttccaattcggatggtaagaattttcttatcacatttgtatatacttttaatgatgaaaaaggtaggaaagaactatggcagagtctaagagaaattgttgtacaagatgcttggacagtaatgagagatttaattgatatactagaacaagaagaaagagttggcaatagggttaaagattacaattctcatgaattcaaggattgtgtctcctactgccaactagaagatgtgaagtttagtggtaatttcttcacttggtgcaataaacaacaagatggagatagagtttactaaaaaatagatagagtgcttgcaaattccagatggatagacacctttcctggaactgaagctattttttttaaacgaaggcatttttgaccactccccagcactcctcacctttcataatatctcacagagtggtaaaaagccttttcgttactttcaaatgtggatttcacatccagattatgcagcaaaggtgtagtacacatggaaacaaaacttttctggcaccaagatgtatcaggtgatatccaaactcaaagcatttaagagtgtttttaaggaaatcaacaagaatggattctcagatttacaagcagtagtaatataggcaaaggagaccatggatacctgttaagacaaactgcgtcatgatccactcgattagaacctatagaaagagaaattggaggctagaaaggccttcactcgggcacacaaaacttaccaactattcctacaccaaaaagttaaaattatctggattcatgatggtgatgataatactgcagtgtttcactccagcatcaaagcaagaagaaaccagaacaaaatcctctctattttggattcacaggagaatagagttgataaaccttgcatgatcattgagatatttctcacctactaccaatagctacttggaactaaaataaacaataggaggagggtaataccaagtgtgattaaaaatgggccaactgtcactgatcagcaggctacaatccttttagcacctgttacgaatgatgaaataaaaagagcaatttttgctatactcggctccaaagctccagggcccgaaggctattcaagctatttttatcaagaaaattgggatctaataggagaagatctttgtgatgcaatgagatccttccttcacacaggaaaaattctcaaggaaatcaattctacagctctaactattatccccaaaatcagatgccttaatacaccaggtgattttagaccaatttcctgttgcaatgtggtctacaaggcagctacaaaagttatatgttctagactcaaaggcatacttcctgatctagtggcacaaaaccaaggcagttttattaaaggaagactcattgcccatcacataatgatctgccaagatttggtcagacactatgcgagaaagtaaaaaaaagccaattgcatgatcaagcttgatctgcaaaagtcttatgacacaattgaataggactttatcgaagaggtgcttaggggtttactgttttcaaacaagttcaccaccttggtgatgaattgtgttcgaactccaaaattctatctcttattcaatggtaccttacatggtttttttgaatccaagagaggattacgacaaggtgaccccctctcaccacttctctttgtcattggtattgaatatatgacccgaatcatgaatagagtaggttgcataaaagatttcagatttcatgaaagatgtgaagctatgaagctcaactatttaagctttgcagatgatgtatttctcttttgctaaggagactataaaagtatcattctactgctccaaggccttaaacatttctctaacacaccgggcttgcaacccaacaaggcaaaattagctacatattgcagcaatatggctaatcaagatattagcaaggtcctggatgcatcaggctttactagacaacacacacccttcaaatatttgggtgttcctatatgcaccaagaagatctctagctaggaatgaaacattcttgctgaaaaaatgacagctcgaattcgaacttaatgcactagaaacttatcatttgttggcagggctctgctcattaactctgtacttactgcaatacattcctactggtgtcaactactaaagcttccaaagaaggtgatcaatgtgcttgaagccatatgcagggcattcctatggaaaggtcaatatataatgcaaggtgctggtttaattgcttgggataaagtgtgtcaggaaagagcagttgggggtataggtcttaaaaggactgctgaatggaacactctcaagtatgtttggaccttagaaaataaaaaggataatctttcggtcaaatggatccacaatgtctatctcaaagatgaagagtggtgggactacaaggcacatccatggaagtttgtactggaaacaaattgtggcagctaagaatcaactcaaacttgtaactgatacacaacaatttactcaaaagacgtacacaatttcttctggatataacatgctttgtcctacccacaacaaagtcccatggtgcaatgagttatgggggagattcaatatccctaaacatagcttcatcctctagttatcagtccaaactagacttaaaactagagagagattacaaaagttcaacctaactggtgatggtgtttgaagtctctgttcgcagcaggaagagatagttgaacattttttttttcagatgttctttttcacaacaatatctcttgaagatgaaaggatggctggcttggggtgcacagacgatagagctgtccaagctactcaaatggatacacaaagctcgaatcggcaagtttaaaaaaaagctaatggcagcaatcattgcaaacttagtatactctatttggcatgtgagaaatgacaaaatatggaacaagaatgtagaaaatactgatgtaattgtacaaagaattcaaaacaatatcaaacatagagtaaaattattttggccaaaaaaatgtgcctacatgatagagaatggtaccaaacattataaaaatgaaaaatacttgaggtcttttgataaaagatgcactttcattgtaatagttttggtggagtaataatatcttactgatttataaaaaagaaataacaactaataaaaataaaaatatataggatgctaataaaattacatatcatgtcaataaaagtacaatagaaaatagaactttaatattatgtaaaacgatgatataccgtataacaaaaaacacatatatcattcaccaaaatatatatactaacaataataataataaaaatatatatgtatactatacta

SEQ ID NO: 297791 - DNA, 3630 bp, Cannabis indica
attctgggtttcataagaactagaagaggaaaaatccaccaagaacattctctgtaataaattctatcataaatacactgactagtggactaaggctcattaacgccccaaccacgtaaaaagccctctcttaattccttatagctctcttattattattattatattggttaccgaaaacctcggtcaacacaaagaaaacaaaatacaatttttttcgtttatgaaaaattaaactttgtttgataagtgtttttgttttttgattataaaattaaaaaataaaaatgtgttttgtaatatttatttatgttatttttatttaagtgcgaagatagaaactgggtcgtgggcggggggtttggggttcaggtgcgtgtccaggctcggacatggggtatggggtccaagatcaggctagggtcgggggtcggagtcgtatttaggcttttggtccgaattcgagtcagggataaagtcatggaatggtggttgggagctcaggtcttggtcgagactagggtattaggtccaagtccaagcccgaggctagggtccgaatccaaggtaaggggtattgggtccgggtcctagcctagggttggggtgggtccaagtccaggttagggtcttagggtcgaatccaagttaagatctagatggctctaggccaattgctagggctcgagtcttggttcgggtcggggccgggtattgggttcgggtcccgcacggggctagggttcgaatctggggtatggagttaaggcctgcggctaggttcaaaggtccaagtctaggtcgaggccggggtatggggtctggagtcgaggtcagggtcaggattgagttatgcggtccgaggtctctaggccagaggttttggggtccaaggtttgggttgggacctggggtcaggatccaatcaggggtgcaagtacaggtctgagatcaagttcgggatcgtggtccattacgggtgcaggtataaggtcaaggtcggggttggggtcaaaataagaatctagtgtacaaaataacactccctaattaaatgaggtaaatattaatgaatgagaatacaaaatacactaaaaaaaattagtaaatttaataaaattttaaaaagtaaaaataaaaattacatgtgaaaatattaacttaaaaaaatatttctgaacttattcaattaatatgaaaatacctctagtaaaaggtaggtttattgcacaaaaccaagagggatttgtcaaaggcaggtttattgcacacaacatcatgatatgttagatagagtaagttgtacagtcaaagaaatggtgaaacatagagtatatagcatatggccgaaacaggttggggcaaaggacttggattggtttggaaacttatagttgtaacaataattttttgaaaatagatgtacaatgtacaaagcagatgtttcatatgtgaggtccttttgattgggatgctctttgattgtaaatatggattattggagtaatgaaattaaagctgattcatcaaaaaaaaaaaatcatgatatctcaagatctaatcatgcattatgagaggaagtcgacaaagccaaactgcatgatcaagcttgaccttcagaaggcctatgatacaatcgaatggaacttcatagaggaaatgatggtagcctttcaattttctcaaaaattcattagccttgttatgacatgtgttaggggctccaaagttctcacttatgtttaatggcactatgcatggattcttcgaatccaaaagagggctactgtgtctcctaatttgttatttgttcttagaatggagtacatgtccagaattatgcagagaactggctccaaataaggcttccagtttcataaaagatgtggtgagttgaggttaaaccacttaagttttgtagatgatgtgttgttgttttgtaaaagggattttaaaaagtgtctattatatgttgcaaggcctgaagttgttctcatgtacctctagcttgcatcctaatcctgcaaagtctgcaatctattgtagtggtatgaaatatggagagattcaacgtatacttgatgtttttggcttctgtaaacaagaagtttcattcaaatacttggagtttcctatttgtgcaaaaaggatctctggtcaggaatgtaaagtgttggttgagaaaatgacctctcaaataaagacttggagttcaaggaatctctcctttgcagggagagcagggcttattgattcagttatgatgtcaatacactcatactggagccaaattatggtgcaacctaagaaggtagtcaataaaattgaagtaatatgcagagtttatttgtggaaataacaacatgtcactcaagggtcgggtccaatatcttgggaattagtttgtcaagcaaaaacagctagagggaatagacattaagatgatagcataatggaatagagctgctatattcaaatatgtatgaactattgctaatattgctaataggtaagaaaacttgtgggttaaatgtatacacagtatacattagaagtgaagattggtggggctatatggtcccaaattcaagtgattagaaacaagtggtgacagtcaaggatgaaattaaaaatctgatggatatccagcaatttactcatagtaagtaccaagtctctcttagttacaaactattttgtccttcttaaaacagagtacattgtagccatgaagtttggaggagattcaacactcccaaacacaatttcatcatgtggatagcggttcaaaacaagttgaggataagagattgactacataagtttggaatcattgatgatcctgtttgtttattgtgtaatcagtaggaagaaacaactgatcattaatttgttctttgattgttctttctccttttcttgattgctaaaagtaaaagaatggttgcattggaaggcctataccgattctgcaaccagacttgcaaggtggatcgagagagctaaatgaagtaagtctaagaagcagttattatctgcagtcttggctagcttgatttatcatatttcaaagagcagaaacgatgaactatgaaattccaagtgtgaagatgtagatagatttattaatagagtcaaggattttgtgaaatagagaattagttttgcctggccctctgattgactcagtggtactctttgtaattactatacagttgtatagagttgagtgaggacttctagatatgaagatgttctttgtaaattgattttttggagtaatgtaaatacaagctcattcatataaaaaacaataataagaaaaaaaacctctagtatagatatcaaaatcagtccctctagcttattaaaattagaatatgtacatgtatacataaattaatattgagacgtggaaaacagctaataacaatttgttggtatggacgtaaacactagggttgttcatccgattcaatccgtatttttttggttaaacaacatccgatccgcactaagtacagatttcattttttggatccaatccaatccgaacaatagctcaaatccaatccaatccaatccgcaaaagtgcggattggatcggttactttggattggttacttttt

SEQ ID NO: 297792 - DNA, 5574 bp, Cannabis indica
atataattacacattatttagcactacaattaatttatacttactatatattcttattacattacattatattactattcatattaccatttttattacattacaataaaccaaacacctaattaataattttagttcataaaagtttcttactaagtattaaaagtttcaaactaaaaatatataacttattacattacattacattactagctatttctgttacctttcattgtcaagactattaaaattattatataactcaaaagttctaaactaagtatatttataaatatttttttatcatagcaaaaatttctaccatctcatgatatagaattctatcaataactcacttaaatattataaaaattaaatctttaagaactaaaaagataaaaaatgatacataataaacaattcctaaactagaagatattattaacaaaaaaaaaacaatcagttttttattttcttgtaaacccaaaaaaaatagtagaaaaaaatgcaaagataattaaatatttaaaataaaaaataggagaaaataaagaagaaaatcataccttaatcgtttgagttgctggatttgggtaattttgaaatgggcgagaggctcagtgggtttgggcgagggtttctgggtgggagggtttccggcaagaggttaatagcagaggatatgttgaggtgtgtataatatgtgtgatgatctagcgcgagatgggagaagtgtttttcgggaaacactttttatctcggttatttagttaaaaccgggataaaagggtttcacactaaacaaacccttttatcctagttttaactaataacaaggatagaatgtttccctaaaaactttaattcccatttggctaatccataaaaatcgaatcttgaacttatttttttatctttgatattttcttttaacattctaccaaacagggccctcttgtctaaaaaaaattttgctgcatatttgaggaactaaatctaaaagtgggatataaagtctcaatatatcttttatcctgttttttatatttgttaactaaaaaagtaagataaaaggtccattttcttgtagtgcttagcagacagagctgggtgggcttcaagtatgtcagcaaccctgggatggaccctatacattcaagaagtaggcagataactcctccaaactttctttaatgcccagatgaagcacatgtaaccttctctacgtatttggtcagggtactagtgatgttgcacctcaggctctggagatggtgtgtgctcggtactcacttcccaatctttaaagttagaatttaaaaggttgtcgctagatgaagataaacttacacagagtcgaggatgatcttcatacaagagtttgagtaagtcttggttaatatggtgcttgtcttcccagaaatcaccaagattcatctacagaaagatgggtgacaagaaaatgagagttgggcggatggaaagttgaaaatctagttttatatgccgaccaggcaagattaaagacaaaaagaagggattttattcaaaaatagaatttccaaacccagaagttcaaaacctcaaaagatacctggaaatctttagaatcccatgaacgggtgaaaatgaatgactttaggtcaaaattgatacacaattagagaataagaaattataatcgaatgttagtcaaagttacaagtcctaatttcatctatactatgatcagccaagaacaattcaagaatagataaatttacagcaagaaatccagaaaataatacgtacattcaacgaatattacataaagtagagggaaaagtaacttactcactattcgaagcttttttaatatgctaagagggtaatgtcaattgattttctaacatcctttcttcaaagatttgagtaaaatataaaaaaaaaaaatgctctggttctttagaaatgaaaatggataaaaaatttccacgaaggtttaaaccccttttattagcacctaaaagaggaagttaattcatttaatgttcaaaatttggggtttccccccaaaagtgtatgttaagtattcattatggaagtacagacgtcacgcatgcagtatcactcaactgtcagtgcatgactcgaggtacaacttttaagaggtatttaatgccccagacaccgaagagactctcaatcaagtcacatcggtcaacttcaacaaccaggacacacatcacccatctggacaacttcctagtcaaatgaagtccatgtgcaactaggaaagtctcgcgtagacttgggtggtaaatgttatcctaatttttgcattgtgacatggcacctgactggatgacacatgtcttgtatttctcaacctgggcgaatggttttactcctagcatgcaacccataaagattgatatgatgatccaagttatacgtacatagcaggatgttcaatcagagtcattgatggatatctgaccagcttgatcgtgtgatcaacttgcatgcagcagccaggggatgcgaattagcaatttcaaaagtggtcgatgctatctccaaactttcatgtaaagaagcaatccctacatttgtggggttaattcgtaccttcagagaataaaggtaatcagtctagatttcctaattttctcattgtaattatagaaacatgcaaatttcctattttatttcttatagattaagagaaatcattcctatgtaattagcccctataaataatggtctcattttactatttagggatacgaaattaatcagagataacattcaaaagagaaactttgatgtaagagtgaattactcaaatatctttatatataagagctttcgagaaggaatactttattcttcatctcacaagttaatacaactaaaaggggagtatgctattaccactatcttgggactgaatctctataaattctagtgttttctttacttattactctttactttctattatttatttaattttatcactttaattaagactcactgtcattggctaaaagcgagatcaacacttaatataatgcctaatgttaggaactggttcttgagaagtgaatactcttttattaagtcagattgtatgcttttaattttgatttgaaactgtctttcaacaaaggcattgaattaaataaactgtgatgacgcttcaaactactttcataggaaaaatccacacaaacttggtaaaatcatctacaaaacttaggtaatatttttaaccatccatggaagtgtaaaaatcaaatatctgtatgaactaattcaaaaggagtattgttttatttttagtggatttaaaactgacttaatgcaatttacctaattgactagtaatcaaaaaatgtcacaaatttacatttgaattgaggactaacatgatataaaaatttggctaaaactagccaggaagagtgtctaagcctacaatgctaataaaaaatagttttacatgattactagtagtagtagtacaattaagagcagagggaatacaacttttacttccctagtttgacttgattcttaaaggaaatatgactttggaagctgcacttggagtttatacaggccatcactgagggaacccttcagaagaacttacctcgtcgtcttgtccttaacaaaacaacaaacatcattaaactctagagtaacattattatctctagtaaattgagaaatgctcaaaagaattttggtagtattaggaacatgtaagatatctttgagaataagaaaacgattagaaactttcgttaagacaaaattggaaccaatttgaagaatatgtatagaagaaatacaaccaacaactaatttagctttgcctttgtagtccactgtgttatgcaatttctaagagtctgtggtcatgtgatgcatgactgcaatgtcaagaaaccatgcaccagaaatgtcatttgttgttggagtttctacaagatttgcttgaggattttttgtactaacattgtttgagtttcctgaggaataagctctagtgaaagtgatatcaaacctacggtaacacttttgagttgcgtggccagttctcccacattactgacaaataggtatgtttccttatcatccacgattattggtgtagcctcttcctcccttgtaatttcctctttgaccacgaccattgtaccctcccctattgttgttgttcaaggaaatattggcaagattagcttgaacattggagagagtatcagtggtgtgcttagttattcgaagttcatgactgtgcaacatgaactcttcttacagactcaaaggattctcacgagaaatgagattaacaatgaaaacttcatactcttgtcccagtcatccaagaatgtacaaaacaatcggttaaccagcagcaacaagagcatttacataacacttcattttgaagaagtactctttgattgaggacgatcctttcttggtagcttgaagaatgccacaaacttgctgaattttggctctcgatctttatggaaaaagttgtgttaaagtagtccaaatctcaagtgaagttcgacagttgatcacgtgtcccagctttggtttagacatagaatttatcatatctagtgcattagaaattaatcgaaccttaaccattgaagataagcagagttagaaagattaccttcaataatctaaggtggtggaagaattgttccaagcacattagccgttaagattgtaagctcttacaacagctaagacgagagatctccaaaatgtgtaattgtatctgtctaatcgtagatttaacagaagaaggttgttgtttggaagacctgcttgtggagcatctggagcaggttggattggttgagttgtgataggaggagaaccattgcctttgacttgacctccattgttacaggaattagctccattcgacgcaattttggctctgataccatggaaagatttggaacagagagagagatgaaatggctcacacacaataggaaagttagttacaacagctggtactaagaacatgaaacgagaaattagataccacagaaaagtaacagaattgttagctaacaaatcaactaacttatcttgacaaacctaattggagaaagttgtgtaatgaccattccatttttcaatttagcttaataatttatcaaaaaaaattgaaaatccaaatcacaatcacaaggtagataggatttttagaacactaggttagttaaaaacaaatagtttaatttctcaaatagattataaatatataattgttattcaactactttcactaactacgtactactaggagcattgttattaaacactttaaaagtgtcaataccatatcgatgtggcacattgtgagtgattagcagtttcttatattatttattagggatattggtagctaaaatacctgaattttacggtttgtaacacttaaccacaaaaactggatttttggcggctaaactacctaaactcgggttccgttttgctctgcacacctccgtccaaaaatcacagttaagtgccaaggtggac

SEQ ID NO: 297793 - DNA, 7893 bp, Cannabis indica
ttttttttttttgaaggaagtatatgtaaatcttaattagccattttaaaattttgaagataaaaaaaagaatcggttatacgagcaaaggcaaagtgacggtttgtctagtgtacacggtaagttcacggaaaacaaaaccgtacatttccggtgatgacgagaccacagctgcggaaccttctctcctccaccgccattctccggcgaaccctttctcccaaccctaatcaccaattcgacttcgcagccaaatctccatatcgaccttcattcttatcatcctcacctcccactttctcggagaatcacaggctcttccctactcctggactcgattttcttgggcgtagaatttctgggattaattttatttcttcccaatcgacctcggatgtcctcgctaaatgttggaactgtaatgagaaggctgaagcggcgccgtttcttgtgtgtcagtcttgtcggtgcattcaacccatggatcactcggtcgattactttcaaatatttggattgtaagtcaatcaaattctttttttttagttgaatgttttgaagttgggtttcagatttggtttcgtggtaagcaagcattaagttatttttttatctttttggaaattttcttagcctttttctagtttgtaggttgaaaaaaataagattgaacacgcaaggattatataaaatttctagctcaaacttttgtaataggctgagttatgaaattagattagattaaagctgataaatttatttactgtcattaggaagtatatagttttaagttgctgtaatcattttggagcttcttttgtttttggtaattagggagaaaaagtatgatattgaagttcacaatttggagaggaagtacaaagactggcaaaagcaattgcaccctgatttagtgcattcaaaatcagaggtttgtcctctataatgttacactttgagactgttaatatgacaaatattgctccttgttgatctttctggtattttgttagaaagaaagagaatatgctgctgaacagtctgctcgggtgattgatgcataccgcactctaagcaagcctttgtcaagggcaatctatgttgtaagtgttctgtctttccaatttttatccattttattagactatatgagagtttatatgaaatatgtcctttcatgtcctatttttcttgtgtaaaagcttctattgaaaactcaaactgaggggttggaggagatcccatgatttacttttagaaggacctttatagtgtttttgtttgcctcacgggctctgtttttttttcttttttctgtgtttgtgtgtgtgaaccaaatcatgtacaagttcatgaaaactaaagttggctacttttgtgacagctaaaacttgaaggtctaaatgttgatgaagaagaaactatttcagaacctgatttgcttgctgaggtaagttggtatggcatgtttgcccaatgcaatggaatttaattcatatttagaattttatattaagaaatatatatactaaagagagtgattctgttgttccataaagtgtaagactacaaaggaatcgaggttgcttaaaattttcttatttacttactagtccagtacagggattttcgatgttttgtattactaagaatatgatgaaaaattagaagtaatcttattaacctgaactttctggattcaaaatgcagataatggaaatcagggaatctgtcgaagaggctgctgactctcaggctttaaataaaattcgatctgaggtacagtgagccttcatcttaacattcttgccactctgaaagtagcaggaaggagtagagtaattttgttctaggatataattcatttctcatatgctagattctggggcacttctctaaactgttcctcattccttttctgaaatttgaatatcactatattcaattactatgcattgaaaaattgaaaagtagttgctcatttatgtcaagtgaatggcacatatatgtgtacaaatatgtatgtatgtatatatatatatgtgctgatgtaagccactgagcctttttctatgaacctgtttggtcacgtttagaactagaaatcccagcatattatttctaaaaccgtttcattggtctacatttgtgaaatcactataccttgtcatttctttaccgagtttatgtttgtccagatgcaaaaggaactaaaacacttgtccagtttgtttacaaatgcatatcatggtcggaactttggagaagctgtgaacactataaggagaatgagatattatgagcgtgttattgaagaaattgtgagaaagctttaaattaaggtattcaaatattgtttattgttgactaatctttgctacacattgctgcgctactgtggataatatgcttttctgactaatctctattgcgcgaataagaatagaaatagtgattttgccgctttcgtgtcctactctatcgatacttgaaagtagcatgtatgtctcaccttcttgttactatggagtcaaatcttcagttcacatatatctaaccaaccaaatcattttcagactctttactggcctcgtgctcaacacgtaagctttgctgtttctcatgctgctaccagtttatcacttggtaagtttattttttgttccactttcagtgatcaaaacttgtctcatcagttctagtttactttttatgattgctaaactggccattactattttggggagagtaaaaatagaaagatgtggaaggtgtaactgatttgttcatatttgatttaataatggtgccagcagcaacttctgaatattcttttcattccagttatgataaatataagctgtatttcactttaatctaatatgtggttcttttttttttaggtagagttcaaattattatccatttgaggctccaaaagaaagaaagaaagaagacgaaatttagcctagctgatttcttgttcagtcttacactatgtaatttatgttcctcctacaaaggcagagacgcaggttgaaaaattatcaatatcatcacataacatatatcaaggcttgtaagaataaaatttgattgttaaatagattaaaaaaaaacaattattttattaagtttgaagagttcaaagccacatttcctacgaaaaaaaaaaagaaaaggttttaaagcttcgtgtgttgcaatttaccttggcttatttctctggctacacatattataaatgatggtttaacgtcgagtattgctattggttactagtgattttcttcaataagaaaaacaaaaataaaattgttgcttgaaacatttaacaagaacaaaaataaaattatgtcattaatttgcgacttcttattaaagcttgtttttgttgcacaacagtctgcgccaaactctgcttgccttccctgttcaggccataaaaaattgttctaaaattaacagtacttggaacaatgccactactcaacatttcatctaaaagccttagagcttcttcagatttccccaccttacaaagacaatcgatgaacattgaatatgttttgaagtcaggggaaggccctttaagtttcagaagatagaacacattccaagcctcacaaacattccccgaggcgatatatccccgaatgaaagctgaataagtaacaatagttggttcacaaccctcttctctcatctttccaagagtttccaaagctttttctatatgtttttcttttaagaaatgaactatcaaggatgtgtaaacatgaacagtcgggtttacaccagcctgcttcatcgaacccatcttttcgagtgcttcttcaactcgccccttcctcaatagtccatgaaagatacttccataagtaaactgatctagtgttgctctatctgttcccatctcatccaccatagccaaagcttcttctatctttccagctcggcaaagagccctgatgtacaaggagtaactgagggcaactgtgaaaccagccttatgaagagaatccacacatttcctagcttccaaaagtttgtcaacttcacataaacaagcaaggtaactttcaactaattccttgtctgggatgtgtccatcgcgaatcattgcattaaataattgtatggcttcaattaccttcctacctttccttccacaaagagatatgatcaagtatttgtaggtattggcggttgggttacaattgttagctttcatctcagcaaaagtgttcagagcaatctcggttaagcctattcgaccatatagcatgatcgtgattgtccatgtatctgatgttactgcataaccttttcttctcatctcatagaaaagactcttcatgtgcctaaaatctttcccacgtcctgcaagtttaatggccatgttgtaagtttctgcagtgtggttgtagtcagcttgctttcctacccatgagaagaactgaaatgcagcataaccattcgtgttacaattcctcaacacctccacaacaagttccggcgtcaattttacagtggacttctccaaagtttcttgaattaaggaccaatctaatgacagtgacaaaattctacaaatttcctccaaatctctctcattataaacttttgaaagtggctccaatcgatacaaatctgcgatctttggctctgtcttgtgaatcaaatccatattggctccccattccacagatgtatcatcagtagatttcttgctctcagcatcaactttacaggttccctgtatctgttttactttctcaatattatttctctctccctttctctccatatgagatattacacattggaatatttcatccccaatgactatctcagaagcttgcattttgttcaaaaccttaagaacttcatctgtgctagaaattctacacaactccttgataaatattgagtatgatttccaagtgggactgatgcctttgtcttccatactctcaaaagctttccatgcttcagatatacgattctcacgaacatgacctgcaaccattgctgttattgccacactatcaggctgcagtcctacattgagcatctcatcgtacaacctgcaacccttctcgtactgattcaatctgaagaggtgttgcattaactcagtgtaagtggaagttgttggacaatacccagattctttcatgctttggaacacatcaagggctttagaaatatcattcactcttaagtatccattgataataactccataaaccttttcatcaacaagctgtttcattttcataatttcaaaaatttccaaagcgtctccaatcctattggccctacacaatcctttaactaaagtctcaaagtattcacggccaaatgtgacctctttatctttgaggtctcttatatattccaaagcatctcttatcctccctgataagcagaaactcttaagaacacaaccataaacaatttgatctggaatctgggaaattttcatcatgtcctctgcaactaaatgaacaccagcagtatctcctgatcttgccaagcaactcaagagcatcttatacaagctcaggtcaagttctatctccttcttaacaatttccttgtaaaattctattgcaatatctgctttcccagccacacaaagtgatcttatcatcatcttgtaaaccacctcatctggttcatgtcctgtttttatcattttattataaaccaacaaggctttgccaatcctcttggccttcccgtaatgtgagatgagaatagtccaagtcttgagatccatatgacaagaaacctcccccatttcctccaccagtgtttccatcaatccaaactctttagcttccccagctatatacaacatggtattataagtttcaagagtatgatcaaaaccatctttaagcttcatccagttaaagaatctcagagctaaatgtggcactttaaagcacattttcaacactttcccaacaatctccggatttaactcaaaacccaacttttctaaccgatcttccattgaaaccaaaccattttcagcacgaataatctgtgtaacctcatgaacaaccggactaacatcaatcacacccaactgggtatctcccaaaatcaacgtatcatcctttcctgcaataaactctcctcaccatttccacaaacagttggagcgcaaggcaagctcttttcactaaccacatcatctctcccatagttttcagcggatatcaaaaacccatatgagttccgatccgcaatgaagttatcggcgcctaaaatctcagtaatctcattgaatagcgacgcaatggtactgctttccgtttgtttcttcacgttggtctccaggggtttcttagacttatatgatctagcaatgcttgaaagtgggtcaacccgaaacaagcttgagaagccaaaacgatggagcttgtaagtagtggagtggagtctgggtaagacactcatggcgagctgagttttgtttcatggagaattcaaaagatgatgctttacgttctggccgttttaaaaaccccaaaaacattatgtattgaataagtatatattcgaagcacaataagacatgcaaagcgctcgtggcctaatggataaggcgtttgacttctaatcaaacgattgtgggttcgagtcccaccgagcgtgctacattttatttttattttaaatatgtctactttaaatggcggaaattagatgtagagtaatgttgtttttttattaaaaaaattagcattaggacaatttataaaaataaattaatatgttaattataaaaatataattaataaatatctaaaaattctatattcatatagggtatgtatcatcttgtaagtggcagtggtaaaataggtttcgacatggcatataaatacgaatacgacacgaattttatgggttagggtcaaaaaattagacacggattgaaaacgggtcaacatgacttgacacaaaataaaaatagatcaaacatgatacgacccgcttaacacgaatttgacacgtttgacacgttttttttaaatataataaaatacaaaattattaataataatataattatataaaaatatatatttagtgatttaatgttaagttagaaaattttaaatttattttttttagcataaaattgaaaatatttaaacaaatttatttttattatatatataacaaattatataatatataaatgaatataagttttctaatggaatctaaatttataatttttctttataactccaacttcaataatagcaaaacgggtcacagtgggtcgacacgattttttacgggtcgggttagggttgagaaaattagacacgagtcaaaaaatgggtcgacacgtctgacacaaaatataaaagcgggtcacatgaaatatgacacgaacacgaacacgacacgatgacacattttgccacctctacttgtaagaaagtacaagaaaattaagatcatacaatatgaataaaataagttggtaatgtattaaagtatgaaatctttaatatagtattaccaagtatggtttattatattctaatgcgtgtaactttaattcagatcacatatgcagatagatacttaataaatgtgtcattcaaattgagctgctagctaaatggctgaaattagagcattgacaatatgaggtatagtgttttgtgagtggttagctagtaagggtgtttatccgatctaaactgttcgtttttggtcgaacaacatccaatctgcactaactgcgcatttaatattttggatccaatctgatctgcataatagtttaaatccaatccaatctgcaatagtgcagattagatcgattattttagatcggttgttttttttaat

SEQ ID NO: 297794 - DNA, 3580 bp, Cannabis indica
aacaacaatactcttgatcttatatttaacagttggcatccaaataaaccatctgtgtttgatgcatgtaggtgaatcttcaggacaatatactgatatccctaatgagcagagaaatttgtgcttaatgagtagcctatcttacatgatctcacaccaattgttccactagagttgccttcagttctcagtagcactccaccgcaagcagacactgctcgacttaataccaacaccacttcctgacattgtaggtaccaaaatgctacctgaagagcaacaacaaaaacaatatgaaaaccaggttaaagttaggtattcacacgccaaaaacttacttagtttccaattgcaacaaatacattggaacaatgacatggctgatgagatcttagccctaacaagaaacaaaaatacaccctggtaaaacttccactaggcaggaaggctattggatgtaaatggatttacaggattaaagaaaatcctgatagcactatcaataagcacaaggcgagattggttgccaaaggctttcaacagcagcttggttttgattttactgaaatattcagtccagtggttaaaccagtaactattagagaacaaagccccttctatcgccatggagatcctgttgttgcaatggaagccctgtcatcgctgccacctacagaaaaaaattaagagaatgattaagatatagagctttaaagagtgggagagagatcattacaagtgagagatagcaagaaaaaaagagataaagagtgattatgagaaagagagagatctccgcaactgtggtctccgcaaatttgtgagaatgttaaaaaggaaaatacttgaggtcttttgataaaaaaatgctctttcattgtaatagtttttgtggggtaataatatcttaatgatttataaaaaaaaattatttaacgtatatattaatttcttataacatgcaaaaagtaaactaagtttagaatggacttatagaatgtctcgcggcagatttaaaattgtgtcatcttttatttggactacattttattaattttgtttttatttaaatactaattttattttaataattgtaactaaataattattaaagaaactcatattataaaaattattatttattataacaacaaaatgtcttgattaatacatcactttttaatttatttttcttctatttttcgtcaacttagtaaaaattctcaaaaatgatatgaactttaattgattaaatcaattaattaattattaagccctattattaaacatcctaaaaattgtaaggatcatgaacttataaaatgaagcccgtagatttaaaattcaataaataaattttttaacttattaatttctcgtgactccactaaatagtcaacatcttaataaaatattaaatattttaattagctaccatttacttctatatatgaatatttatataacatgtacaaggaaatatatgtttgttatgacagatggcagagattgctgtaggcttggctgtagacaagttgatcccattactaactaatgaagcatatttgttgagaggtattcacaaagatgtcgagggaatcaagtgtgatctagatttcttgttggcattccttaaggatgcagatgcaagagtcgatacaaatcaaatcaacaacaatactaatcatggtattaaagtgtgggtagagaaacttagaagagcagcatttgaagtggaagatgttattgacgattacacacatcttatggtgaaacaacaaggaaatcatccccatatccaaagatttattagcattgttcgtaaaaatgcttgcttggttattaaactaaaacaccaacatgacatagcttctaaaataaaagacattagacaaagaattcgagatataaatcaaacaagtgcatcttatggcttcaattccactccacatgacaaatcttcatcatcaacttcacgatcaagtagatggtatgatcctcgaaaagattcatgctttattaaggaaagtgatcttgtgggcattgaatcttctagagatgaattgatcagaaaggttgaagatggatccccaacgcgaaccgtaatctctttgttagggatgggaggacttggcaagaccactcttgctaatcaagtgtttgttcatacaaaaaatagttttgattgttatgcttggattgaagtttctcaaacatacaaaagggcggagatactgcgaattctagtgaagaaattctacgtacgagtcgagagaagaatgtgttcccaaaggacttgatgcaatggaagaaagcatattgacaacaaagattagagattacttatgtgaaaagagttaccttgtgatttttgatgatgtttgggagccaacattttggggtgatatacaaattgttttaccaaatgatggcaaagaaaataacagaagagtaattatcacaacgagatatgctgaagttgcaaacttttgtaaagtatcatcatgtgttcatatccattatctacagcgcctccttccagagaagtcatgggaacttttttgcaaaagggcttttcgcgatgaactcaactacggttgttgtccacccgacttaggtaacttgtcgcgtgagattgttgaaagatgtcaaggattaccacttgctattgttgtcatagctggtcttttatcaacaaaaagcaagacaattagtgaatggagaaaactacttacaactctaagttcagagttacaaagcaatgaacatctagaaagcataacaaaggttctttccctcagtttcaatgatttgccctactatcttaaattgtgtttcttgtatttgggatattttccagaagactactcaatcaggcgtggaagattaattcgccaatggattgccgaagggtttgtgaaatcacaaaaggataaaacgttagaggtgattgcaaaagaatacttggtagatttaataaaaagaaatctcattcaagtgtcagaagtaaattttgatggaaaagttagaacatgtcgaattcatgatcttctacgtgagattgtcctcaagaagatggaggagttgaatttttgtcaagttttgtcaccaaatgattcaaggttcaaaggagaaactcgacgcatttcaattgtcaatggcggttatgatgttattaagagtaatgcttcgatgatttctcaggtgcgctccatttttatctttgataaagagaaaattcttaatcatcacgtacgtaaaatcttcacaaatttgaagttcttaaacgttcttgatttcgaagatgctccaagtctagatcacctccccaaacgatatcgggtgcctatttcacttaaaatattggagtcttcgaggcacaagagtcgcgtgtttgcctaaatcaattggaaaactaaaaaatttagagacattggatttgaaacaatctttggtgtctgaaataccaattgagatcaagaagcttcatcgacttcgatatctattagcttaccatgcaaatttgaatgagtttgcttcatttaatttagtgaaaggagtgaaagtacacactgggatt

SEQ ID NO: 297795 - DNA, 2114 bp, Cannabis indica
ttgagatcttgataatgctttgttacagaaaggaatcaagggctagagatctgaacggaaggagttattatattccgctgcaatcaatataaggttccttaaactctttatatgtgtttatatacattgttttagaaatttatattaggatgttaaacaacatacatggtagtaaatctagatcctggtaaaataattccaacaataacttcttcaatacaactctgaattggacgattcaagatgttccgaaaagctgaaaacaagatctaaaacttttatgttcagctccatgttcatttcttcttccaaaatcattgaaacttgtaattaagttatgctttataaacctgaactcgtcagcttccactattttctactaaatatataattagtctttaaaatggcttaattaaaataacactagttaataatttaaaaaattaactttaaaatattaatatataaattagttatattgctgtaatattgtgagtctgagtgctctaagtattaatttttaaagtttattgttaagaaaaataaatattaaaataattataaaaaatgaatttcaaatttttgcctagtcctaaataatttttttttaagtgtagtataatagtatttttacaatcaaaataataatttaatagcttaaaattcttgtgttcgaacccaaaatttctcctttttttcctatcctccctcaccactaagctaactctagtggcttgcctagtcctcaataatttaagagggcctgaatcacacacaacaatttgactttaatatgagtgggtaaagttttaagcgtgaatacaatatcaaaattttaatgccgtgaaaaagagattgaagaggtaaaaatttgaaaattcaaatataaaaaagtttcttttatagtctgctctcgtggccaccagaaggcccagaacagtaggacttttggtcaattagctacgataacatttgcatgtgagagttgtgagtatataacatgaaacaacttattctgattaattaattgatataataaatacaaccaaacaatacgtatatatatacatttattgttataataaaacagtacgttatatatacttgaaccccacgccacacaaatgtacttgctgcccaagaaaatcaagtccaaccgtctttctactttctgaattaccttttttaaatgtagtctaatttaccaaagtacccttccctgttttcttgggccgcaattgtgtcaactggaaacagaacatctatcatcataaaagaagtaattttattctctaaattttaatattaaattacgcctttaattttttccgctattaaaattttttgtttaatattgttaagtttaaagaattttattaaaaattccattcaaaaaatgtatttttgtttaattttaatttaattttattaatttggtaattgttcttctaataaatcatgctctttagattaaattcaacactaatttttttttttaaaaaaaataatttgatacatgttaaaatttagagataaaaatcccaattaacatacaaataaaacattatttgatggaattctccttttaaacgagttttttttttctatgataatcaaaatgtgttgtagggatggaatgccaaatataatatgtcaaaatagagaagggaaaattaaaaacaaccaaaaacaccgtatgatagataattaaatatctattcaaaagccctatatataccaaaaataaaataaaaatacattctaagaatatatattctatatttaatttgaacaaagttagaattaaaaattgaacaatgaaatttaataatgcacatgacaacgaggaaacttcaggaccctattgaggggatgaatcgtccaaataaaggcgcgtggtgaagtgtccctaataaacaccacacaagtcagcgtcagcctagcaaaccgcctaagaccaacccacttgagttgccaacttttacacttgccaatttgccattgtatttaaacccttcttctccataataaaccaaaacacaccaacagtcaacaactacaaaactcaacgccctcctctctttccaacacacaaaaaaaaaaaaaactaacca

SEQ ID NO: 297796 - DNA, 3406 bp, Cannabis indica
tgtttagtaagatagactagaggggcagactaagaagtattggattgctgatttgtggctcctggtttggggggaacccagttcttttcgaatcgataatgacatactggtgcagtatgtccaaatcgaagacagagttgacacagcggtctattgttctgagttggggcacgataacctcctcttgtgtaattcttgtttgcaggtgggcgatatggattgtgtcatgagccagagacagccatactcgcctgaagcttcatattgagatcaacagcagtattgtgatgatctaagcgactttcatgagcaagaagaagtgattgaacttcttcatatgtgagatcatcactgcgcgcagtgataccggagacaacgaagtcgtatttaggaccaagaccgttgagaagttgtaggatcaaatcttgatcttgaatcggagagccagctatagccaatgaatcagcaatgttctgaactttgtcactgaagtgagatattgattgtccgcctttgcgaagcgtggagaattgacttttcagttgaaggagacgagccttcgactaacttgagaatcgctgttctaaggcacgccaaacagagtgcgaggaggtgaaattggctactgaggcaagcacagcttctgtcatggatgcacgcagccaagatagaagtaattgatcttgacgtttccattgatgaaacagaggattagtttcgccagaaaccagttgagcaggtgggggaattcctgcaagaaggatttcgtcaagatcgtgtccaatcacagtgcgaagaacctgtgatttccacgacaaaaagttagtacgatcaagtttaacagtaagagtagatgtgagggagtgagaaaacggattgttcatctgttggggacgatcgacggctgcctgagtagggaccgtgttgttcgaaggagctctgggagggacggctgcttgagtagggcctgtagacgaagactccattgaagacgttagtcagaggctctgataccatgtaagatttcaagagagatcttgaaatcagagagatcttgaaccagaaaaacaaagagaaaacagtgatgaacaaaatgatgagaagcttaatttctttattgatagaagagatatttatacagagcctttaactgagaaaacaatcctaactaactaactgacaattcagttagagctattaactaactacagcttgtacatcttttaactaacagtactaacatgatcatatcttcatagacgaaatgattttctcgttaatatgtgaattaatagtttgtacatctgtgtctcgcctaagattttacggtcagcaagttatagatatactctaccagttaagtatttaatgaattattctattttagtatcgtgtaatataattgacattgtatttattgattcgtattttctcaagttgacacgtgtcctcctctaaaatgcatgtatattgggagaaaactagggcaacaccttcctattagtgaaacgtgtaaaacatgggaaaccccacgattatgttactgcacattaaataagattaaacaattgttatcctatttctataaatattagtaaaataaaattgaaggggacgaccaaataaccactacaaaagtttatactcaaaatactcatagaaataaaagtgactcgtggtttatataaatttcgtaaaaaatttctatctctatttaatactttattacattcggtttattatttattacttatattacttttggcgttaattatgaaagctcatttactttaacgaaattttgaattaacaattatattactacaaaatcattccgtataactcatataaaggagatgtcgtcgtccaatgtactcataattcttgtagttacaaatggaatttccaaaacaagcagtgctgaataattaacaagtactttcttatattactatttagtcaagatacaagttttaattatttctttctttttgtgtaccaagaaagtgtaaattttattaaatagccaaaattcaatgaatatttatgtcttgaattcttgttacaacttttctaattaatttaataatcccgctacagaattatgaatttggggtggtaaagttaattcttgtacaaaaaattctataataatcaaggacagaagacaaccttgtagttagttctaccagggcaactaaatgtgctagttgaatcatcatctaaaggataagtataagcatcagggcataaactcttaaaaaactgagaataacttgttgacccgcagttgctagatttgcaacaaaactgatcattattgaacactgtacaaggattattacaccctccaaggtctcttaattccatcggacattgcttgttgatatctgcagcacacttgatcccttggtagcactgctcagatgtgggactaaactccatgggtacgttgaagccctcaaccagtgagatgttgaagaagttttgtcgtaggttgaactcggctaaagtgttaggggctcgtccattgacttggcattcgagtaggccgtcgcaatcaccactgtcacacctaccatgccctgttgagttaaaaatgcaacctgttctggcccagatgcggccttctttatccgagctcatatcgtggctccgtgtttgacccgattctagctgccaaccgccacccggcacgatagctgcccaaacagtaaaagggcaattgtttgtgatgttgaatcttgtcacagaacctggtttacgcaaagttaagaataagagttgtcacattagttatttcctgctatatttaaattaaatcattaaaattttatttatatttttcagtaaacttgctgcataaatattcaaattattatatttgttgctaataaatatctaatttaaaaaacaagagggataaatacctgaatctataatatttttgtcggtacccatttcactataccgttagttattaattagaatgacacgtattgttcaagaattgatttgtttttcctatttcttagttttagaaaatttttgttttttaaattattattttcaaagaaaataaattggccaataggacatcaacacgtgttactctaattaataactaaaaacacagcgaagtgcataattacattgacatttaggttcaacggcacactgaagtgggtaattacatatacatttaaggggctgtttggaatgggttaatgtgaggaaagaaaaggtaatctcaatgattaccctgtttgttatgaggtttaaaaatttttgagtcatgtaatacttttaccctagtattccaactaccctaaaaagggggtaatgttgatcattcaaaaaaggtgggattcaaacattatattagttatttgaatgtataattaaa

SEQ ID NO: 297797 - DNA, 11091 bp, Cannabis indica
acatgtgtcaaatcatgcccctcaactattgagattcaattttactgttttagtgattattttatattaaaccatgctaaacagactttgatatctatcaaatcatatcatgtctctaaaatttaatatgtattaaatcatgctccctaaactttcatcatgttagaatttctcaaaaagagaatttttaacggccaaaaatttaaagaacatagatttaggtacatataaaagttaaagacaaaaaaatcttaattaatctaaatctatgtactaaatattttttgcaattatataaattaggcttatttttgaaggaagcagttgctttttggagttaatatcaaaaaataaaagtgcgaatattcctcatccacccctttcctttgctttagtttctctctctacaaattttagagagagaaacaaagaagacaacagacgaagaagaagaagaagaagaagtgcctctaaaggaaaggaaataagagagaattgaggctttcattatctttctccccttttctctctctctttttttttccccgagaaagcaaaggaaaataatatagtaggcagagagaaaatgatgaataatgagaatggaagagatgccaaggtttctgggttggtgggatccaataccaataccaataccaccattgtcaacaataataagtttccattgagtttttgggaggtgactgtggcttcctctgtggtattgggattcattattggtcttcttggggtttacttaaccatgccttcttctgactatagctttctcaagctccctcgtagccttgaagatcttcaaatcctcaggtagtttttgtttttttcttcatttttcaatttttatctttttatggtttgcatgcatgtttaatttgtggtaaatgtttaatctttatgaagtttttataatagatgctgcaattgggtgttttaaagattgattttggtgacaatttttctgggttttgagtttgaatctaataaattgagtggttttgttggttttagatttaagggctcatatgggttttcgatttaagcttgtattttggaaaattttaaaacttggtacttagtcatctatgatagattggatttcaatttttaaattcatcaagaacattttattagcttgagttgagtggaactctctttgtttttccctttcatataacatttatgcataatgcagatgcacactgttcaaagattgtctttagcagtttgatagttagatttgtgtttttttatgaatgttatgatttgcatgcatgtataattcattctacattttaaaaagaaatagttgtaatgagatattcattggcttttctcctttttggtgcagagaaaaccttgaaagttacacaagtgattacactgcccaagtcctggtgggctattgcattgtttacattttcatgcagactttcatgattccaggaactgtgttcatgtctctgctcgccggatcccttttcggtgtctttagaggcgtggctcttgttgtttttactgcaactgctggtgcttcttcttgctatttcttgtcaaagatgattggtcgtccccttgtgttctcactttggcctgacaaattgaatttctttcaagcacaggtgaattgcaaactcggcccggtttgttactcgtttcaatttgtcttgcaaaatggtttaaactatttgtgttaactctctcaggtggctaaaagaagagaaaggctgttaaattacatgcttttcctgagactgactccaactttgcctaatacttttatcaatgttgcttctccaattgttgatgtgccttatcatatattctttttcggaactttaatcggtctcatacctgctgcttatgttaccgtgaaggtatattaacacactttctgtgacaaatttgaatggcttgagagcatttgctcgaatattttattgaaatgctactacttgttataactacaggctggaatagctcttggagagcttcaatccattggtgatctctatgatttcaactcgattgccactttgttcctcataggaattgtctcaattacaccaactctagtgacaaaggagaagtctccgtaggactatagggtagtagctcagtttgctcggtaacatggactcgtgttctgatggcagacatttcggtatatcccctcatttcataatctgtcttggcttatcgttttgcttatgtcttaactgtattttgcagccattgcagactatgatgggatgcatggaagtgagtcgcctgatgaaactctctgcagtgtggttggttacctttacattttacacttggttaaagatgtttgatggggttggttggtttgagtaatggaaagaaaaaggaaaggaaagggtgttgtgaatgtgttgtttaatttcgataagtaggaaagaactctcatctcaatgtgtatattttaaataagagtataagtaggccttttttatcttttcaagttaccatggtttcattgttagtgttaatgtttctctcgtttccatttgttgttaacttaaatgaaatggtttaacaagtgaggagaagttgaatcaaatcaaatttggtttaacttaaagggaaccaaaattgaggagtgaagtgaaagttaaggttagttttgatcttaattttgatgtaaatatatatgttttaagttgtgatggaagtccaaatggtatggtttataaataaaatgagctattatttggttgagaagaatattagagctaaatggacaaaaagagtagattatacgttcaatgattagttttgaaaagatgacaaataagatttggtctcgttattagaaaagaaaagaaagcaactttgccaaaaagaaattgataacttagagatctcggagttgtccattagataaattttatataaagtgatgttacataatacatatataaataggtgtatacccatttcttaatttagtatattgtatttttaataatatttatttgggactttctgttttaaaaatcatacctatttggtattataaacttataattttttgataaaattttatcaatacaatgaaattgtttttaattttaatgaattcaaatttaattatttgattactgtttgatcaaattaataaattatattattatattttactttagagtattaaatatgtacaatttcaaaatataagatatcaaataagtattattatattttttttttcaaaaaaaaaaatattattgaaaatataaagtactaaatgtatttttcgagaagagtcggatactaaatgagtatatttccaaaaaataattttttactattagaattattaatttaatatactgtaggaccatagtggataacttttagagttgttaattattgaagtattttttataagaaaaagtatcaaattctatgtaaatgatagattaatattttaagacgatatttgtatttttgacaactataaatattatatctcattgaagatattcttaggtgaacaacttacaaataaaaaatatttgttatagtttagactgtaaattaatcaaaaactctaagaaaaaatttgaagtatgaaattttaagaactccaagatgatagttttctagtatactaaagttccaaaagagagctaagatcatctctagtttggccgaattgtaatgaaagtaccactacaattcaacttgtttggttttgctttaaaaactttgtaatgtctttacaaaataatatctaaacatttacttaaatatttcttttaagtaataatacgtaatgttaatttattttgttataattagatttacttcacaaaaccacttttttttatattattatcgctaaaacaattaagtattaaaataaaacaatttcagtattattgccataaataacattatataaaataaaaattataattctacacatcactattatactacatatataaaaaataaaatttaactttatatctttattttataccaaaagaaattaaaataatactatttttatcactacaatttttcttattatcattctaagagtaaaaatgaatcaaatataataaatattaaacaacaaagagctgaatggcctcacccatcttctaaaaacagagtagcataaaagaattggtgtatttaattcaagaaacgaaaacccagaatttccttttaacaaattgcttagttgataaaatacaagacataacagacctttaaaattagcatagagtattgagaaccccttttaactgtattctatctaactttctttgcttttttattcttgtggaaactatccggagtccggctatccatcttgcgtttcatgcctccttgttttgaagcaccgccactgtatgttgcctttgctttcgcctttctggctgccaccgctggtcttttatctttacggctacgttcaaccactgctttcttagttgtcaagatgggcttctctggccttctggctttcgctactttcttttcgacaccagttttgctagcacgcagaccctggtacgatgtagaaacagttgaaaatacctttttactatcaaccgcagtctcgaaactccgaaacttcttggatggggagctacttttatctgcaggtgttgggttacttctcttagatggggtagcagtatctggtttcgcatgaaatagccttagctccctctcccgaagcttcaaatttcgtttcctaactactgcagctgcagcttcctgtaagcacaaagacaaagaagatgatcataaattttctgtgtgtgttaataacagcaacattaacaaagaaaactcagataatgtgatactgcaagtactttacaaaaattgcgagatccaattccatcagcgaaatcagtgttaaaaataaacaacgttcctttctcaaactaaagagtctttttcatgattctcctcgtcaacattaagaagataaagcaacggtgatctctcagaacatcatttagtgccaatattggcttgccaagacaaactcaaatactagaatctactgcaatagtgtcattgtcccaataactatatgatacatcgaaatcggagtatgctttgcttacagctaacatcactaaaggcccaatcatagccaaaacacacttaaaataatctactgtcctagtcacttgttcgagggaacaatgcaaggcccaatgagcagacttccacttacctaatcatgtttctaaatgtatgtcttatgtttttctgcatgcataatggtaacactccaaccaaccatgttttatgaaagtaatgcaaatacgttaacagatttgtgtgcataagagttgtaacatacttttgttttaaacaagacgtaagcaaaaccctttccaagattattatttggatctctgattattcgaaccccttcaacactggatcccatatcactgataccacaaaacacttggtaaacttcttcatcctgcagaaagagaacacatacattacaaaaaaaaaacgtaggaaaatatgggacaaaaatttgaaaactacaaacataaaagataagttacaaatgagcaaatcacctttacatcaaatggtagattgcccacaaaaacagttctcttatgatcaaaatgagaaatctcttctcccttcatcttcttgcgaggagggcatgccctgtcaactcggatgtgatgtcctgcaacctaaaaccacatacataatttgagcatagcatacataatacctttacattttcattttaatatttaaatagagaaaatcataatgaggccaaacacttaattcaacattagcacataccagagccatattatgagacaaagaagcttgtgcagattcttctgtcttgaaaacaacatatgcatgaacgctgcacaaaaaaataaatccaacaattccactgtcagagaaaataacaccaaaaagagtaataaagagaaaaacaaacattaataaatcaaagcaaacttgtacttaaacattaagatgaagaaaaaaaaactcctatcttctagtaatgactgtgatgtgcttaaactcgctctccaggatctatgtttacccaacagttagaaattatagagtcacacactgtccatagaacccgtattttcgtcatattcgttacgccccaacggtggggacaagccaaccatgtaattagacattgatacataaaagataatcaattacaccacccaatgaagagcacatttttatttaaatacgcacacccacaggtctagttcaattaaaaagattcctttactataaatgttaaattttctttcactaacaaattgttatgagcatagatattctagcaaaataaaaaaacctcatatctattgaacaaccaacacaaatttcagtcaaataagatttcaatgtgtctcattacattaacatccaacccaacaattgatcagagaatcattacctgtcagcagcttcatgaaattgtttcgtaatcactgctccctttcttggcttcttggtctagtcaagcatcaaaagtatgaacatgataaatagctataatcaatcaaatgaataaagaggaaaacctataacaaatcaacaaaattgaaaagcaaaaacactcacatccgtgattggcacagaacgaatcctcacagaatcaacctccccaaatttagtgaactccttaatcaaagctttcttctttacagacaatggcaaattcccaacaaacacagtcctcaaaagtttactctcatcatcaaaaccttctttcgataccaacatgtccgctgggttatccacattctttctcttctccccaacttttccaccaggtcgtttagcttcatccacttgattatccactccagctccaaacttcctcacctcatattctttctctaactcatctctctttctcttcttcttcttcttctccgtcaccacaccatcatcgtccccacccaattcagagctctgcaacctctctttcttctccttgcttctcttcctcttcttcagctcatcaatatccatactttggaaagcgccatcaatggggttcacagaagcctccccttgagtttggtcttggggctttctcaagaatgggttagcgtcagagaagattgaaaaggagccgtctttggcaacggcgtctccgaagagggatttgaaaatgtccgacggaggagaaacagcgtcggtatttgaggcggtttctgggtccttgggtttatttttccccattgtacgtggcttctatggatgaaatcgggaatcagagagagtgagaaagagagagagctgagaatttgagatggaaggtttgaattgggaaccctagggctagggcaacgtagcggagaagacgacagaagagagaggaaattcagaaattgaattaggtttcgccctattccagctctctccctctcccttcaaatcgggtcgaatcgggtcggttcgattattctgccgcaaatacttttagagaaatttagatagtatattaactttcattattttttttaaaatattctcggtattttttacttttttactatatttttttactttacttttttactatatttttttataagttttatactgtaatatattgtattaagtttttattggtgttttactagtgttttttagttgttttgctgttattttgagttgttctgttttatgttctactgttgttttataaaaatacagtattttgaaaaacttttccgtgtgacagtatttttataaaagttaactcaaatttcagtatttttgtaagtttccttacttttatcattttaaaattaaatttagagaatatcaatgtccatgaataatatatttgataacttgtattttaataatatttaaatagtttaattatattgataaaatttaataaaaataaataaatttaagaaacaaatatatatgattttaaaatacaaagtacgctataagtattattaaaaacacaaagtatgtaacttatatttaaataaaacacaaggtaccaaatgtgaagacacccttaaatttacaaaagaaagtaatttgcggcgtaaatacctaagtttaactattagtagataaatatctaagtttaattgacaaacctaaattatatttctgaaacttccgtatgtacttataaagtgttaaatcattattcacgtgttattttcttattgatatatttaaattaatttctcgataaaaaataaaaatttaataacttagactaacgagggaccagggccggtctaaacatatggaagcttggactattacacaaggacccctatattaggccttttttttatcatccatttatatatataatatagtaaatactattttttttttgtataatgtatagtatacataataaatatttataagatcaaatatgcacttagcagttaaaaaatttgataaaattttatagtcccaatacacgtgattttaaaaattttacttattttagaatttatgaaatattttgttttaaaaaaaaaattgagattatttcacaaatacacaaaaataacaaaaaaaattacaaaaaaaaaacagttgtacgaaattttaaatattttttacaatttttatgattttatttacagaaaatacgatattttaatatattttttattatttgcatgttatttttttgatgttgttttgatattattttcttattatttttatgtaattttcttgttgttttaatattatttttatagaatactctaaaaacatataaaaaaaattgaacataaaagtgtaaaaaaaatttaaaaaataatgtattatgtaatctcaaattcatatgtatccaaaaaaaacactactcagtcctaatttgacgtttctctttgtatttatctttctattttccattacgattggtacatattttgttttaattttaaaacaataataataaagatcgacaaaaacaaagaaagaactccctatagtataaaaattaaaaacacgatgatgagaacagaccaaccaagataattaatcatctaagtacaaaagtatgataattgatttaattgtaattaatagcctagctaattggccctgaaaaatgattaattttacatgaaattaactggataaacctccatcttattgggataaaaaagcccaaaattttgctcagtcccttgaggcttaagattctcattaaaaatagcaaaaacataagtctcaacactctttccaggcctcttgggagttccattaccattactcacatgactaatcaaattgttattataagtttgtgcattagcaatagtagcatacacatcaccactatccccaccggacggccacccgctctccgacacaacgatttcaacacttccaccgccaccatcgcacctctccaaggccgaataaacggcatcaaccatagcatcaaaaagggttttgtactccaaaaccccatctctaaccacaacagaattagatgtgaacaatgcataagacaaagagatattaactggattgttgacgtaagcaaagtacgggtacacatttaccaataaaggagtttgtgttgtggccaaaaaatttgctatgggtcccatcactggtagggttgtattggagaattttccattagaaggagggtacgaaactcccaagaccgaattggctactgctgttgttactgggattcgtcctgggatcaagcctgctactagggcttgatcaagtgcggcttttaaattttgcatggctggaagtacgtaattttgcatgtcgctcgggatgacttcatttccagccgatatggctcgaaattttagggttttggcgaatgggatcacgtttgtttggacccaatttgaggaaaatgatatgcttgtggagagttgttgaagatcttgatttagggttccaaggattacttcaatgcctgagttttgtagagcttggagggcttctatgttgggattgaacagacgagtttttgttatgtttttggattttaggagtaaaacgacgtcgtttggtgttggtagattgttccctaacattccgtagttcaatcctacagctcctgcttctggattattattatcatgataaatttatatgtataaacacatcaaaatcaaattaaagccaataagccctatgataataagtaagatccttatattatagaaaaggaaaaaaaaataagtagtacctgtttttatgatgaacaaatcagaataaagaatggcaatgaaaacaaagaaaattaaaagaagactcataaaggagaaattatttgattttctcatgttgttgtgtcgattgatctctctgaattttggatcaaaatatacttatattaatcaaattgaggggagaaattaataagaagaaaatacatacactaaaagacaacatgcaagacaaatttaatatataaatagttgaaattaatatgtatatatagtatattgatacatgaatcaaattaaagaatataaaactatactttggaccatgtctatgatgttttacttaatatatatcgttggaaattgaaagttttggcagctatatattgagaaatcttgagaggtcgatattagcctctatgctcttcttataaattataagccacacctaatgtctttgtgtataaaaatatattacttcttcaaagatagggtcatttcagaactagttttgttttggccagtattgtttttatttctagagttattttgtttgtttgttctagttttggaattcctcttttttgagccttgagtgtttgtctccttatatttgttctttacctactatttatggtggtatggtacttgttaacgactttaactacgaccgtgtgcctcagtatatcagtgtattcgcctcgttgtcgttttctcgtccttatcaagaataattaatatttgcttatccataaatgttgtaatggaattttgtctttggttttaactattgaatgaagttttgaactttctttcaaaaaataaataaata

SEQ ID NO: 297798 - DNA, 2361 bp, Cannabis indica
tggaagttttggttatgaatttggatgattttggttgagatttgtgctgaaaattcgtgttcttggtggctagtttctggattttcaacccaggtgttggggcatgctctgagcatgccgcggcccgccctctgtagatggaacctaggatgtgtcccaggtttcgcggcatggcttgggcatgctgtggctcgcccttgagttcttgggcagttttgagtttgaactttgaaaattcataacttttgattccgaactccgatttgggagacttgtaataaagtttgtaaatatttttgggatcccattggtataaagtttaaattattacaagttttattttcattctgtttattacaaaaagtttaaattctgtgcctttttgcttagcaatcccgtttaggggattaggatttcgtaagtaacttgggtagcgtgtctaaatttttttagggcgttacaatatgtctcacttctacatttgcactgactctcacagcatactcggttgcaaactgggccagctgcattgacgatcgtaggtccacaagaggttacttaatgtgttttggtgaaaatccagtaagctgatctgccaagaagtaacaggtagtggccaggttcagtactgaaagtaaatttagagccttggccaatgcagcaagtggattcgatctttgctcactgaattacaagtcaccttagtctatgctcctactataggggtggacaatcaaagtgcattagctctggctactaattcaatttttcacgcacggtctaaacatattgaatttgatctccacttcgtaagagatcaaattcttgacaaacagctttcagttcaatgtccctgctcatgatcaaacgactgacattcttacaaaggatctcataactgaacgctttctttatttgaagactaaactaaaaatggtatccacactatttcgtttgagggaggatgacaatacacattcacaacttcatgaagacagttaaaaaattaattagttcgttaactaattttattatttgttgcaactgattttgcaacttgtctggttagttttcttgaattgtattgctaatgcatacttaattttctcaaataaaatacgttttgctttgtcttctctcttttttctctatcaagactttcctatgtttttcttcaaattcatactcttgagtttttacaggtgtatgagcaatttgggaaagaaattcctacaaacaccgttctccaaaataatatgtattaatgagtactttttaactaatagatctcaaggaaatttagtgcatgtgggtattaattatataaatactgaattataaatgtatttggtgcaaatgggggaatggcgggtatcactagtattgttcttgtggctgtcaaatattgcatgtgactgacattccctaaagtttgaaactttcttttactttttcatcttggaaagtacaaattaaaatgtatagaattggtcaaaagttgttagcccatataaaactcgccactgtcattactgtacttttttgtaattaaactttgtgaatatataaggttaaatattatttttgattatgttgtgtaaaaattattaattaaattttttgttttgttaaatgatacaataaattttatatttttaaaatagtaaaattaagacttgaattaattttcgataattttattttttaatataattaacttttaaactatttctaacaaaaaaaaaaagaatgaaaaaaatagaagggagcacatgtaaatataacagcttcctaagattatcttaaaaagataaaatatccccagttataaaataaaaaataaaaatatccccaccccaccccaccccatgacccctactctactctgttaaaaggtgaataataataataataataataataataataataattcattatgtataatttaattattgttaattgttttggagcctctctttagatcccatactgttaaattaaagtcatttaaacactcactttcaaacgtgcctaaatcttttagagtcaataaccacaacaaactaatccatttcagatcttaaatttacatctaattccattaatctatttatgaaaaacaaaagaagaaaaaattattgcaatgataataataataatcacaatcaaatactatctttttcacgatttataattcttcttcaaattttccaaaataaatctgaccaaaaaaattataaatatcaacttgaaagtgacactgacacaaaccttcatctcaaaaaaattaaagtgaagtgaagtacacgcgccaaatctgcgtggtgggtagacttgaaaaaagaaaagaaaaagaaa

SEQ ID NO: 297799 - DNA, 1802 bp, Cannabis indica
tttaattatttattatttttacataaagtaaaaaccatataacataaaattaagtatacgtgcacgtaattttcttctaatatatatatatatatataatgttgttggtaattcaatcttggtttggattttgattgtacaaaattgtgaatattgaaacttggtaactggttactaattaataatttgaaagcagcatataacttttttattattcttggtaattgtttcttatcttgcaacaaaccttaaataagtcaaaatttgatgccatcttaatttctttttgacaaaggttactattttacaaattaactttttattggaattcttagaaaaaaaactctttattagagcttcaagtttatcacatattattggtctaaaatatacataaaaggatgtgataaaagatcctagataaaaattacttacaaactctatctaacttatttatacataagctggttcatataaacttttcatttatgtaaaaattttatttttatcaggtcgatttattatgctagggttttgtaaaacgacactccataggacggccttgagggaatcgtttcagatcattgcaatagttgtaaatcatgaaatacttttgcacccatctaagcctccttcgaccgggggcatcgagccctagtggcacagctgcattagctgatgatttggcagtgcatggtagcgatgatcgagacaccacacaagcattggcgtcattgaaattgcgatagtaggcgttgaagggagccttggaccaatcggtcttcactaaccctcctcgcgttgcccattggtcagcgttccataggctcgagtatagcttcattggttgcttattagggaatggcactcctcttctctcttcattgttgaaaactcttatgggagtgttatctaccataaatctatacaacaactcatgttaaataaacaaaaataaaaatattataactaatattaactatacattaaaaaatgatgatgttctcacttaaaattatacattattaatctgaatttatttactctataaaaattaagaaaacacaaattaatatttttggtaaaattttaatagtcatataatttttatttacttttttacaatttttttaattacaattttacagtgttttataaaaacaatagaaaaataacagaacaataacatgataacaacatgtaaataacaatataaaacactagtccgtatatttaaaattcatataatcatatttttataaatatatttttataaatgtagaaatatccctatattttaattttcttaaatataaatatacattaataattaaatagaaaatcttacatgatgttgtgattgttccaaagaatggaataggtgtggaaattggttgtggggtcaaaccataggtagaattgttgttctctatctccttttccttgtgtgtacacattagtgtgtactatgtaaggatcaccactcaaatttcccaaaaactcaaaatcaatttcatcatgatttactccttgagaagatagctacatatacatacatgtttattaattattgataatgacatatattagaatagactaattaataatttttttaaaataaagtattactcatactaattttgaaatgcgaaaggacatccagatgtttaatactattatgaagtgtcatatcaacatgattggtttgaaatagaacttagtaaaaaaatttaagtttttattattaagaataaatgatatttttaaaaattattaaaaaatattttttaggtaataattac

SEQ ID NO: 297800 - DNA, 8853 bp, Cannabis indica
gtatactgcagtttaaaacttataaaaaaacacagtaaaaaagtaaaaaataccacctgacaatattttgtaacaaaataacaaaagttagtataccatgtaaattttctaaatataattgtataaaattttaaatattttttaacaaaaaatttatttaaaacaaaaacatacaatcttttaatatttttatataatttttataatatattcttattaattcattgttttatgctattagttttttgttatttatatatttatttttttgttttatatttatatatatatatatatatatatatatttttgtagtttttgtattacttttatagaacacgtgaaaatgtaaaacaaatattcgaagctaaaggtgcaaaaaattcagacaaaaaaaaaaaagtattttgtgtaaatttttctaataaaaattggtgtcagcaaataatttaagaaaattaaaaggaactaaatggcttggttaatataattccctcccttctagttttacttatgttgaattttgatatctaatctaagtgccggcataatcttctgccataatcaatagcacgagagatgtccacccagtaaaaaggcgtgcaccttttcccttaccattcttctgatcgtactgttcccataaaaagccacttcggtgataattgccaaccacatttctgcatcaagttttggcatattatacgacaaagctttcttaataaacccaaaggccgatgcaatttactgccaaaaaaataatgtaggatatgtcaatcaatagtaagtacctaaccaaattgctcctcaaatcattgtagatggttcttgctctgtctttaaacggtccatcttctgtagcaacatgaaaatcaaatttagtaaaagggaggaatattcttaggaaggaattgtcatagtaaaatacctttagaataatggttaagtgcagatagaatcatgtaattcatattcatccaaattggacccctccaatacggaggatcatgctctgtgtttcgtttcatatacatagagctgtaaacaagattagattacttagtactgtggacagaaacaacaatcagggaacagttttgaaaattagcatagaagagtaagactggttttatactcaccttgatctggccagagaacgaattccaaaatcagtccataagatactcctatttgatataagatccagctgctttcccaaaatccatgattcctacaatgagaaaaaagttgagaaaaataaaaaccgagagagattttaatataattctgctacaatatcaattaaaatggcatttatcttttgatgacggcatgtggaactcacaggcggaatgatcttcctcatgaatgggaaaaggctcacatagccaatatgagggaccagtctcaacttggggttttctaaaacttcacgaacaagctctcgacttgcatagttgtttccattcatgatttctttccagcttaaacgaaccttgcataaccaaaccaacaaaaaaaaatcagagcatattttacaacaatgattaagagaagttaatgggacaggagaagttaacatgcgacaccgagaaactacattgaagtaaaagcaatgaatacccttataagcacataatacaaagaaagatgagaaatactaattcattaaaaatatatttgaagactagatacaatatagaggaccccataactagagttcatgtttacacatacattaatggaagaaaggcttatgcattttaaggatgaaaaaaatgttattacaaatcataccttttcagtatggtagccaaaatcaaaatatgcgccgtgtgcatcgtcaaagtgcatctgtacatcaagaacaattgagatgaaaaaacagcaatattaaattaggagcacaattctaagtatacatatagaaacatcaaatgaattccttaaaataccaacaccacttatttaagattgaaaaagaggttaagaaaatagaattgccaaaaattgagaataataaatcaggacaaacctcattcagaattttaaaatctgaaagacgcttggccgtgttaccgtattcctgcaccatattttaatataaaatattaatctggcattacacactagtactagtatttgatacatcaaatgttcactatcatacctttccaaattcatttttctcaaaaagctctgtaatagaatgcaaacaatccgctgcaagaagcatccagcatctaagatccaaatgacgctcatcctcggttgggtgtgaagctcgtgggtaatcatccaaaccagaagaaagtgtctgggggttcccaaaaaaacaagttctgtttaaaattgtcatctttgagaagaaagcagtcatcaaattaagagttttgatcttttaatcaaagcaagagaatgcacaaggatctttgtggcacatattaatcaagacacactactggacaaagtcttacactccaaaatggattgaatcatagaataggaggggatcaattctaagacacaattccatgttgaatttttgttccaaacttccgaaaatattagttaagtggaataggagtcgggaaacatgaataatagagaacactacacatctaaaaagtcaggctctacctgtaatgcctatacctaataacccctagcatatgatgcacacacgatagttcttctatataaacccaaacaaaatcaaatgtaagaagatagaagtcaaagaacctttggatttaattcccgtcttgtcatattatctcttccatgccaatagtagctgctcacttccttccctgtttttcacaatgaacaaaattttaaaccaatcaaatgattaagaataaaagaaatacttactacaacatgaaggacttcagtggaaaaaccaaaacatgcttctctatgtcatgtatgatgataaatatgtacaacaaatgtacataaactattgactaaacagaaaagtttcagagagtcatcacccttaaaattaaaataaagaaagataataaaatgcaatgaagcagcaggtagtcaaaaagggtacctgactgggatgtattgaaccattgaaaccatgcttcgaggcggacaaaagctcgctccaggaatgagattatctcgttgcgctcaacagaattaaatttgttttccttcaaaccatgaatcatatctaaaatttcaaaccagattagattatccttgcatcaaggcacaaatttataaataaaagaaaggaagaaaaaaatgtcttcagaataaagagataatattaactaaaaagataaattgctgaacaaatatgagcaacgaagttaatttaaagaaaaatgcagcacagtacataagaagatgttgtgtgtgaccaccaaaatctaatatcgaagagtcagattttaccctataaaagcattaccataaaaaaaacttaaattttcagtgagaaaaatgatctacaagtagactcattgagcagattaatcatttagtcccccgggaaagagaggagattaccatgtaacacaagaaataaagttggtggatttccattagttggatactgaactacgaattcctcagggaccttactgcaatttcccacaacatataacgtaatttttagaagaaatcttttatgttagcacatttattagaaaagacatatatctgcttaactagatcaccttagagcttcagcacctaaaatttgctcacgtggaatccatccatcaatattcattagatctaaccaatgtccaacaatatccatggaaatatgaatatcccatcgcctgctcaatgaggaaatattataaataacagaatcaccaaaatggaaataaaagaataagcaattgacatcttaatattttatatatagaataaagcaacataccatatcaataactgatgaaaaccctcgtcccacaagaatcccctaggaaagaaaggtcgacttggaacagctgtgtaaagctcagctggccaatacgaaataaaattatcacgagttcccacctgaaagagaaaattgtatactgtataaatttgtcagagaggggcttgcaaaaaaattataactagtcagatacgatcagtggttttcatgtactgttaatcagtcaaactgatgcaaatacatatagatgaacatgatgaatagtaatttggatatttttagattttatcttattttgagttatgagaatttttagtatactgtagcttcctagttgaagcaggctaaggttatttgtctatccattaggttcagttacggttttcttttggcatggtaacaccaacaaaaattaaaatagcaaagctaactacgttacgaaaaaagtagaagattttcttccatctaaaaaagttcattgtctattctaaaggcatgtatgaataaataaatacattctcttaaaattctccattgattccgttatatctctttagattccacacttactctattataatttctctcttctatactctacttctctctctcttccctagatcgcttctttattcaatttcctctattttattctacatcgcaaactgccaatgccataagtagacatatttttccttaaatagctcaagcttcgcaaaacatatggagttattacttataaacctaccacagttattaagacttgccggctccacttatccccctaccttttcactgaaaaaatttcacattatcatgattctttttatacatatgatttctgcttctgtttaaagttttctcagaaccatatagcataatcacttggttagcaaaagaacaactagttccctttggacagtcatataactagttgtctcccgcttcacaaatctttattcagaataaacttgaaatagaaaatggacagggtttagaataaactcagacaacttacattcggatctttaggaaatgaaatttttgactggccataaaagtagccaatgccacccaacatatttccaagagcaaactttcccgcagcaacagattctaggtcaacctgaaaaaaaaatgataacatgatttcagagaaagagatatttatatacattaaaatgaaaattgaaggacaataaataaactctcagctttaaaaagaatactgagattggagcttggaaacgagaagaaaagaaaaacatcttggaagcagttttcatcattatggaaatacagctctagcaattctactgtccacatcgcacactttcagaataccttatttcagagagatagctatctacaagcattaaaatgaaaattaaaggacaatcaaaatgaactctcagctttaaaaagcatatttattttagaattatgaatttagaaacgaaaaagaaaacagctagaacgtgtcagactgttaatcccttggttagagacccatcgaatgattaaaatagaacgtgattgggaaagcatgagaaagagcataaaaaaattgttcagctatgctaattgtcaacataacaagtattcttgcaaagccataagtaaatataaaggtctataatactaagcgatgattcgacgatcttctcacaatagctcctaagcttcagccaatagactttcaactcaagtttgggatgaaatctcaatggatttcaatgagagattaccatgattagataaatgcaactaaaatacgcaaatgtatatgtcttgaggttctagtccctcatgggtacctacatggcgattgttataatttcctagtccctaagtattgtaaagttaggtgaggatcctactttcaaaaaaaaaaaaaaaaccacccttgtacacattcgcagttgccttggcatatattagggaattactaagaagtaagaatacacaaaatgtcgccacttgatgtcacaatcgtgacaaccaccaagcctctgaaaagcttggaaacctattgtgtacttttgtgttgtactatttttcatccaacaaataagtttgatagtgaacaagttccaatcagaaaaaagtttcggtcattatagaagtgtaactagagcaatttagcatccacttcacattaaaatctaccatgatccaagagttagtaaataaaatgtgaaatagaatatttattgttataatataccttgttttccatattaaacttcttctcaaataatgtgtcaaaatattcttgcttctctttcagttgactggtgagtgaggtaccttagattagaatgaataagaaattagattacaaggaataaataaatctttaaaataagaggcactttttggtgggtcacatatacacaccaacacatgttcggcacacataaacttacatataaacttttgaatacataacatctctcaaatagtgtccagtatgggtgcagtgactgtgagatacatatttaaaaggttataaaatgatttattaatatggaggggaaaaaaactttgagattgaattagattacaattcagtgtaaataattcaacatcaaaaacatgattatgaatccccaccatgggccttaactttaattaagaaatcctaattttttgataacataagaaatccctaatttgaaacaccaactacacagatatacttataagatacactccagggtaataaaccctagaccacttccaaaaacacaaaaaactcatacacactcaactatttaagttagcaacaactcacacaccataatttaatttaaaataagaatcaatcagtatatatttcatgggaaaacctgtaaggctgctgatccgcttttctacttcagaactctttgaaccaacacccgaaacaaatgcaatatctattttgaatggaatcctagcagaaatctgcataaaatagatattccagtataagagatgacatggtgaagatcagatatgaggttcatgatcttaaattactaaatgcactttgcttattatatttggagaccaaatgcaataccttcgtgaccacatacctgaaaaactgcaatatttggagacaactcagacgtgtcaggtagctccagacgaccaaactttctagcctgcaggcacgaaaattggatttaccaagatacaagtatattaggggtaaagaaccagaattccattaaattatattaatacttatggttttttctgtcatattaagttatacgtacttgtgttgcaagactttgctgcacaagatcagataaattgtgaatatgaggcgtcctaaaaccagaataatgaacctccaaatcatcctgtaaatatgagaagcataaaaggaaaagttaatttcacaagatattcagctacatacataaagcttggtgattaagaatttagatgatgtgaacggcaagagtcataaataacctttcaacaaactaattctagacaatacttagtcacggaagaaactacggtttgtaaagcttgggacttttacctaacttaaattgaaaaaacctactcctagaggttggacaaacaggactgttcctttgattgtgttaaggaagcctatttctcaatttttcatggcaatagcattaaatatagctatactgagtttacaatagtgttcctcagttgaaattacctgtgatttcaaatgcagctgccaacttccaacatccgctcgtgaaccagatgtaagaagagagtcatgaatgtccaaagtatcacgacccaaacttaaaacactaccatcttcgtcagccaaatagaaaaaaagatgtccagcgcctcctgaatcctcactctgcatgcctctgcaatgtgccaatggaacaagttaagataataaggataacaagttcaaagatgctatgctcctgtaaaatttatatatatgcaggggagagttaaaagagttatcaaatgggagagacttgcctgagctcccaacagttaacccaaataccaaagtcacttccagctacttctaacttctattgcagaaaattattaaaagtcaaacccaaaaacatccctctcataccataataaaactaaatgcatttcattcagcagaaatccagacccgaaagaaacaaggccaaaatacttactcatctttttgcacatcaacttgaacagcccaatctccaccatagccacttccctcttgcttcaatttcaagaaactcgtggtcaatgtcatgtccttatcaacaattacttgattcccaaagtcacgtccattatgttgtgtccagccatatttacttaaatcatcagaatcttggcacacatgccgcatgaaataccttccatccttaatcccaatccacattaatccagccaccaatgaccgaggtgtcctgatcagggtcaaaagctaaacacagtaagacaacatgaagcttttcatgaaatgttccaatcacaaatggaaatagcgtctttacaaagcatacctggctcgaattccaagataaacatgaggacgatatgttccccaatacaaactctccttgtgctcaccttgaaactgccaatacccaataatttaaccaaatcacaaaaacacaaaacgcgcacaaaataattccggaaatccatatcttagtcaataatcacctgagggaggtccgtgactttcggagcagggaagggagtgataaccctaggcttatgagattcttcagtggggttaacaagatcatatatgaagaaccacataacaaagaacgcaaccacggtacatcctagcatcatcttgagatcaacattgaaaattcgaatggaatcttgatttctacctctatctctacggagtttaagatcgggcttggtttgacgcaatgaagactcgttgcgatcatcgtcatcat

SEQ ID NO: 297801 - DNA, 2689 bp, Cannabis indica
cgaacaaaaataaataacgataaaatatataaaatttattttaattaataaaaaatacaataaaatgtaatatttactaattaataaatatatttctttaattaataattatctttatgtataattaacattaaacatatataacaaaaaaatatttttattttaattttttaaaataatatataagattcatgtacttaaccaaacagtgtaattcaattaacatgaatatacttacatattaccctacataaccaaacacagtttactcattattctacaatcatattctccttcataatattctctataagcaaattatttttgaacacttcattccaaatgcctcctaagagaaatgctaaaaaggaaccagtggtacctagctagcacccttctatgtgtcaatatcgctattgatcaaattaagtatcaggtctcttataatttaatgtaataatttttagggagtatcactagttaattgcaatgcgacatatctagaggtattaagcactactagtgcctaataacaatgatcataatataacatatatgtgatatttctatctagtggtaagtacctatagcctagtaaatataagtatttctatctagtggtaagtaactatagcctagtaaatataagtagttcttttcttttatttaatactttgtcaaattacatagtacttttgtaatctgcatgcacgccctagttattgctatataataaatatgatcacgaattgtagttactcctatttcatttttctctatatcatgatctaccttcttgatcagtgtacggatgattacaaaacaaataaattacatatataattgtattaaattattctgaataattaattgacaaattaaaaaggtaaatgagaataaaaacaaaatcaatgcatatgatgggaatggttatggaaaataagtacctgcatggtccatccaatttactgaactatatttaattttgcggagtgttaggaaactctatgtttattgtattctcattcaatcttcttattttttttattttatttgttcagaatcactgtaactaatcgaaactacagaaggatcatcaagggattcctttacttaaaaaaatttattgtccaaaacaataaaattttaactacggatacaaccttgaaccaaaattcattccacctgtgattcacaaaacctgaaaatatcacaatcaacataatcatgtacaaaataaacttaagtgatataaaagttgcatagcatcaaaattttaaatgatactatgaaaaaatatatactaaaacaacaaaagaaaagagcatcctcatttgatttgatattcaagcactaacatcaacttttctactttatttttattacaatagatcaccacactctactttttattttatctcacacatataaatcgatctaatctaatgacaaccgatcaatccaattacaaccgaccgtcaaacattggatatccaattatgatcagattagattggatgttatttttgaatatccaattagatctaatcggatgttagaatgggtgtccgaaaattcaatacatctaacattcaacatccaatcgaactaattagtattttcatttaatttgaataagtaattagtttttataatgttacacgtaaaatatatatatatgtatatataaaaattgatattaaaattttattctttttttctcggattggatgaatccagtccaatccatacaatattggacctaaaatattgaatggatccaatctaatccaaaaaatacttgatctacaatattgaataaacccaaattaaaccaataaatatatatgaaatacaaccaatgaatagaactgatccaatccaacatccaatggatgttggatcgattggatgactgaaattaattggatcagatcgaatggtaaaatttaacatccaatatataattggatcagatctggataggtgtaaaaatattggatgtggtccaatgaatacccctactcccaacagcttctcttttctataatttaagatacaccaccaaaatcttactttattaattttacatcaaacttttacattatattttataaaactcaattctacccctcacatttcaaacacataaccctctctcttcctcccttatctttctctctctaaacttaccccaaggacttgacccacaacccaccacccacaaccttggtcccttctctccacgactaccacgaccacagacccaacgacccacggacccaatgaccaccgcggacccaacgacctatatggacccaacaacttctccatcaaccatggcttcaccatcggcaatgttgtcaaatgaacaaattgtataattaatgtttattatctgtgagtagatatcagatttagtgtcaaaaatggccagatttgagttttgggcaaaaattagttttttgccaggcccaatggtagtctgaaagtggtccaatgccttcctgttgttaagatgagtaaaggttgaagacaaaggtccgatggtggcctaatgatatggtccgatggtattccaatggtgatctgatgttagcctgatgccttcctgacgagcttaatgaatggagcttaatatctatcaacgtagaatatggtctgatggtggtccgatggtggcctgatg

SEQ ID NO: 297802 - DNA, 1140 bp, Cannabis indica
aaaaaaaaaaaaagaacaattacccagatagcaaaaaccaccatacatgttagtaatcacaacaaaaaccaaaattgaagaaaaaaagatatatttaccccaagagtgggagcgattggagggttattgtcagaaaagatgtatttgaagaaagcttcgagattgaaagccttgcgatggaagatagggaggtgtttgaagtcacgaatactctgttcgattatggtttgagcttcttccttggtgattttctcatctttctgggtttcgaccaagaacctatgaaaatgatcaacggtcatgaacccgttctccgagtactggtcgaacaagtccttaacatccttcggggcctccgtcgcagcaaggcggaaccgccgccggaagcagaagcagactctgtaggtctgtttagacattgttttagctcaatcccaaaactggacaagtgaattaaaagagagaaaagaatatcccaatttcttgtttggacggcaaaacaaaaatagaaagcagaagcgttccaattcctgatgacaagttccacgagaactgcattgtaacaaacaattccagtcatcaaggatacattaacaaattacaaaaatcattggtcatttacaaattacaagattcaaactttccttttataaagtaatcaaatcatgaaaataaatatatagtttatagaaactatgatattttagcagaaggcgaatcaaattcagaagctcttgtaaccagcgtgagaaggagatctgagagagggcttaccaacgttggtaagttagggggaaagggttatctttatgaaggacgcgaaggtggttacagccaccggcgaaagtgttgtgggagaaggggagcttcttctctgagagaaagaagccgatgatgttagctcagaggttagggtgaactgcctccttagatggaaattgggaattccagtgggcaatagagagagaaagagactatgacatatcatattcatcccatttaaacattattatctttattttagttattgtaaaattattattattatttgttagctataattattatttatataaaagaaattcccactccttaaaatagatatattgatgcatcttatctgttttagcacttgaaata

SEQ ID NO: 297803 - DNA, 1514 bp, Cannabis indica
ctacctgcacttgatcaagtctggaatgaactccaccatcactcaataacccaatgagatgcaatgtgttagtttcaaaagattcctttatatacttaaaaccatctccttcataaatctttccggtcgcaagtgcagaatcgacgagctttgccctacatttggaaaagaaatatgtataaatgtttatttattaggcaaacaccttggaataaaggaaaaaaaaaaaaaaaaaaaaaaaaaaaaaaaaacttaggggaaaaacaaatgtgtttgtgtgtacaacttatttatttatgtgatgacagtgatttcatatactcatcataattcaatataaactctaaaaacaaagaacttttctctgaaatactcacccctgagcaaaaattcgtccagcaccaagtgcgttatgaccaacttcactgttgcccatatcatcctcagttgggagtcctactgcggtgccatgagctctgactagcctccatctttcaggagcacccttcaccaaatcaaaacccagtaaagatattagacaaagcacacagccactggtaataatgctagcttaaatttttctcatttttaaaattgcccagttcataaaactaagaaacaagacataatacaatttaggcactaactataaacatcccacgtgcacagatccaaatcaatatacatataaaaataaaaaaccactcgcataagatcaatccaaaaaggaaagaaagttaccttcttgagggaatccatggtgggtgtctcggcgacatggatgcagttgtattcatcaggtttggcttcaccccagccgtccaaaacaaccatagccacgatcttatccttagggagctttggatgatccgccaacttgaagttaaagcctgaactccccattctcggtgctttctgttcgctaaatccgaaaataactggaaaaaggaaaaaatgtgaaaaagcaattacaatcgctgatttccaatccgccaataagaataaggaaaagaaaaacatatttattaatacagaaaacaaagaatttgaacaaaaaaaaaatagaagaaactaaataccaaatgcaaaatgaaaagaaaatacttacataattaggagaaatggaatcaatggaagaaggaaatatagaacctgactacttcgaactatcaactacccacgtatatatataggcgacaaaagcaagacaaaccatctcccatagattagattagatctgacgccgttgatttatctttgttagggtacacgtggcttgtgcttattgcgtctttctggaacctcgctttgtgatctggtgttccgggttctactgtattacaatgcgcttgtccatttacaacctccaacgctggttgaaaaatcgagtccatccagaatgatccacgacggttgagcccgcatgattcatgagctgattcggcacgcacgtgaaattaaaataataacaataatattaataataattgatataaaaagagtgaaattaaaca

SEQ ID NO: 297804 - DNA, 1383 bp, Cannabis indica
tagattagaagtttaatttccttgaatatgagactgataaaggagcctttttacttcagatgagaagttttaattaaagtccacccactaactaaaaaatctcaccttcatacattgtacaatttaatatttatttttgtgacattattcctaaatctctaactcattttctctctctaactccctcattctctctataactcttgaagaaactcacaccggcattctaacctcaaactgaatttatactaacgtttgcgcccaacgacccagactggcatctaccccaaacccaacccatacctgagtctacctcgaaccttagcatcctcaccatctaaacccacaaaatcaattttcgctcggtcgcagcagcctgacgagtaaaaatttgttggagcccgaataggaagcccctgcttgcgttgtccatcgaaaatgcgatccagagaagacctaaccattgagaacctattgaaaaatcatcaggaaccttattaagtttagtggcccactaggcccatctttcggcccattcctctagggctgcctcttccttcccctataaatatatcatttgttgtaacaataaaacactttggcatttctgccgttaatgagaatagcatttcaaatagagagttttcatttataatatggtatcagatttcaaaccctagtcttctccttcttcttcctccatggctccaagaacaagaaactccattgctgccgcctctctttccgagccatctcctcctcccatcgccacctccggtaaggttttctcctctgtcgaagccgccgccgacgtcatcgatccacctccgactgctcctttcatgacggacccgaacggagctcttcctcccacgtctgatcctcccacctctagtgtgatcggctccggcaacgttgccgatctccccacttgtggaacgatcggacaaccttcctcaactctgaccggttccttctccgccccgacgccatcttttttggcttcatctcttgaaaatccactttcgcattttccagccaccttcccgacggctcaacagtcggccttcacctccgcggcaccaccacaacacccgccaccttcccgatggttcctcagacgaccttcacctctgcccgcactaccacatcacccgccaccaccttcgacttcccacccgtccacaactcctctttcaacggtggtaataatccttatcttggacttcaaggccatgtgccttttaatgaaaactctgtgtttaatgctaatcccggcctttctcgtgccgttcttgatcgaccttcccatgatgaacgtactccgcttcatctaggaactggagatcacccaaacaatctcatcgcttcatttctcttgac

SEQ ID NO: 297805 - DNA, 3012 bp, Cannabis indica
gcgtacacttgcgtaataaacataaaattcgtaacacctgtctcccatagtgattgcacgcatgacctccgagaatactagttctattcttctagatttcctactaatagggtgccgtctcttcgtctaagttttcatcttccaagtattctaattatttatcttgaattttgtctacttctgattttattatgtttttatagtcccactaacgcgcctgatttgcaacagagcttcctccccagagcactatgactgaggggatagtcaaaaaataagctcaatacagggccttcaccgaagaactgtttaaggttgggaacctagtgatgactaaactcctctgcagatctagtttgattacaaaattgcaaagcattgacacactcagcctgcaaggacaacgccaacccccaaggaagtaaaggaggatgttgccaataacttggctattataatcaccaaagcggccaaaaacgacaataccttgaactctagctagatgtcttgccatctcgatcctctatttgatgaagaagagattttgaagaggtttgcttccacgtagcccgatgtggggacttttaggaaccagtacttcaggaagaggtaatagacccttctgcatcctctgtacccccagtttgagtcgcatgttctggagggatcatggaggatttgacaaatatttcttaggcataaattgccgtagataccccatgaaggattctatagacaaagtagaccacatagttaggagccctagaaatccaggaaaaccttcagacattattaaagtggaccctttcatggctatgcctctaccaaattttaaggagtatgtcagcttccttggtcatgagagcatagttacttttgttcgtgggcaatcctataacacctcactgaatggttgcacccacgcacaagtctctttagtagatttctctctctgttgctcctatatatatttttattggaatgactataattttcttttttactcactcatattgttgctacgtgtgtagatactctaaagtttgagatgttgatatctctgagcaaccagatcacaattgctctagacaaagctaggagctcccaagaaggaggcaaagggaagaccatgactagggatttcaggaactggaagctgcattctccatcaacttcttcatcattagatgtctaagagattgctcctcctgttaaggctggacccgcagttccaggctctttggctctggctggtggagagagggactttgccacctcccaggaggcttccaaagttcctattgctctgggagaacatgccttaaaggatgtttcccatatggaaggaatgatccctgatactaccaccgaacatagggggttctgatgatagcctagatggactcgtctttcccccaaaagaaactcccatagagtctaagcccaagggaccaaaaacttcttcaagcctaagtgagaaaaggatcaattctttaaccccaaactatgggacatctagtacacaatcaaccactccaccaccattataacaacaacagcaacatcaccaaatgtcgcaacagtagcaaccacagcaacaacaacaaccacaaaaacaacaacaaccacaacaatgacatcaccaactacagcaacaacaacaataacaaccaccacaacagcaacaataacaagaaacaaagcaaccacagctataacagcaacaaaaaaaaaacaatcaaagtaaacgtagctactatagtaacaactaaccttgtccctcggccagttgtagattgtgtcatcacagtccgctacacacccatctctgtctcccacgttctaacatctccctaggagcttgactcctaggtctgcccccaccaaccaatctaagcacacgacttttggtaagattcctccgttgggtttttctttcctcatgaggccttccgttctaggctatgactaccttaccaagataggtgagcctgctggaccttgaaaaggtgccatgagcgggagcaagtgattcttcaaaagcagactactcgactgtcttccatcaagattgttgagattgcggagggaattcgccaaccttcctcgtgtagcccagtgttgaatattgccacagtgagccaaaccttggtgcctaaggtgggtaaagccattgctccctatgccgcagagatgttggatagcatgagaaaacttacgtctgaaaagtgggttgtaagcaacagtcttgattcgtacactctatcaatggccactaaataacaagcagtatgggtaagtcttagccctctaaaaagtacttcctctttgtaaaatctttaattattgaaggttgcatgactattttctgttattttcttttttagatttctttgttcacggagaggactgccaaagaagttggtaatattaccattgaactgagccaactttgcgccaaagtccaatccttgacaacaggggccttacgtgaaaaagttaagcaagtcaggacctaggctgccttcaacatcaaaaagaccaggaagactatgatgccaagttggtttttaatgagaaggaaatagaaaccaagcactgaaagctatacttagactgcaagccccaagctaaggaaaatgccgaggagattgtgagctcccttcaagagagcttaggtaaggtcaagaaggaactccatctttctcacgaggggaaggacaaagctaaggccagggtggtactccagtctgtaactatatacccaaatccaataaggcagtactctccaagcggacatctaatgaaaagacctatctagggccttcgtgataattacgaaaaagtgaagaagcaaaaaaagaccatcctagatggtattttaggtcagctgaaccatcatatggtgtcacgcgaggctccttgaaatgggtggaagtggttccatttgaatttcccttgagaagggaactccttgtcaaattcatcatcctttgatgtcgtagccatcct

SEQ ID NO: 297806 - DNA, 540 bp, Cannabis indica
ttttttttatataatattcagaaatatgaataataggaaggtatttaaactaaaataaatgctccaaactaaagttagatttataagcaacatctttgtgtggatataataactattgacaaagcttatttattgagacagtgtcctctatttggcaaagaaaattaattattgagtcatttaaaattatgttttcattttaaccaaattaattgacaagtttgttacatctcaaatcattacacatcttgataaaaccttaacttttaatatacaataatacataagctcaataatctttttcttaaaaaaattgttgaacttaattatagagtttttgagcttctttaagagccatatattaagtcaaatgtagtgtttttttttttaacataaataaataaatatgataattagaaaatctacttcaactagtcatttcattttcacagccattattttctttgacctcaatttgataaaattatttcaattaatgtaaggatcctccacttatcatatgttgcttgaattgaatat

SEQ ID NO: 297807 - DNA, 966 bp, Cannabis indica
aaaaaaaataaataattaaaaaaataaaaataagtattaaaattaccataaaataatttgaaaaaaaaattaataaaaaataataaaagtgattttaaaaattattttaagcgtaatttttttatttaaattccaaggtgtactattttgtgagtgcaaataaaactttcttaggcattttttttttgaagaatattggctcgacttcaaaaaacaaaatagaaatgtttgtggtatagtttttcactaggaatttttttctacaatattacttttttaacattttatagatttattatttttttaaaaaaaatagatagatttgtttactttatttttacaacaatattatattatttgttgacaacattatactatattgtttgaacgttattttgatgttgttttatatttgtactattttatttacttattattttcatgttgcttcgatgagattctcatacaaatataattgaaaaaattctataaaaatataaaatataatatgtaaatatagattatatatgaataaaatattattttaagtacttagtataaattttttttactagaccgcaccaccatttgttcggtttgagccatttttcaaacggtgtcgcaccataacatatagtatgtgcggtctatcatatataattaatatgaaataatacaacaacatttaattggcagcattcaacataaacaatacacctttaaacttaagcaatacaacacaatacaaaataaaaaattaaaatcaaaattaaaattaaagttcctacataataataaagttcatagcaaaacaagacaattaaagtttgaataataccattaaaacataagcaactctaaagttgatatatcttctaatattgtagtgtggttggattagaaccataataataaaatttcaaaaccatacaaaataatttagaaaaatttactttgctttttttg

SEQ ID NO: 297808 - DNA, 5617 bp, Cannabis indica
tatcatgtcttactaaattagttaaaaataaattaataataataaaacataatgtctcctaccctaaaacattagagactttcttaaatgtttaataatgttttacacgcttattataataaagacatatataaattgtaatttaatatatattgatgatatcatgttactctaaacgcatatatatcattactttttcttaaaaataagaaaaaaaattgaatatatggttaatatatagaaaaaaataataaagtctatataatatatatccattataatgttgatggatggatggatcactttacttgctgctccacgttatgaaataataattattagatatacacgagaataatgaaattattgttgttcattcaaaaaagaagatgaaattgaaaactaatttacaaaaaaaacaaaaaagttgtgatataattaataatattcacacattacaccgaccaatattgtaataatatatatatattgtacaatgtacacgattacatgatccatatatatgaattagctagctagcatatatattctttcttatatgacagatcttagatacgtttgtttgttgttgctatttattattataattattaagtacgtgtactactaattaattataatgtatcatgaaaaagaaagacagcacaaaaatccaaagattaaatggaaaagaaagatgagagatatataatggatacaatacaacacaacacggatggtactcatgatgaataattaagaagaagaacatttaattgtgtacacgtacaactacacaactagtactactccttcaaattcaatgccaacgcgtaataatattaatgtcacttctcacactcttactatactactcctacatacatatatatgtcttgtcttgtctttcactaactcaactaataatatataattaattaacaagatatacatacagatgtatagataccagtatgagtaattgtggggatgttggacactatttatccttatactgatatgatattatccgttttggatctaagttcttaaaaatttgtttttgggtatatttctaaaaggcatcatactaataaaaatagtattcatccttatatagttatgatctttctcatttttagccaacaataatgagatacaaatatatgcttagtacgtaattattttttcgtcaatcacatctgattaaaacgagattatgatcaagactaattagaattttttttattattcttcaatattgacatgtatcaaattgtaagtactttaaacattcagaccatacattatattatcctttaaattattgagatttttaaatttaagaattttcttttaattccgttcaattttactaaccagtgtttgacaagaatagaagctctgagaacacgacttggtaaatatcaaatttcgaggaacactatttggtatatgagcaatcactatgttagtcgtaccttaaaaaaattaaacagaactagacaaaaatacttaaacccacaatctcaatagtttaacaaaatatttcgactctcgaaaaattcgagagacataattagtacatgtattataagccccatcttaatcaaatgtgactgtattttggtgcattgtttgcatacgcatatcattacattttacatatacatatttatatacttggccctacactagacaaatttggagggtacaccttaaggcaatattatgatctaaaaggggccaggcagataatgagagcatgaatagtaattgtcttcaatgtcctcaccaaaacccctacttaacatttaatttgtgacaaagaaatctaaaccgcccaccaaccttcaccaaaaacagagttgaatatacatgaacacaagatgatctttcatatgaaacttcattccaaggacaatatggtaatttcagacacccccaaaaaaaattagaagaagaaaaagcaaatttacatttttagtaataataatttattaatacaagtcatacactagcccttttcagtccaacttaatatattttactcttctatattgtcaaaggtaatatactcttattctagtactactctttaagctagtgcctataaatatatgagagagctagccttctcatatcctcatcaatcaaattccaaatattttcattaaaccatactctgaccaagtctctctttattattttctctcttctaattaattactattcatattcattaatattctcacatcttcttcaattcttttaaaaacccaattaagatttttgtaccactatgatgatgatgaagaacaacaataataatttgttgtctaagattgcaagtggtaatgggcatggagaagagtctccatattttgatggttggaaagcttatgatagtgatccttttcacacaacaaataatcctcatggagttattcagatgggattggctgaaaatcaattatcatttgatttggttagagattgggtcaagagaaatcaaagtgcttcaatttgtacaattgaaggagttgatgagtttaaagacatagccatttttcaagattatcatggtctacctgagtttagaaatgtaagtattataaaaactataaaacataacactttttttgttattattattattgataattaattatgaaatttgttgtgataattaatctacaggctgtggctaattttatggagaaagtaagaggaaacaaggcgagtttcgacccgaaccgcattgttatgagtggcggagcaaccggggctcatgagactgttgccttttgtttggctaatcctggtgaagcttttctagttcctattccttattatccagggtaagtaattattaacaattatttttctttcatataaattattttcgagttttcgaaattctgcgagtatttctgcttttagctctaaaaagttctttttacgtataaaaaagtcagatttagtaattttttcagaaagaaattatcaaactttcaagtcctatgttaatttttgagactatggtttaagagaaataaattgaaaatgagctagggcaataattaataaaaataaatataattttagtggaaggtagaattttagattagtcaacgtttatacagcttgcaatccaagtatattttccaataaagtcaaaatcacaaaagttaatttgtttttttctttaatttaatgtatacaatagtcaaatgttacttgaaaatttccattattggtggggacatgtaagtactagtgatagtgaaccaaaccactcaaaaatttaataagcacttaagaacaataaattattttggaatcatttgattggagaaatttttttaagtttattatgctaataaaatttttggattatttttcagatttgatagagacttgaggtggagaacaggagtacaacttcttcctattcattgtgaaagctcaaatggttttaaagtgacaagagaagccatggaaaaagcctatgagaaagctcaagaggataacataagagttaaaggaatgttaatcaccaatccatcaaaccctttaggcacaattcttgatagagacacactaagaacaatagtgagattcatcaatgagaagaatattcacctaatcgccgacgaaatctatgctgcaacggtctttagcaagccgagttttgttagcatttcggagatcatagaggaagaggaacaaaacaagattgagtgtaacaaagatctcattcacatcatctatagcctctcaaaagacatggggttcccgggatttcgagtgggaattatttactcttacaacgatgaagtagtaaattgtgcgcgaaaaatgtccagttttggcttagtttcaacacaaacacaacatctgatagcagcgatgctgtcagatgatgtgtttgtgaataattttttgagtgagagcgcgaggagattggccataaggcacaaactctttacaaatggacttagccaagtcggaattgagtgcttgcaaagcaatgcaggattgtttttatggatggatttgcataagcttttgaagaatcaaacaaacgaagccgaaatggaactttggagggttataattcatgatgttaagctcaatgtttctcccggttcttccttccattgccctgaaccaggatggttcagggtttgcatcgctaacatggatgatcacaccatgaaagttgctttgacaaggattagaagctttgtgatgaagaacaaggagttaactcttgtggtgccaaacaagaagaagtgttggcaatcagatttgaaactcaggcttagcttgagtagaagtagaagatttgaacatgatttcatgatgtctcctcactcacctatgccacattctcctttggttcaagcaaggaattgattaattaggtatcaacatcttcagtccaatttttaacaaaataaatctctatgtactttatcacacaattaaaatcaagtttctctgtataatttcgacatctcaattagacatttatgtccagttaataaattgagatgccttaattagacgagaaaattgaaattaattaaatgattaagtatatagatctatattatacttaatcactttattaatcacaactacttaatgaatcgataataattaataccaactacaacatgaataaagatccattgtccaactcatgaaatttggacacccaaaattggacagaggattttttttttcattaagaataatacagattcattaagtagttggtattaatcaataattaattataaagatttatgaagtggttgggactactaattaagtgatcatcaattatatagatttagttgtttaatttttctagttattattaagtatataaagtcgacaaattgtacaactaccaatgttttttgtttcaatattattatttttcctttttcacataaaccaaatgtgagtgaaaaaggtgtgtaacgatttattgtgatataatgtttatgggaaataatttatttgtttgtttgcatatttttcaaaatgattattttaatttcttttttgagtacttgacaaagaaaagtaatggaagtaaaaaatccaattaatgaagagtattgtcgagaaaaataagatccaaggtgcaaaatgtgtattaaatttggcataagcacaaaaaaatagtatgtactaaattttaacttataataaataacacattttttaattattactttgtcacttattactatatttattaattaaaaatttatttttcattcacatttaaatctcaaaatttgcaacaataaaaaaagtaatcataaaaaaataaaacaaattaattgtattgcatatttccaatgaacattgactacttattcactttttttttagctaatttacttcttatgcattagatatcgattataaaagtagaataattacataaaatactatttttgtaaaaaaattatttttttacggtattttataaaaatataaaagttaaataaataacaagagaaaataatatcaaaataacaataaaacaacatcaaaacaaataaaaaaatattatacaaataataaaaaa

SEQ ID NO: 297809 - DNA, 6919 bp, Cannabis indica
attagggttttcattcttatttttataaacgtcatgtttgcatattttattgattctactctttaaatggtatattattatgtaatatgctatttcttatttgcctattaattaaaggaatttctatttttcacaaaaaaaaaaaaaaaacaaaacacataataaaatgcataacgtgtgatgtattatatctacatgtgtaaaaaaaagaagtaagcaatagacaaatattgtgtaatttaagtatataattgactaggaagtggccgctatactatctctcccttgatttcttgaatatgtcaaagtaacaaagtcatatatttcttttttttttttgaggggagacaaagttatagatatatgtatatgagacataattgtcccaaaataatcatataaattaaaagatttattagtgttcccattttatagaccaaagggattatatttgtatatactcacttatagaatctaacggctacaattcaactgcttggattgtgaggacatcatcttagttataaaaacttgtccaggttaatctttatatggtcttgatggtttgcatcatataattaatttaaacccatctaataagaatatgagatgttcatagttgacctaaagtacgattcttacaaaaagtcaacgaaagaaaattattgataatgtgttgaattattagtaagacatgatgcatatgttttttcttccttttttatatttttattattattaattatgcattagtacaaacgtttttatatgtatatttattgaatttgcaatacattttaattaattatgaaaggatgcgtgatgcattgaatttgatcttagtattggtaatcaatcatgcattagtctatatattaacttataaatattagtaaactactgcatgtagaataactagtaggcacgcctatatatataaatatatatattataattataataacgagcctttacatatgtttataaatgcttactttcaatataaatttcccttattacaacttacacatcaacgagagatgaactttacaaattattccaaatatatatcatattttttgaggaaaataaatgaattttcttttaaagaaaaataaaaaagaatataaattaataggtaaatcacacaaatttatgagatataattcaaagagcaaaattaaatataataggcgaaccaaattgtttacaataaacgggaaggaaatcctattaacaacaactaaggttccaataagtcatcatggtcaagcatcaaagaagtgtgaagtatattacacgttttcaaaccaaatgaaatctgacagagttcatctatcaatgaatattagccaaaaatcttccattaaaaatagggatatgtcaactccattatttaaattataaataaggaaactagcacgaccaacaatatttttatgcataatcgaagaagattggagcacataacaaaggaccataatgaaaatttaaaaatcccaatcagaggcccaaagagatagaccaaaacgtccttcttgaagcgaattagattcataaaatgaaacaccaacaaaccaataggagaaaaatcttaaatctctcaccaggacaatatcgatccttactattctagcagggtggtgtaagattatcattattataaaaataaaacaaacataaagaacaataataaaatcaaaataaggcaccaaaaaagcaattaaagataaaatagcctccaacttgtcaaacaacatcactcttccaaagactcctccacaacttgatcccccactaccaaccctagataccgattaacaaacccgaccaaagcactcccaagcttggggagggccggtgggtctagcaaaaaaggatattaactttcctagacattgttgtaacaaagaaagagaagagaaaggcatagaaactgagagaaagagagggaaagagtgaactgttattcaatgaacaaagagtaccatacaagcttatatacacaggaatcatcaacaaaaaagcaaagagagaagtaggcagttaggactctaacagactaaccaacttcactaacaacttctctaacagaattaacagaactgatactcttaacactccccctcaaacttagaattgatgcatcttcaattttaagtttgtgtctaaagttgctgaacctgtagctggaaatggacttagtaagaccatcagctatttgatcaattgctggaacatgtctgatatcaacaacttgctgcatgatcttttctcgaacaaaatacaagtcgagttcgatatgcttggttatagcatgtagaaccggattagcagtgagtaacactgtactgagattgtcacaccgcacgacagggtcctgggaacggagacatgtaattcgaacagcagagaacgaaaccaggttatctctgctacaacattatcaagagatcgaaactctgcttctgtacttgatcgtgacactgtatgttgctttttggaagaccaggcaacaagattagagccaaagtagattgcataccctgaagttgacctcctatcatcaacatctgctgcccagtcagcatcacaaaaggcagctatctctgtatgtggtggcttctttagatgaaggccatagtgcatagtcccactgagatatcgtagaattctcttcgctgcgatccagtgaacttgaagaggatggtgcatgaactgacaaactttactcacactaaacgaaatctcaggcctggtaattgtgaggtattggagagctccaacagtggacctatatagatgaacatcttcaacagggtcacttccataggccgagagtttaagaccactagtcattggagcagaagcagacttagccccttgcatctgagttttgactaataaatctcgaatatattttgcttgggagagatgtagaccatctgaagtgtgcttgacttcaatgcccaagaaataactcagttcacctagatcttttagagaaaactcagtgttcagatcagataccagttgagacaaaacagatgggttgctgccagtgatgattatatcatcaacatagactaaaatcagtgttgtagccttaggagaatgttgcacaatcagagagtgatctgatgttgaggaaacaaagccaaacttgtgcaaagacagttgcaatcgttcaaaccaagctcggggagcttgcttgagcccatatagtgctttgtgaagtttacaaactaggttaggcactgtaaaatcttcataaccatgtggctggtgcatgtaaacctcctcctgaagaacaccatttaggaaagcattgttcacatccaactgtcgaatttgccaattttgagacaatgcaagagttaacacaactctaatagtgacaggctttaccactagactgaatgtctcagtaaaatcaaagccaggctgttggtagaaagcccttcgcaacgaacctagccttgtacttgttaagtgttccatcagtgttctctttttctttgtagacccacttgcaccctattgcttgtctcccaggaggtagaggaacaatagtataggttttgtttcttacaagagccaagatttcatcatccatagcacctttccactgaggcatttgaagtgcttgagcaactgtggaaggtatagaagagacactgaagacctttggtttgtgtatactagatttagatctggttgtcattaagtgtttgtttggaacacctagaaactctgtttctttccctggtgactcaaacaatatcaatgactctttctctcatcctaccacaccctccagtacctcacccaaatcacaaatccaactcctatcattccatctgcctcctcttctcaccagagtcagccctctacacctcttataccacctggttttgagcatataattccttctgctgtacctagagactcagctgtgtcatcctctcctgtaacaagtgtacctggtcctactacctcctcatcatccatagttccacataatcaacctactcctggtcctcctgtgcctaacctcaaaagtataaaggccattcctgtgtctcccttgcagcaggattttcttggtaccctagtcctttacacaagaagtatcaggatgaaactcaaagaacactttgttgtctttagaaaatttggatacacttaacaagtttttagttatagcagggacatgcagcaaattattgagaacaagaggttgaggagacagatttgatgatagaaaggattgacctatgtgtttaatgggcaaacctgatccatcaccaacaaacagttgctcttgtccattgtaatctgagctttgtgcaagatttgtggggtctggtgtgcagtggctagtagcttctgagtctgggtaccaaaccatgtcccactcatttgaagaagtgagaaaattggcttgtggtgctgcaacattaggactagcgttggtgttgttggttgagggacctggaaattttttgtcaaacctatagaaacagctttcgacagtgtgtccaagtttgagacacagctgacactggagcttattgttaggattagacactctagcaccctctgctaggattgaaattgccacgaacatgagcaaagtagggggtaattataaggattaaaactattgaaactgggaggaaaattacctctgttaaggaaaaaattgccaggacctgtgttgttaaaccgattgaaaggttgtttgtatcctcctcaaccataatttgcaagattggcctcaggacatggatcaggctccattgtagcaacattagcactttagatcaacttcacgttccgtcttctcaattcgagactctgaggcaagtaagagtccttcaatctcagcaacagagtattgttcgagtattgtattagtggatatgagaaaggtctcatattcacttggtaaacctttgaagatcgcacgaacatgatctcttgaagagagaacatcaccaaccgatgcaagaagatctatagtttctttaaccttgagaagataatcattgagagatagggatcctttcttgaggttctgcaatttggtttggaattcaagaatctatgcagagacctgtagagtaaaatacttctcaagtgttgaccagatttgactggcagattcacaccctaccatgcgagttaggagacttggagtcatagatgacaagagtcaggacaccagcagctgatcttgagcctcccaatcaagatactctggattgtagattcttctagtacgatcttcatcagtgaggtatttcaatggaggatcggagcctgtaatgaagtgttgcagtcgattccctctaattgcagctaacacttcttgtttccacaacaagaagttgtgatcattcagcttgatcgacaaactgcggttgaagtagattggatttgattcgtcagagttctttcttcgagttcgttgcagactttgtgtttgatttgatgattcctgttgagcttgttgtgagttgtctgcagctgcaattctctttccattgcctgtaacgacatttgccattaatagcggaaactcaagctctgataccatattaactttcctagacattgttgtaacaagaaagagaagagaaaggcatagaaatagagagaaagagagggaaagagtgaactgttattcaatgaacaaagagtaccatacaagcttatatacacaggaatcatcaacagaaaagcaaagagagaagtaggcagttaggactctaacagactaactaacttctctaacaacttctctaacagaattaacagaactgatactctttaacaaaggaaaactagaaaagaaatttttttagctaacattataacggatctattaataggtaaattagacaaactctattatatacatatatcaatcaataagtatatttaataattttaagctaataaaacggtttataataataaaataaaaaatcctaatagcatattaataataccctaaaataaacaaacatattaataaatatgttcatgtaaagattaaatataataaaatagtattattgaacaatacaatatatattattatataaaatataacaagaagagaaacaataacaatgtgaagaggctactagcaaggccgaaatgaatataattagttacaaaaagaactaaatctttcatacccacaacttttattaatgaattaaattctatttgttggagtattcaatgcaagcaaataaattatgaatcgatataaatacaagtgtatatatatatttatatatatatgaactttgttattgaatattagtggtgtctaatacatatcacattgtaataggctagcaatactctctaaaatttattatattaaactatatgtgacccaatacttagttgaactaattgtgatattggcacataaaaaagtactaagtaccattaccacccttaacatttctcatatatataatataaatgaatagaaaaggtgaaggttgttgaaggggcgatcataggcacattattataggagactgatattgtaatcaattcatatctaagaataaaaaaagggtttcatttacttattttcaataatactttagtaccgccaattatactcacaatgtcaactagatcaattggatcagcatctctaagcaaccactacaagaaatgtcacttttgccagcacattgatattgcactgataaaataaaatttacttatgatgtgttggcaaaaggaagtttgtaaattaatattggtattagaacttttgccagcataaaatgaaaagtgctggcaaaaatgacttttctcagcgtgtaaatacgctagtaaaagttagattttagccactgtaaatgtacgctggtaaaacttt

SEQ ID NO: 297810 - DNA, 7192 bp, Cannabis indica
ataaatattaaataatttaatattaaaaagtaacctatccaaagtaactgatccaatccgcacttttgcggattggattggattggatttgagctattgtgcggattggattggatcaaaaaaatgaaatccgcacttagtgcagattggatgttgtttagacaaaaaaaaagtgcggattggatcggatgaacagccctagtctattctacatatttttatattttacacacaaaaaaattgtgaagtaacacaaataaaagtttgttttaccttttacttttaaataatattacgttatttatttgaactaataactttcaagaatttacatttttgaattgagtagattaaaaataataccctaaaaataataaaaaattacatatactgtacatttctgtcaaaaattactatatctagacaattcttgattgtgagatggagggtccccaatggctttttgggctcagtggctaatttgcctctctatgaatgacatgatttttccttcaaaataaaaaatgtaatggtatcctacaaatttatttatataaatgaatgaaaatatttttaaaaaataattaattaaagatgaaaacttagaccactagtattttgaagatttggatgaatatatagtaatttacgaattttcagctgctctaaataactgggaagtgggaaccaaccaaccattctaacaaaagaaaaacatcgaaaattattctaaaccaagcaaaaaagttcatattttatatttacaaaacaaattcaaagaaaaagcacatatatatttcgaaagctgttatttttctgtttctttcttttatttgacgtcagtttgatcaaaaaggaaaaaaaggaatgttcatatcaggagacaattaatagtcatcttatttagtattggcttacaatatcacaacagcatcacaaagattaaccattctaagtgatcttaaacccacaagaagtacccagcaaagattttcaatatcctatcacatggtcacatagcgggtgattttactagttgtgtggccaaattacccacacacaagaggtaactgggtcaccaaattattcatctggaaccaatcaaaggttgggatgggtcctacaatattttaaaccgattagaataaaagtatttgaccaatacgagtcaaatatatggtagttaaatatagacctgagacttatattaactaactaacctctccaaaaagacttaaccgccaaaaagcgttgcattttgacggcccaacgttaatttcgctttggctcttttcctctttcaaatatttttctttgatggtttcggtttactttgagtaatttcgtcgaagagctggtgggcgacggcggcggataacaatggccacccctgtcggaaacacgattatcgggatcaggggagcccctattacgtgtgtgaaggaagatatgaatcgcaattatcgaggtatttggtacggagatagcccttttaacttcgtatttcctacggttctggccaaagtcatcgtcattactcttatttcccgcggactgttcgtgcttctcaggcctctcaagcaaccgaaatttgtctgctatgttctggtatgcctttgcacattcctcaccaatgtcagtttcgctttgttattttgttagtttaataacatttttgtgaaattattatcctgatagaagttttagtaaggcaaaagtttgtatattgatatttggcaccatgataaccagtgtaatatttaagttctgttttcacaaatttaaatttagaatcaaataaatagaaatgatattataatttcaaagttaaaatcactgaaaactagaatatagaaaagtcatatactttcaaatattgaattttttgtttggttgttgttggttttgaaattcagggaggcattatcttaggaccatcatttataggaggcatcccaatagtaaaagctacattataccaaccaagagagactgaactgtttcgcacactggccataatcggtggactatatgcagttttccttgtgggagtaaagatggactcatctcttatagcaaggtctgcaaagaacagttggaggattgggatatgcggtttcttattggctttaacagtcacttcaactctcatcttcacacaacttgatcatcttccaggaatcattatgagaggaccctttgttttctacgtgcccttgtctctatcctacacttttttcccagtcgtagctgaggcattagaagaactcaacctaatgaatacggagttgggtcagctcgccatgtcttctgcaatgctcaatgatttcattttctggttcttcttaggactctctgttgcttttaagcaagatacaattagccattcgatccgggctatgttttctttcattgtactagcgattttcacgttcactgttgtacgcggacgtgtaaagttaattatcaggaaaacgccgattggtaaaccaataaatgatgtttatatcgtttgtatattagttggtgttttatttatggcacttgcctcggactttattggttcgacttctcttcttggtcctttactacttgggttagtcatacctgcaggacccccacttgggtcagcactagtacaaaaaacagagtgttttgtgtcagagtttctactgcctttattatttgtgcaagtgggttacagcacagatttgaaaataattcgcaactgggaaatgtttgcaaaatttcagatcatcattgttctggggtatttatccaaatttgttggaactttgctgttttctctctcctgcaagatcaagttcaaaagtgctatcttgctttctctcattatgaatatcaagggtctccttgagctcatcaatcttcatcgatggattttcagtacggtaataataaaaaaaattatggtttcattttttcctctttagtatttctcttaatttaccatgttctcacattgaactaattaaaaattatcgcagtacatagatgaacaaacatacactcaactagttttgtccacacttggggtgaccatgatcgtgacacctttgatagatatcttgagcaggagccgaacacgacttgacctgtcttgccgcaacagaggcctaagaaccctttgctctatgcctaaaaacaccgagtttcgaatcctttgctgtgtccacgacgaagaaagtgtccacagcttgattaccctcctagaggcatcaaatcctatagaatcaagctcgatatgcacctacttagtccaaacttccgagctgattggtctagccgcgcctcttctagtcccctacgacaaaaagaggaggaaactcaagctggcgttctcggccagcactgaccaaatcatccgtgcctttgaaaactatgctaaaaactcaagaggccctgttatgatcctgcctttcatcatggttgcttcgtacaagacaatgcacgagagtgtttgtcgtctagctcaagagaagttcatccctctaatcatcctccccttccaactcaacaaccgctacagcggaatcaatgcccatttacgccagttcaacgccaacgtccaagcctacgctccatgcacagtggggatcctcgtggacaagggattctcgtgcggtatgagcttgatccacttctcctaccacgtcattgtgatctttctcggtggacctgatgaccgcgaggccttggcctacgccactagaatgtcagacaatcgaatgacagtcacagtcacggtcctcagaatcattctgctaagaaatgtggaagaagaggaatcccaagaagcaacagagaaaagtagtgatgaggctgcattagacgagttggtggtggaagagttcaagatcaagaatattggtagtctgtcctcgctttggaaggaggtcacagtggacgacgtggtggaggttatgaataccatcagatcagttgaagggcactacgacctggtgatggtggggagacggaggagctggtcggccatgatgatgggagatgatgaaatgatggattttgtggagaatgaggagcttgggttgataggtgacatgttagcatcgtctgatttttgtggaggaaaggtgtctgttttggttatgcaacattatagggaaggtgtaacaacaactcgttcaggctctaacaagtcgcttattgaaaaagtccaattgctcacacgtcatgcctcacgttaattatgacaagattttgttgttgttgttgttgttactagcttagtttgtttggtttaagttacttagatagatcaatgtcacgaacctagatttatataaatggggttttttagtttgactttgttacacgatgtaaagtctattcttgcccatcaaaacacgaaatgttctgtatattatagagattctcagaattacttgtagttaccaatttgataatttagactaattgaatcaaatgttttagttagtggttaaacaatttatgtactattacaacaatgctaaaaggcaaatttatgccatgtttaacactacacaataataaagattattattaaaatgtcaaacttattattatatgtaaatgttgttagggtgtagtgtggtacatgttaaggattcagttccttacattcaaaaagtaaaatgaaaatttttgtatctcattttgtctcatccattcaacaatcaccccagctttatttcctcctgcccacataaagattataaaaagaaaatgtaaaacgacatagcttgtcctgtgggtatgacgatatactgaaatggaatttgccatgaattggaaaagttacttttcttctcctctaattactgttagtacttagtttttatttgatcaaattgataccatattgttaatgggtggtttagaataatttatttgttacttttttcttttttatttgagtcaaaagatgttaggaataaagatttttttgttaaaaaatagtatatcataatgtattaaattaatttaaataccacaaatcaatttatttgagagtatttcaaagaaaaagaaaattgtctacatagttaataatatgtaagaaaagtagttagttgagttggcacacttgtattagtttaatacattatggaacaccaatttttcattagtaatcttaattccagatcctagtcctacagtttttttttttgctcaaaatagatcctaaatttgttaggttagagattatttctcctagaatacgataattgtgtgacttgttgtaatattgctctttatttttttgctagctgaatgaaatattgtacttattgatccagtccttttatgccacagttctcttattatagtacatttctcaatcacgggctaataatctatgcccgcttttttttttttttttttgaaacaatctatgacccactttcacctatcgttgaaagaaaaaaatcttcattttttttagatttatgcattatcgtgcaattatggttaattgatgggtagctagaataggcttgaagttaatttggcttgtcttttgtgatttcatgaaaaaagatgattgttccaaatatatttatccaatttcaatgaaaagaaaattgtatttaactcattaaaaaacataactcaccttaacgggcttaacccatggcaaagttttttttttaatattaattttttttgacatgataaagtttttagtaatatgtaaataattaaataaataaatattgtatttcccttaatatagaaatgtgaatatttaaagatatagtactaaatctagctaagcactctctcagcattttaattttatctttcaaaatatattactaaaatattatgtgaaaaattatgactaaatatccataatcaaatcaactaaactttaaataattaaaataattaataattgacaaaattatcagaccaaaaataataatagataaaataataaggacaaacagagtaaaactagaaaacactaaatgcagaaaataaaaaaaatcaacaccaagatgtatatttggtttaagtctgatagatcaatgtgatctattactctactccagttatagaacaccaccataatccttatttattaattgaacaagaataggtacaatacagtcgagacaagattctttgttaagtcctcacaaagtgttttaactctcacactttacatccaagaatcatcttcatttacagaagattcttcttacaaaattcaaacccaatctctctcttttctttgcacctctctctctacctctcaatctttctctctcttaaactctcaatctcatctgatcataatactaaatctcatcctgttaaaatgacaaagtcagggtggtatttataggcttagaatcaagatcctaaagtcgatggttggaagaaatgaggttgttaagttagttataaataactaacttaactaactcttcttagagtgaactctccatgtcaacttaagtaccatggcctccgggaacatgtatgagcttctagactcacggaccaagggaacttgttgaagacgcttccggataggataaaacctgatgtagtcgactatttggatctaccattctaggattgacagccagttgtaactcctttccaaggaagagctaactatcctgaagactgaacccaaagtacgcatgatagtcatccaggaactccctttcggactcgactatcattcctcacaacccctttcgggatttataacaacgattgaacaacttcctagaaatgacgtttgtggagacctttttatttggaggaactataacacattctactttttttattcaatttttagtagttaaaaccctcccaactgttattttgcttgcatttaaccatccaagcacaaattgtaacagtaaaacccttcaaattagtaactggtaacaaatttaaggtgtcatacagttaactatcactacaggctgcttatgtgcacactcttatacacatgacatgtttatattggtacacctaatattattatttaaaaattactttcaagatttattttaaaattaaataaaattataaaaataaaataaaacattttaaaaaataaataatattacaaattttgaaatcatttttatattttttaaataataatattatgcgtaccaatataaatttgacacat

SEQ ID NO: 297811 - DNA, 5578 bp, Cannabis indica
gaggttctactgtatatataatatttatatgtttactaacccatcttaatttcatgcactttcattatttaaccaattagaatggaggcaggagcaaaaatgattctctcaccgggaggagtaccctataattatttgctataatttttcatgaaaaaattggaggatttctcgtgagggctcacaagccaataaagagggctcacgagccaataaagcttactactttccattcccatcctgatcactcacgcacttttcattcaactgaatcaactcccatattttcgacaattttaatccccactcttactcttactggagtcgcttctccttttatttcctaatcatttccttcaaatatgttttctttgattccatctggatactcgatcaataataataatatactttctgagcaatatttctgatctggataccatgagtttcattctaattcttatcaactttcgctaggttcggctttttcttaactaacattcctttcggggctcacttgtttttaaggttttattatcattccacgtacttcactaagtgtgtgaccaaacagtcattctacttagtagccgcttaagactgttgccttttgtttttcctgatctaatatcgcctcaaatacgatgataactggtatgaatatctctagtgtgaccataaaacctaacgcccgtttggctaaaccaagtcaaggtagtctcagatacggagagaatgggatttggggggagcgaatcaggggaagcctgaacaacaacaatgtttgggtcaaaaaggtagtgaaaggagtcagtagagccaaacccgctgttgtttttgctcttcttacatcaaataacaccaaggagactctggtaaatttttctgtgatcactttgatgtctgtttttttgttctacttatagagtttcgtcttcttaaatatatagtaactcttgatctctaattcattgtcagagacagacccttcaagtccctcaatttcatagacgaagagcggacccgaaaaatgttgctgcaatcattttgggaggaggggcagggactcagctctttcctcttacgagacgagctgcgacacctgctgtaagagataatactgctcatagttttttctttaactatttaacgagatcatattgttttcattttttttttctatatcttatattatatccaatacgttcgtaatgacaacacatggttaggagtttttaatgatgaatgttttgaattgcaggtcccggttggaggatgctataggctcatagatattcccatgagcaattgcatcaatagtggcataaacaagatctttgtactgacccagttcaattctgcttctctcaatcgtcacatcgcccgaacatactttggaaatggcatcaattttggtgatggttttgtggaggtatgaaaaccctttaagcatatgaaatttccatgtccttcgtgtcagtcattgatttggtagttagattgcccttgatcagattcatagttgtagatgatacagttaaggagcacaatttatcattttatattgtattatttaaaaaaaaattaaaaacctcttgattgtgcattgaggaaattatttttgggatatttacagataaatcacttttgacagtactcttgtagcagaatgatatgtctgtggaaattttacctattaatatgaataaaataagctaggtgcattgcatatgtatgttgattttttggtggcttaaaaggtcaattcacttcatggataggtcttagcagctactcaaacacaaggagaagcaggaatgaagtggttccaagggaccgcagatgctgtgaggcaatttacgtgggtgtttgaggtttgtgtgaagtttcccaaagcttttaccatatttaaggaggaaagaagaatatgaccttgcaagaattttttcttttttcagcttcaaaatgaaattgtctcacataacattgtcaattcttttaggatgccaagaaccgaaacattgagaacattctaattttgtctggtgatcatctttaccggatggattatatggactttgtgcaggtacaagacaatgaaatttcttttaacatagaactattgatttataattgaattatatacttatttacaataaatttacagagccacatcgacagaaatgctgatatcacaatttcttgtgcagcagtagatgacaggtctgattagccttcttttgtctttttttttttgttgatttattcattgaatattttttttatatgaagatcatatgaactttatctaggtttttaattgtaattttaatctacttctttctggttaattcagaagagaaagatcaatgataatttggataataacaatgttaccttttggatcaacttctacttcttaaataaaatttatagtcgaaccaattgttttcagacgtgcatcagattatggactggtaaaggtggacagccgagggcgtatttcccagtttgctgaaaaaccatcaggtgctgatctcaaagcaatggtgagcaagcaatggatatctcatccgcactgcgcactgccttcagatttttcagtttgattgtttctagagtttattggcttcaataaaaactaagcactcatagatttaattgtttcaatttcgataaaactataaatcatcattaagtacgcactgcaaattgcagaaaaacttcgtactagtattagtttatttgagatattctagctgacaaaataaatcagagtcatagttggactttgataacaatgtgtatttattacttacgttcagaatttatttaccttataacattttaatctacggtggttttattaccatttgaaatattgtactctgctcatatatagacattctttgcttgctttctacagcaagcagataccactcttctagggctgtccaaacaagatgccatgacatcaccatacattgcatccatgggagtttatgcatttaagacagaaattttgctaaagctcctacggtggagatatcctacatctaatgactttggatcagaaattatccctgcagctgtgaaggagcatgatgttcaagtaagagaatcaatctttaaattgtcacttcagtttttattatactggaactggattctcaatttagagtttctaacttttgatttaagtactaagaaattacattcattttactttgataggcctatttattcagtgactattgggaggatattgggaccataaagacgttctatgatgccaacttagcccttactgacaaggtaatctccattatagatgtttcaattcattggatattttctagtttaattggttcaagctcgcatgttcttaggtttcatatcaatggtatgctagaaccatccaataagatactactttctacctcttccttataaaacaaatatggtgtccatcgaatgattttcttaccaactaaagcatttaaaggctactttcgtgtagcagattgttgatacgactctaccataatgttccttttagtaacttgtagttactcacattaacttcaaatgtgacgaaactaacaaaatttaatagaccatctcttttttaatgcagattccaaagtttgagttttatgatcccaaaacaccttttttcacgtctcctcgattcttacctccaaccaagatagacaagtgtcgggtatgcttatcaaatttggttcagtttctgtcttatttcactgcagtctatttatgtttcagtcgggtgtgtagattgtggatgctataatctcacacggatgtttcttgagagaatgtagtgtcgaacattccattgtgggtgaacgctcacgattggactatggtgtagagcttaaggtaaatcatcacaaatttcagaaagagtcgttagttgtttttcggatgcattccctatggctaaacttgttttgttcaatggtcatgttcgattacaggacaccataatgatgggtgcagactactaccaaactgaatctgagattgcatctctgttggctgaggggaaggttcctattggcataggacagaacacgaaaactaggtaactcagacatgaatattggcctgtgatgtaactctaatattaaggttcttcatcagattttagagttaaggtcctgactaattgtctctttctcaggaactgtatcatcgataagaatgcaaagattggaaaggatgtgatcatcatgaacagagatgtaagcgcagctgcatatcgctatttaagttgtatgtaactatgaaaggttttttttctttcttttgtgcttaatttcatcatctttttctagggagttgaagaagcagatagaccggaagagggatttcatattcggtctggaatcaccatcgtagtagagaaagcagctataaaagatggaactgtcatatagatgtctgatactcctagtagagaaattctggaaacgaacatatcaaagctgctaggagaaatgtcgacattttgatgcatggaaaggcaacctttggggcttgtttgtaaactggaaaaatctgttagtgctagtgcttgtgaaaataagcctgtgatgcgagtctatccaaccagatactggaatattacccaaataaattcataggcccgctggctgcattcctcattattgaataaaaacgtcgtatccagctgtgcaatattggtttcatttataaataaaagcagtgagtctttgtagtaagatcaaaaatagaacttcatgtttgtttttctttttgataagcagtagagaccttgcttatttctctacattaaaggcagtgagtcagtgatcacgtagttgcgtccaacttaggacgtaggaaggctacctgatatggacaatttacagttacactttgcagtggtttttgctatttaatttactaaaataacgtattagttttatacaactgccgctaaacttattttttttttttttgcatgtaagtaattttttgtagcattaatacaaatataagtttttattttgcaaaactaaagttgaagccacgcaccatctccagaggctgcgattctaacaaagaagaaagatagaagaaaaaagtggtatgaagctttacgtacaaaatcatctccttcggctccaacaaattttcaaaaatcattgaaagagttactgacctttggctcaagagaatgacttagaggaagaggaagagagattgggatttgggttgcgaagggggcatagcagagattgcgatatggttaatggttattctaggttgcgatgggttgcaatttaggttgcgacagagcatgactgagattgtgatatggtttaaaggtgatttaggattgcgactaagcatgattgagattgtgatattaatggtgatttaggattgcgatttaggttgcaatattggtggcgatttgtgcggcaatatcaattgaacctttttagttttgtttagaaaatcatgctgggttttatgccctaaataaaactccatttcaatataatctattttattcaacatcaat

SEQ ID NO: 297812 - DNA, 2525 bp, Cannabis indica
ggcagatctaagctaagctaagctaataacacaaatccgagcattagaaagaaataaaatataatgaaaatttgaaagagctcgtttgacgagaaaaacacttaccctaaaaagaataaatggagtccgagctcaaagacatgagttccgccgtacattcgccggaacccaaatcggccgagtcgatccccgacgatggttcctttgccaaggacgaccgtcctcttctcaagccggaaccctcctccgccgctgtctccggagacagcctcgaggagatggagaagaaatttgcggcgtatgtacgcaatgatgtgtacggacccatgggacgcggcgagttgccgttgctagagaaggttctactcggtttagctatggttactttggtgccgattcgattggtggctggtatggccgttttggtactatattacttgatttgtaggatttgtactctgttttggtcttcgaatcgagaagaggaccttgaagaggaagaggattacgctcacatgggtgggtggaggagggccgtcatcgttagctgtgggcgaatcctctctagggttatgcttttagtgtttgggttttattggatcaatgagacttatcggattctcactactgatcccaagtcaaacaccgaggtatatcatatttcaatacaatgtttaaatggaatttgcaatagcattaagtgaattctatagtgactttctctctgtattcagaagagaatgagtgcatctttattttattttaatgaaagaacgagtacaccttattcatctatattgactttcaaaagcatgtttaatttctcagaatgaaagcaaagacgagtctgaagagcttgaaaggcctggggctattatatctaaccatgtctcatatgtagatatcttgtatcacatgtcttcttcatttccaagcttcgttgccaaggtttgttcacttacccattgtttgagaatattttattttaacatgtagtttaggcgagagtttgctgggctgggctgctgttgtatatgtcaccattttctttgtataaactgtctgatgttttactgacccaattctgttctgacccttcaatacttgtacgcctggatttgtaattggtgaagagatcagtggctaggcttcctctagttgggcttatcaggtaagcttgtatgacattgttcttttatttctcacatttcgtttcccataatttttgtagatttttatcctgtcataatgtcatgaattgtacgaaagaatactcagtttttgtgattctctttcttattctctcagcaaatgcctcggttgtgtctttgtccagcgggagtcaaggtcctctgatttcaagggtgttgcaggtacattgtctagtctttatagatatatttataggtatccctagcatcgtgaagttatattaagggttcttttgagctttattcaagcttgattacatgcatacaaaaaagaaattatgtgtatttctttgtttgatatgtatccttggtcattttgcagctgttgttactgaaagggtttcccaatcttatcaggatgagtctgcacctctaatgatgctttttccaggtctttttttcttctctcttttttgattaaccatagtggactcatttttatttcaattgttggccggcaaagcattttgacctgttgtgtactttgaccaagtcattttgtttgatgtttaactcatcttgcttttagtacagaaggcacaactacaaatggagactttcttctcccattcaagacaggtgcttttctggcaaaagctccagttcttccagtgatcctgagatatccttatcagagatttagtcctgcatgggactcgatatctggggtatgtgtttcttgaaaattaaatcaatagtcaaaactcattaatgtattatcatttgtcctttgtcttctgtattccatacgacattaataattgcttttgtccatttgatttatgcttactcgttaatctatatttacaggtccgccacgtgtttttgcttctctgtcaatttgttaatcacctggacgtgactcgattacccatctactatccaaatgagcaggagaagaatgatccaaaactttttgctgataatgtcagaagatttatggctaaagaggtatgcaattcattgcctgagagagtatttataacttcctagttttttcttttataaatttcacatgggaattatgttactttctcaagaatgttatatagcttatagtaatgctttatatacctttgtttgtatcacttcggttgcagggtaatttggtaatgtcggatattggactggctgaaaagagaatttatcatgctgctctcaatggtaataatagcctgcctactgttttgcatcagaaagacgattgataaattagaggccaggcctccccaaatgttatgtagtcgcggttgagtttcttagtttttagtggtcattgttcatgatgcacaatcacactatcaccaccccttt

SEQ ID NO: 297813 - DNA, 3964 bp, Cannabis indica
tatttctaactaattttccttatcaacttaaatttgaatatcttttgaatttaatattaagttgaggaattgtaggaattggttattgaagattcttaagatatttttttaagttgtttttaaacttaaaatggaatattcttaaattaggtagttaccacttaattttgatatttaattaaattttatttggaaagttttaagttgcttattttagattctttctataaatatgagtgtgagtttaaaaaagcctcgcgctattatctctctgtaagaacgtatggaagtgtgtttagcttgacacttgcttaccattctagacaaagtttctgctggtgtgttagttttcgttattcttttggtgagtttcgctatgagttctggagtgatggatttgatggatacgactctaagtgagttattcgaagatgcagttcaggtgagtgtgaatgatatcacctgcgacctaaacccaggagaagtagaccttcccgatgaaccttgtaaggttattctgggaaagctctactgccacacaagctggggaaaaaggcaatccttggatcgctgaagaatgcctgggcatccattacgggatggaattggaaggaacgtgatgatggttttttttcagttctctttcaagtcgagattcgatgcagagaatgttctccttaggcatcctttgttggtatgcagatatctgttggttctcatgccttggccttcccagcttaccctggaggaagttaagtttgatcatacacccatttgggtgcgtctgaggagtatccctccattctactggaacaaaagtaatttacaagaaattcccggaaaagtgtatgctgtgtatgagttgcccaagcatattgagaagaactttgagaggggatcctttggaaagggcgagctgagattcagagcaacagtggatttatcaaaacccctattttcgggtttcttcctcaggcgaacaggtataaaagatctctggttgcaataccaatattaaaggctaccaaaaatttgtttcaaatgtggaatgatgacccatgaacacaaatactgctttaaaacaccaatggtgataaaagatgcaactggtggtatttttcccatgtttggaaactggatggctgaggatgccttagagaaatcgccctttcaatccccactaccaaaatggtttactgagtggattattttcaaacgagctgctaaggatgaaaaggttaaaaatctactcaaaaatcaaaatatcagtcgtcaagctgaggctgcggaatgtagagaattatagagacaatatccagggaaaaggaggcaggtggaaaccattgttgaaaccaggagagacaccgaagaagttgttctaaatcggtatcctattgttcttttgccggggataggcgaagtttacccttttgagaatacagaagacctggttgtggaaaagatcatccctgagttaacacttggaaagaaagggacatgtcaaaagcagaaggaggtagaaagtagcaacaacacaaacaatgggcctgagacaactgatgagggagatgaaacgctagctgtccatattttcccaaattgtgctaacaacattcagaatggggtggctatacagaaaaatgataccacttttggaggaaaaaggaaaatagccgttgaaggagaatataggaagtggaccatctatggaagactcatctaaaaatgtggaccatatcctagaaggcccaattgctcacggcccagaaagtaaaaaggccccattagataaaagccaagtctaccaaggcctctttggctcacaagcccatccacttaagtggccctcaaaagagtgttggaacctagcttttgatcaacttttgggggcaacaacaatcgacaagtaccaccgtgaccaaactctattcaatccaattctcgacatccaagactttagatgttatgaagctgaacatggccctaggaaacgcaaagcaatggacggtttctataagttacccgctgaaggtagttgcaattcatttgctacccctctgaagcttaacgaagcaagcagttcttttcagccagtggatgcgaatttaaacaactctcccctggctactgaaagtggattttccctggctcgactgagaagaaggttcaaggccgaaatagaggtagaccgagaaagataggggacactgatccaatcgaagtcaaatctcaaaggagaagaggaagacctctaaaagaggaagcgcccttgtctgtgaaaccggtttgtctaaagaaagaaagaaaaaggagaatttcgaagaaggataggaagcactatagtgatccttggaatgcttcggctgtggagctggcaattgatttagaaaatcattttgtaataattgacaaaaaaacaaatacttctagtagctgtgtgatttcggagatactggagaatgaagacccacaacaaccttccacaactgacgttacaattgccactgagaaaaccacagagcaggttttttgctttggggctatggagacttgccctcaaaagtctccaaatgctcaatgaagattattgcttggaaatgccgtgggctcgggaacaaagcggcagttcgtcagttgacagcgttgatccgtcagtccaatcccgaggtgattattatctctaaaactcgactgagcatagagaaatttcacagtttatgtggtaagctacattttattgatggtgttcatgtgcctctgattgggagagctggtggatttgggctatacttgagaagtggggtgctttgcaaaaatgcttatggtgataagaatttaatcagcattgtcattgagtctgaccctcctggaaacccgtggaacttgctaggggtgtatggtcctccagttttagcctgaaaagaagtttttccgaacaaggttagtgatttaattctcaacaattcaattccaactatgctcattggtgatctcaatggcacgttggtagatcatgagaatcttcattattcaaacagaggaaatggcacgaagtactcttttgaccttcggagaatggtctcaagaacaggtgtaattgatttaggggcacatggagggaagttcacttggttccaaaaaacttcaggaacaggaggtggatgtagtcaaaaaagagctagattggatagagcccttgcttctatgaactggaggatgcttcaccccaatgctattgttagagttcttagtgccgctacctcggaccatcggcctatttttctagacacggagggtggggcaaatgttggaagaccgtagtttaaatatgaacttatgtggggtagagacccgaaatatttttgggtagtcaaatatgcttggaaagatcaacttcaccataatcctatggtgaacttttatcgaaagctgaagaaaacgaaggatcatctgacaaaatggactccattttaaacgaattgggaaacaagtaaaggaggccagaacaaagctcgaagtagtggagaatgcaaataatgtcacctcggaagagcttggtcagaccagagataatttaaatgaagcacttgctagagaggagattttttggagaaaaaaatcaagagtttcgtggtttaagcagggagataggtgtactaaattcgttagaagaagaaggaatttcattcaagaaatcaagattgctgaggggtcatgggagagagatcaccaaacaattgccaaattatttattgaaaaattccaaagtacctttgtcgacaatagaaagtcatgcttacctgcggggtttggtcaggaaggtggagtcatttccatggaggagaatgctaaattgaataccatcccttcttttgatgaaattgaggcttgcatgaagttgttggaaattattttacacggatcttagatctactcacaactatgttgattaacaccctaaata

SEQ ID NO: 297814 - DNA, 4282 bp, Cannabis indica
ataaatgtatataagagcttaaatttattatttttctctacaattccagcttcaataatagcaaaactggtcacagtgtgtcgacacaaacgtgacacgattttttactggtcgggttagggttgagataattagacacgagtcaaaaaacgggtcgacacgctttacacgaaatataaaagcgggtcacataaaatatgatacgaacacgacaggatgacacgttttgctactccgtactcagcagtgaaactatttcataaaggaaaggaaatcaaagttacaaagtgatgttatatataaaaacttgttaaaatattaatcaaatatgtattaataagataattataagtttacttttagatatgaaagtggcatatgaagttcattaactactgaagatcataatatataacatcaaacaagatacaaccaaactatggatttagaattagacacactagaaaaaccaattcaattccacaactatgttaacagaagtagaagtgtttaaaagtggaatttgcaccatttgttaatgctgttgctagtgatgccactttttcttccttggattttcgtcaccactaagatgctgccgacctataaaaatgtatctaacatgtcaataataattttggagcactaccaattccaaaacataaaaagagagaaacggtaaatatcaatatgtataccattggcctaataaaactcttgcaagaaatgaaggagttggggatcattatctgtagtgatcaaaccttcacatgcattcttgaacttcattgcagaggccttattccaacaatccttcatcaactcagactttggcaatgacttgtcattatactcttcacatttccttcatcaatctcaaatggtaataccattgttgaagatgatgtttggtgatgtctgccaccatagtagagcacatttccttaatgacctcacataaaacagaataaacaatgcatttccaatcctcctcagcatgccaactgtcagaactaacatctccatactgatcaagtaatttgtttaaaataggtactaaagtaaaagatatcttataatctcccacacttacaatcttcactcctaaatcactaggtttcaattctattctgttggtcgaatagaattcctcaagctcattacaaaattcttgaaaatccttattggtgaagtgagaaagttgtataatccaatcaatatcttctccaccacgcttattttcagattgtcccttgaactcaaatgaattgtcttcccatttgtaaaagaccctcaatttacttcgaacattttctgacagtccatttattatatccttaagagttaaagaagtttggttcatgatcatggctatggctgtagaatgattgtcatatcttttttgcttattcaatttccaaatatcatctccaatattctttaactccacattttgaagctctcctgttagtatttttatgatctgtatatatttaagataaaagtaataatgtatatttcaaaagtaaataattacttaaggtacataaaaataattaatctaagtatacattaatataaattaattttaaaacaaataaaatttactataaatacagactaatttattcattatagtttctaatatttaaatcaaaacatcaattttagtaaaaaaaatctaacatggatggaaatttagaggggcatgatttagtacaagtcaaagttcgaggggcatgatttggtagatatcaaagtctgaggagatgatttagtacataaacaatcagtgaaatagtaaaattaaataaaattagacaaaagtccttaaatctaacaatttcaatagttcaggggaaaattttaacagtaaaaatggttcaaatggcatgatttagtacatattaaagtttagggaacaaaaatcctaattaacatatttattatagttactataacaccgttttgatggctattcatacttattgtgcaaaaaatatgattattcctaaatacattcttggagaaattaatagtatttgcatgtattttctttaaaaaaaaaagtgatgctaatttttcaggatcaggtcatcttgcttggaaatatatttgccaaactaaaaaagagggagggcttggctttagagacatagcgataattatcaatgtgggtgctctcagcaaatatgtgtgggacattgccagtaaaacagataatttgtaggttcgttggtgcactttgtgcacattaaaactcaagattggtggaacctcccactagtattagagtaacaaagaatttgattagaagtaaaatgactttgagggagttcactagcttgcaatttagcatctcaaacatttggtccaagctatggccaagggacaataccagaaggaaatggtttttcttcatttgggataggctaagtgctccaaaacaaaaatttattacttggttagcttattggaagagactctaaaccagtgtgttgcggtttgaattaatcactaatgctaattgtttgttttgtgatgaggagttggatctcttctttgggagtaggtacagtaaagaaattcttttgaaggtgtgtgattgggctgatttaaacacccaacaaaataatttagataactgcctgaaatgggtgaaaaattgtagaagaacgagatgtaggtatggagtctacacgatagttttaaatgttttggtctacaatatttggaggctaggaataatgccctttaaaatagccaagtatatactatacatttcatagaattctaaaggaaatgtgtatgagattttctcattttcaaagcgagaaaaggtagtatagttgatattgattggttcgataatctaagtacaatctatcaattatgctttgaattgtaaataaatataaagtgttctgtttgcaataaaattcattactgaattataaaaaaaaaatcatattcatctatttaatattttggtatctcaattaaaaatgcattttatgaatccacatgattttgtaaaacagtatgttttaatataaagagacattattaattaatatgcatcataaatttgaaacgaagttgaaaactcttaaaacttagagaaaaaattgacaaacacgatgtttatgctgctgtttagaagggtaagtttaaagctaaaattttctatacttccctaatatttggcatagaatgtgtgtccccaaacaccgttttattgcttggcaagcactgaaataccaactcttgacccgagacaacttgtccgaatttattgtgctcccctcgaacaattgtcccgtgtgtgatgttgaacccgaaactcatcaacacctcttctttggctgtgagagttcaccaaaaaagctgttgtgagatcaaaaagtggttcaacgagtttgtgtggcctgctattttggaggaatggaattgccagtgtaacaagaatcaacatgatttaatatccacaatcaataatgttatgatttctgccttgatttactatatgtggtgtaatcgcaatcaatgaatctttgaattagtttgttattcagttaagatggttagtttgtctattaaactaaccattaaagctagaactagaatgctgaatccttgtaactttaaaaatagcgacaaaagtacttagaatgtaatatgtaacttgtagttctggttgtttagggactgtcttcttttgttcagttgtctttgtttgtattttggattgttagtttgaatgaattcttccttcttccaacaaaaaaaaaaaaattgaaatgaagcaagtgataaaatttaattcacgttaaaacgattttaagtaaatgataagatagtgttatattatttatagtaatataatatatagattaaatatgtgtaataaactaataatatgtaacatatgacaatgtatattagttgtcatctttttgtaacatttgggagttacttgttactatgagtaacctccactatcatcaccaacattaagagtgtaaaagatgttacacatcttaatttgaaattcttaatgctataggagttatggtgtgtaggagttacatttgagtccataacatctatggggttatgagtttgaatttcaaatggtgatgatatcctaaacactatataaagaggtctaaggtgctcattttggagatgaagttttctatcaagaaaacactttgctagaaaaccctaaggcttgataattcccaaagctatttcctagagagttcccttagtgcttaga

SEQ ID NO: 297815 - DNA, 2324 bp, Cannabis indica
ttatgttaattttttttgtaaattcattgcacttatttaaaaactatctatcttttaatatatattttttaaaacaataaaatagagaaagtgtatgatttgtgattttgttacttattgtaattacttaaaaaaaatctttttagtttttgtttaaaaaatatacataatcaaaataaactaaactaagaatataattaagtagtatatgtgtatttatttactttttttttttttttgattacatgtgcaattattacttagtatatatatataatatactatttgttttctattttcctaaaatttagtattttaggacatatataaacctcccattttaacttttttatacttatttttgtaaaggatactaaattaagagtggaaaaaaagagtgagaaaacttaggacatttttaagaagtcaagatagagagtacttgcattaatttaggggccggtgacctatatcaattaaggctgactaaaaaaaattattcgtttatatatagttattatattccatttctcactaactacttattatagttaaaacaaataataagtatttaattaacctctgattcatcatattctatagaagtcaaagaccgtacccaccaaggcaaattagcttgagtcggaagctaactcgaatcgtacatataattcataagggcttataaaatgtacttaattataaatataattcacatttacaaaatttagaacccaattatttttcccctttctctgtgttatcaattccctttgcaaaaatggcatcaaacacactagctcaagttttcatcatcacttttctctttgttacccttctcccaatcaggattgaatcacagccgtccattgatctacactctactccatccgaaggcgaggagggtaagagtagagatgagtcggagaccaaactaggctttaatgaaaatggtggatggtgcaatatctgctccaagaacatgaatgagatcaagtttgccattaatagtggcagtgttgatcatgatgaagatgaggctaaattattatactctagtgttacaaacaaaaaaccatgtcatatagcttctaatacttatggtccattgagtttttttggaagatttagattgttgactctctatttgatatttaatgttgtagacattatgataaatggaagactttaggaatattcagagaaattatggaagatgatcttcatgaatttgaacaatttatattctttagctttgagaatatagttgcctattattatttctttggcacatgcaattatttaatattaatttaaagaagaattaaaacagtttacatgtgattttgtttttaatcttatttttgcatgcacaagaaaataacacattctcatatttttaatgactatcttgagtttaaattttaatatgattgtcaattctactaatagagtttaaattttgatgaagcaactatatcaaaatgtcataataagccacctgttgggttcgtgtttatattgtatggcaattgtgttccttgtattgttttgttaaaattgtaatctctttcagtgctctcctccgtaccaaaataatgatgttctatctcgttaggccggcggcacttacatttataccaaatgattatgattgagttggtggtacttgcttcatttcatgattatgatcttttggccatttcttgaatggacttttcatgagttgttcaaatagagaggtttaaagaataattaaattcttgtcccaacaaaaaagaaaaaaaaataataataagaagaagaaagaaaaaaaaaaagaaaagatgagaaaagaaaaatgagtggatatcatatggaaactaaaaaaaaaaaactgaaaaacaaaacacaacataaaaatgaacaatattaattacaattttacaaaatcctataaaaatcatatttaaaaagtcgtacatctctattttttttattaaatatgatatatgttatatatatttttttttagatattcataaaatacctatctaattcaattcctacaattcaatttaattcaatccgcaaaatatggatatgtgcatttgtgtggaatggattggattaaaaaatctaaaattcgtacttgtaaatgttaattgatatgtaaaagtaactgatttaatctaatccacacatatttagatatattttttaaaaaattatatatgtaactaatatttaaattaaaaaaatctaataacaatatatttcaaaatataataaatcaaatttatattctattcttataaataagaaaaatataatctaaaacaaaa

SEQ ID NO: 297816 - DNA, 8073 bp, Cannabis indica
aaaaaataatacgtgaataatgatatatgagtttcaaaatataacttatttataaatttaaatatttttacttaaaattactctattatataacaatatatattaatattatatataatgatacaaatatattaaaaaattaatatatattatttttgagaatgtatttttgaaagagctgagaagtttctggtactggtactgctacacccctataacaatcatctaatttttgtatttattctaaaaatacaaaattgtgttgttcaaaaaaaaaataaatattttatctaaataaaataaataaataaatagtgtagctttttttaatgaacttttgaaaattgccagatagtccatttggtgtgttatataaatacttatttatatttataaataccgcgcaaattaaaatctctagagagagaaagaagagagagaagcggttgggttgaggcagtaaatgtcggagacgacgacggcgtttgctccgagagaggctgtagttacggcgggtttccccaaactcaactcctctgtttgcgttgctagtagtacatttgatctgcggttcccggcggcgattgtgaacgcgtatcggatctccaacgttatggataggttggccaccattctaagacaccaacgtgtagacacagctgagtttttcaatctctgtcttaccctcgccaggtacagtgcttcaccttttttcttttttatgttttcaatctctctgcatattcacttttgtttctatatttttcagctatttttttttgttcttgattttgatttagaggtttgtatggtttttttttcttggtggagaaaaaattaaagtagtgtgaatttttgattatgtatgacctaacattgtactcggactttttttttgttgggtttatgtgaattatgggttttgatgttgttttgtggagctttgatttttagggttttttgtttctatttttgtttttttgggagccaatgttaaggatgaaagaggttagtgctgcattgtggagtatgtagttatgtatgactgaaaccagtgttaatttttgacattattactgtatcacccgtcgttagaaatagaaaccccttttggcccaaatttatggatattattccttcctgtgatctctcttctcaccccttttcctttacggcgcgtatgaactatagagggttgagctgtgctgtaaaagccattggttttggtgaaagtttactgttcgtagcatgacatgaaaagtcgtctacacgaaaatattggtctagttcaagttttcttacagataatgagacccagtggcgactggctatcctttatatatgtgtatacaaagacccagaaatagttcaattttaaactattcatttaataattcttataatttagagatcagagtttatatatagttgagtacatctgattgaagaaattggaggaatgtttagtggaatagaaataaggttggtcggtcatagataaggaggagagtgaacctgtaatcattggtttaatggaagagtatctttattggtttaatggaagagaatctttatggtgttaagagggttaacaaattgtggagaagactgggaggggttgcatttatgtgaccaagtgactagattggtttaggatcaacggtcgatttcttagtaaccatattgttacaggtcgttttgtgtgatctatgagtaattttttaaattcatatggttggtatttggtgagattttaggatctttgaacaagttagtctgttacctcgtggaagacctaaatttgcagaaacccatacctaactagcttaggtaacaagaaggcctacttaacctggtcttggcggtgaagcttatttctgtttattttaattggtggataatgtataaatctccaatgctgaatgtattttgattagctgtttcattctttgaatgggatgctttgtattaaaatcgtaaagttgattgctaattagtgtcttttacttggcttggttaactttgaaaatgcaggggtattgattatgcagttgcaaataatttcgaagcaactagatctcaagatttatctgcagtggtgaagcaggtgacttagtcgaaccccaacttttttcctggtataattagcatatactatacgctgagagcatgtgcagggttgtaaactattagatttagacacattcatgcatacgtagatactcatgtcttgtgtgaatatttgagtagtaaacagtgtgctttggtattgtttggttgttgtacattggctaactaatttctctttcttgcttgtaattagtgcaagtgattattgcttggttgtagtaaacagtgtgttgtagtacaggtagttttgtttaacaaaaaaaaatgatgactcgggaatttagacaataacttatctgttttcttgctgcttaactgtgatacattcttaagaatttaaactatagaggagcttattgctttttgtattgacatcaaacctagctagtctattatgtttatcaaaaatgcgaactaggtatggaatagtgacaaagtgagatcagacctcatatttttttcttctattgggacaatttgctctttgatgaatttattttgttttcacctgtagtttatctttggagaaagtgtttgcatggcaccttggtctctatatttttggatttgctcatgtattagttcgtcatttaaatcaaaacctttgttttatgtctttgtagatttgtgaacgaagaagtgatcactccttacaagctatgattatggtggtaatgatttctgtaaaggtacatgttaaatgcagccaatgatgttcattttttttttgtgagtgttcataacaaacatttagacctttttattggaaagaagttgaacacttttggtttctgattgtgttttattaatttaatttaagtaatacccactgcttgcttagctaagggtatagtatttctaattactataattttttgggaaaaaaagatgtctcttaaaatgactgttatatgactaatgttctctgcagaatgcttgtaaagttggatggtttccagaaaaggagacccgggaactttatactctagctaatgaggttgttacactattgtattttttttattgttcatgttattttattttgttttttgtagaatttatggtctgcattagatggatttttatgtccgtgctcattcacccattttgttgatacagataggaatgttcttcagcagtcaagggggtcataacactgcacctagctgtgtggattctaatgttgcaacagtcatggaaaggtgagacttttgatctggtttttactgttcattttttattttattttattttgttcgagcttagttcattaagttttttcctagttggttatatgctagtggtagttgagtcttactgttgagcctccttttacaggttttatccacacttgaagatgggccatattcttgtttctcttgatgtcaaggtagatttttttgtacattttgcatttgttagagttgtaagtaacccctctttatttattttatctgtttgtttattttttaatattgttttccagcctggatatgggatctacacagttgatttcaatatattgaagtaacaacgtgcagtctcaagaggataagattgtaagcatctctttaacaatatttatatgagattcttgtagttatagatctgcttaacctagtttctctctatgtacttatcattataaagcatctattcaactcattttttggatgcaactatgcaagtgtgtgcaaatatgcctgtaccacaagggctttgtctcctagcatatatacatatgcgtatttatatataaatatgtatttctatttgcttttgcattttgaaataggaagccatgttctatactgcaaatatgacttcctctgtatatatttgtttttttgactttatggatatgagcaatatagttctgctgattagttgatcttttcttgtaaggaatgtaaactttgggcattttcatctaatttttgcaaggcatttacagcttcgaatcagtagttcaacttagcaattccttattttcttactaaagttgggaatatggtttgtgggaattattctaaattgtacttatttttcttgcagcggttatttgtagctcaagtagataatgtggagacatctgcgtgtattataactcctcaacaagtaaagtaagaatcaatttactatttttccttgagaaatcaggggagttgtttgatataaatctattactctttgttctgatgatattttctttggacatgtagcttcattgtgaatggaaggggagtggataagcgaactaatgtttatgtggtttgtctctttcgattttatttctggatcattttgtgtataagacaacaactgtgcacctcaaattgtttagaggcttaatatatcagctcgttgatctctctgtacttttttttcctaggatgctgggccacaagtgccaactaatgtgactccattgttaaaatatggaacaaatctacttcaagctgtgggccagttcaatggtaagcttgtacagtagtcttttagctttgaaataatggtcacatatcatcgtttcatgacagtgtgcaactaattttcaggtcactatgttatcattgttgcctttatgaaagagacgaaattatctgacattccagtcctttcagattatgttcagcctcttgcaggtggacttcagtcaggtatgcttaaacacaaagataggaaatatttttatcggctgtttatatcctattgtatttatgaattctaggagctaactggtgtatattttgtaaagatcttgatctgatcgaagggccatcccgaatatcacttaattgtccaataaggtataccattctatattacaaaatctaatttattagctcttatatcttctatttgttaataatcctgatagacttgtatttgatgttaaatttcagataaatattatatcatgttcttacaattcttttttccttcatatctaattgaactgataatcttttattaattcatttggctatatatagttatactcgtattggtactccagtcaaagggcattcatgcaaacatcttcaggtgagtgtggaaaatacaatcaagatctttgtgtaatttaatgttttagattggtgctaattattgattccaacagcaattttaattttaatgtggcagtttctctaaaatgttctacatataactatactctaaccacaaaagattttatatgtaaagagtttctagtttctctgataactaaatgaaattggaacaattttaatttttattaagcaatggaaaatttggtctataatttttcccatgaaaaatgaacctatctcgttagtattattccatgcactttttttcttttcttttgggtgcagggattgcctagtttaatttttttttagcttcaaaattagtattttgacattcttgcggtaattttggaatgtcttattatgcagtgtttcgacttcagtaactacattgatataaattcaagaagaccatcttggcgctgccctcactgtaatcagcatgtttgctactcagatattcgtatagatcaaaatatggtcaaggcaagtggctagacatttgttccctatgtcttgttgttgttgctgtgtgtatatttctgatgttttctttctctcaggtcttgaaagaggttgggaacgatgttgctgttgttattatctccacagacgggtcatggaaggctgtcatggacaatgatgatcagtctgataaggctcacgattcaaattgttcgaagcaaacgattgagctgcaggagtctaccgaaccaaatgacattcataatattctggatctgactggtggcgatgatgatgaaatggatatcactgttagtaacattgatgacttgaaaccttccaggggtgaactaaatgtcctgcctagaaatcagaatgttggtgctcctcaagtagaggatacagattggtctgctctcttcaattctccagacttgtcgaccgcagtttggtcagaagccttgttcggtccaacatctcagtctactccagcaacttttgtgcagactcctcacttggctgatgtttctccggtacctactaatcatggagctggcagtcttgtaaataataatctcatagcttctgaaatgatgaatcatttttcttccccaaattttcagttacaacagatgcagtctacaaacccaaatactaatgagtatgggagatttccaacatcttccccagttccgaacaggacaccaatcgctattcaagccctcgcagcacagccacagacaccacaaacttcacagcaaatattaagaaacaattcaaatttcttaactcccaattcttctgctatggcatctcagagtgcacctacaggttataacacagtattcagtgatatggagaggcggcaacattttaatcaatcccttataaaccgacctcaagcacccaacgttgccccatcttcagcacagccttcctacgtaacacaggtaaacactacaacgaccacctgtgaaaaagcttgcactgtaaatggttttaaattgttttccagcatgcttgatttgtggataattcattttatggaaattctttctaacatttgcctttttcaatccacagaaccggaatcatcaacatcaagatcgttcattttcaggtcaacgtccaaatggttataggccatcgacactctcaaattttcaaaattcacacctacaagaaactttcaataatgtaaggataccacagtcacatgccatccgaccttcacatatgttacgaagcccagttccctaccaaggagttactcaactgggaactcctcaggtatcacaagttagcggaaatcaacaagctagaatggcgggtttggctgcccaaagagatgcacatgcagctagacaggattcgacacctgagcagaattggcttgctgcaacagctcgaatgcgtggaagctcaattccacctgcacttaataatttgattattcggcctactcaatcaccacaaccgtctcaagctccaatactaccatcagccccagccacttccccgcaaatgatgttgcctcaaatgaccgctcttcttgccaacaacgacagaaacgttcgagcacttcaacctcataatcatatcaactgaaatgctgctgctcaaagtgggtgtgtaaataaatagcatggaaatttttgtagctcgttgtctccactccatgtataaaaggtttggaaatgtttgggaaccaaaagctttaatagtcttctgttatgtatgtagctatagtttttttcttttcttttcttttttgtttcatatgcagtggaaaattgggttgtctaaatgtgcagtgttccaagcttttcgaatattaattttagaatgaaacttatatatagtcaaaatgaatgttatacttgtttagcctctttttctctttgaggtatccctttcagtcgttattttttgactattgccaagaacaaggttagttctaatgatcttttgaagcttattaggcttcaattcatctctcataattggggtgttttgggtttgatttgatttgcccaaccattttaaaaggagtaattacattgataaggcataaagccaaaaaaaacaaaggcaatataaagtaattagtgttggaacctgaggggtaaatttggtcaacaaatttgagaaacattaaagcaataagagtaggggtgttcataaaatagccgattcaatccaatccgcacgatccaatccaatccgcaaagtgcggatatccgcacttgtgcggattggattggattggattggaaaattcaaaatccgcacttgtacggattggatgttgattgacatgtaaaagtaaccgatctaatccaatcaacacatatttataacaaattaaaaaattatatatacaaataacattttaatgtaaaga

SEQ ID NO: 297817 - DNA, 3505 bp, Cannabis indica
tgcccaataacaatgctcttaatacacacacttgagaatcgagaaattcttaaaaaattgttctcctcactctctctaacctagtcgccactctatctctctaattctctctttaaatttagaaatcttagtgttatgtgtaacacttgcctacactattatgtttcaacatctagatcactgggaaagattgtgaagaaattggtagttgaattcaggttctaagaagattcggattcaatgactggtgatactctgctatagataggaacatgagttagatcactaaatgggaggagacatattttgatgtgtaaaactctgtattgtattatggactctataagtgaattgcatgttataggtaattaatatttacgttaaatatttgttttcatgaaaattaaatcaatctgctggcgtgtatttcctacaattcgttcatggacgaactctcgttaatagatgaatattagaaatagcttggcgatctgtcgccaccttggttccgctcagtgagcccatatccgggatgataatatgttggctatcaaaggataatcctagcctgtcagtcataccccggtccttagaacttcaagcccagggattatggctttaagtctatttgaccatgtcttactctgcatggtgacatattttaaacagacattaaaaattgttggatggagagaaagacccaaatgcacctaaaactaatccaccaaagaatatagaactttcagcttggttggttctatgtgactacttcagttcaaaaaaacagaaggtatgcgtaattttgaagtcaattgaaatcttatttactttaatctaataatttaatgacttcttttttacagcaattatcagagaaaaattttgctaattgttcagtaatgccatctgagagtcgacatggatcaaaatcttatttctctcatatgaagagcaaggtaatatgataaatatttattttatttttatcattttaattttatctatatttgtcatactaattatttttatattcaattataggaggatccaaccacaaaataaatgcccagtttggtggacagttttaaaaatatgcactagcatccaataaaaaagtggataaaggaaactgcaagtgataaatttgtaagtttgaaatcatgtctttgtttatttgttatgtgtgtcattgcatcaaaataataattattttgagagaagatagaaattaactatcaagtacaaagtttgttctttgtttttatcttctgtatagttgtttaagcaagaatttattgttgtgttctgctcagttgctattgtactgaagctttaatcgataaaagtatttgagtttggttgttcttgtgaactgaggctcaagaagagctgaaacacgaaatttttgattttttgtgtactttattactgcattagtttttatccatttgtttatgagataaattatttgtttaaatgtttattgagaccacaaatctagatgtctttagggtaatgatgagaagagatatttatataagtgatgagttgtaatgctaagagctcatttaatgtgtattagttaatgtaaaagaacttttgagttgtaatgctaagagttcatttttgtttctcatttggagtctgttctttttatatatatttaaaatacttttttttatttgtgtaatttttagtttggattattgaaattgcaatatatatgtgttgctttataaattttcattttatggattaacaaagagatgagattcatgggtttgcttttacttttttctaatgttgcaaatagagatggacaacttgcgttctactcagagaacacatgttagtcagcttattggttctgatgttactgttgatcagttagatattttatctgaagatcagattgttgatatggtattgggaacccgttcacgttataaaaaaggaagatgtcaaatgcctaggctgaaggcaattggtagaacaacatcttctaataactctgtttataatctatataaagattaagttgctaccattacttctttcacacaaaagttaatagagactcaatataattttgaaggactttttgagaaattgaagaaatatttacagggtttcaactatctgccttctagtaatgcattttcatccaatatctaatatgtaatttataaaacttttgataatattgtatgaatattatcacattatatgaatatttgtgtttgaacttttaatatgttgggttgattctctaattttgtctagttgtatttgagaatttagctaacataataaaatgttcttacactttgtaaaatttacaaatttagacaaccatatcatgtaatgaacattttaaaagaaattgatgccatattaaatttacaaatatttgtatggaaataattagatttataaatattagtgttgaaataacaagtatctgaattgattttaaaatatatattatattatataaatatatattatttttataaaaatacttttataggtgctttgaatgcttctacaaaagtattaacaatttttttgtgtgggtgaattaaaagtgcttgcaaaaatatttttaagaagataaaatttatttctcaatattttttctaggcgctattgttgcgcctacaaaaaggtattttctttccgtacgctcttgggagttgcgcttgcatgactttttgtaatagcgcaattgtggacgctagagggcgctcaaaaatttgtctgtgatacttttgcaggcgatgtatgggacttttgtaggcactaaattgtgcctgtgaaagtgttaatccttatagtgagacaaaacactgcaaaatagattttattatggttgactttagataaaataaccgcaaaataaatttatgattgacttttctttatcgattattatttggtcatgatctttcacaaacctcaatcttggatgagctgcttttcttagtaaaaaaagcatttacacgtgcttgtacaaaattatatatgtctttttctttcgttgttccttctctttgatactattttatcttttttttttctttatttaggtataaatacgcaactaaaagataaacttaagtattatcaccgtgaattactttttaaattattaatttatctattttgtttctaaatgttttaatgatttttaatgtgtaaattaaaaacaaaaaataaaagtttattattattattattatcaattggttatgaagattacttattgtgttaaggaaaataaaaaaaaaaattaagaaacacgtcaagattattgactaagaagttgttcaatgatgtacaaatgatcatttctctaagttgccaacttattaagataaaattgtttcaatttgtaaattttctaagggcaaaatttatgtaaatttattatattagtttttttccacaatattggtgattatttgtagagagagggtgtgatttttattttttttacttgtac

SEQ ID NO: 297818 - DNA, 2783 bp, Cannabis indica
caaaagataattacctaccatgcagaagtaccactactaagctaagtattatgctacaatcaattagaacgaaactacattttcattaagaaagtcaatcaaggtaacaagtacaagaacaaaactagatgatagaatgtcccacataactaaaaggaatgaggagaggaaaaaaactatctataatttctcaatatctagcatgcacagaaagccactggactgattgtagatcaaaggaccagaattatagaagataaacttacttggttcccatcattgtcatatcccctatcccagacatgtatctcattatttttcaaaattgaaagttctgatgaacagtaggctgccccattctgcaattaaattatatgaatgtaagaaactgactaaatgcaaatccatattttaagaaattgttggcaccagcacaagcctacattaacatattaagaggaaaggaaactaattaagaaactagccagtcggttcagtagcagttacccatgaattaggaaacccttcaggtggagttgatccttcatataagcagcgtttcccacgatcacaacgcttaagatgtattgttgtcaagtgttctgcaatgtcctgcatccgattaggaagtatatatatttattttcctttcttttacaagtaaactaccagaatgctgacataataatcatgtaataccaacatcctatattattggtgctcccgaactaagcatcttcataaaaaaagcaactgagtgtcttatgaatttgaattcaaaagaattggctgaattctactttttcatgtattactatgcatttgatcagtaataaaaatagttttgtttcaataatacaaaaaaagttggggttgctttattcagtgaaagaactaaccaagaaataaagcatggaaaaaaaataaaaataaaggatacatccaaaggtgatagctatgggatcagccctctctaatcactaagagtgaagttatcgcaactaggttaaattgttgtgtatttaatcatatttctcttcctattaggcttcactctcttcttataaagaattgaaccatagcatcacataacggaatccagtacagaacttagagaggctaggatatgcattttataagctgacaatgtgatcttgaaaagaaagaatcgatgcttaccccaacgacttcttcaggcaatggacgttggtcgtttggtcgatcacagaagttcttgtactcctctgcatctctaatggcatacgagcttagctgtacatagaaaatgaatgatattattgtttgaatttgagcctcgaaacaatataggtactcagttttgactgaatagattcttcacagccagatactgttaaaagatcacagtaaacaaacatcttataccccgcattcagctctaaaactaccagctgctaacaagagcaacactagcttcacattaaataaagttaacataactaaaatacacttaatattcacctcaacatcacatttcaactcttttggacagggcttcaccatgtaaaatctctgcaaccagaaaacagctataattattaatgaaatgcactaaaacaaaataaagaaagattgcaatttgaaaagataagaataaatcttatacctgccgaaagggcttttgaggagtcctccagaatgcctacaaacagaaagataaaccctataaagcttaaattttggggcaacatagtcttgaacaaaaaagcttttattgaaaatagaagccaatttcactcacttgttcaaaatacaaaaccttagagccatccaccatctcagccgcaggacaagtaagcattctgcagatgttaaacgttgaagttataccataacgttgttgtttattacattaaatttaatacataaatcacacgagctaaggcttatcttcacaaacattggataatatattaaactattataatctatacgtaatcagaaaaggaacaaagctttttcaaaacgataatcagactcaggcaatagataagctaacatcaaaatcagaacgcaaataaagaaccccataaaagagaaaacagaaataaaaatacctgaaattgaagtaatgatcgggatctctggaggcttggtctttggagaacttctcccccgagagagagcgagaaacaagacgggcatggtcccaacgggtggtggtcttggtgagtcttttaagcaatagggcacctcctatgagtacgagagtcttcacaaccaatcctctcgccacaccccatcctccgcccgagtccgactcaatacccattacaatggaatttcacgattgtttgttgctgctaaggctagaccccttctagggtttggtcaccgccatttccaatcttagaagtgtcagtattttcagggctcagttccttcgtcctcttcttcttgttctgtaataaaacacagaagcaccaaaagctagaggcagagggagcctctgataatgagaaaatatatacaaataaattgaaacgggagaaagaaaacgttgcaatcaactcccccaaattctcatcattacttaaagttcaccaatttaatatacttattttattatccgcccctaataaaccttaaaattcaataatatatatatatttttttttgaagaaaagcgtaaaatgtattaaatggaattagacctcatggtcgttacacaataagttctccggaacggagttgatcggaatcgatccatacacctggtgggtaaaagcccacttagcaacatt

SEQ ID NO: 297819 - DNA, 1767 bp, Cannabis indica
taagtttttataactaagatgatgtcctcacaatccaagcagttgaattgtagccgttagattctataagtgagtatatacaatataatcccttggtctataaaatgggaacactaataaatcttttaatttatatgattattttgggacaattatgtctcatatacatatatctataactttgtcctcccctaacaaaaaaaaaagaaatatatgactttgttactttgacatattcaagaaatcaagggagagatagtatagcggccacttcctagtcaattatatacttaaattacacaatatttgtctattgcttactttcttttttttacacatgtagatataatacatcacacgttatgctattttattatgtgttttggtttttttttttttttttgttgaaaaatagaaattcctttaattaataggcaaataagaaatagcatattacataataatataccatttaaagagtagaatcaataaaatatgcaaacatgacgtttataaaaataagaatgaaaaccctaatatacattcatctagataatatcaataagctaccaatgttgaatcattaaagaagtgcaaaaaatactaaatctttaatccaaatgagtatgtgaaaaattacacatatcaatgactatcaattaaagatcttttaataaaaattagataataacaattctatattattcaattttgaataaaaaaaaaataatcaaacgactaaccataacaataacaattgcaataaacaattgtactatgaattattgggctaataaaaatttgagaatcctccaaatcttaacatggacaaggatcacgctactaaaatcacatctcatgaataaataaagaggtgtagcaacactattattaaaataaaagtaaaaataacatactaaaataattaacactaagatttaataatttagagcagaaggatagtaataattccaacgaaatcataaataatgtgagaattaacaagacccgactagagccacgctataaagacgataaacaacctgcaagctttgtcaggccaaaaaattaaacggaggataaaaacttttaaaagaaaaccctaagaataaatatgaaagtgtaatagtattataattggtaaagtgttgatgatcaccatataataaatatgaaaatgtaatagtatattataattggtgaagtgttgatgatcactatataataaatattaaagtaaaggggttaagtttataagcttagcaacatgatatatccaaaagagctatatgccccaatcatgccgacccctccgatgaggaacattctataatttaatacactgaatttttttaattaatttattattattagacatcttaaaaagtatctaacactactagaaatacatttaaggagtgtttaatgatttttcgtattgcttgttaaactaaaatacatataatctagtattaaattgtgatgccttttaacatttgattaaccaaacttaagcttaccgtatctatattattatatattgggtttttggccactaaaccctttcattttgatttgtatttaatcttttaagcttaaattttagcaataaaatctgtcaaactactaaaatgttagtaaatttaaggtgtcatccagttaactgttatcatgaattgtttatgtgtgcacttatacacgtgatatatttatatttgtacacttaatattattattttaaaattaaataaaattataaaattaaaa

SEQ ID NO: 297820 - DNA, 2904 bp, Cannabis indica
aaagtaaaccgtggacagcaaaacacatggtcaacgtgaagacttagactataacttcattatgaccgcttgggcaacaagtacttggcctccaattaaccaatgaactgagctagctttctgaaacgtggccagcaaggccgcgatcacatagtaaaaagaaaagtttaactcaaatcaaagcctatatataaacagttctaaaattatattccacacaaacctaccttatatcattatcagattatctcagaatctcaaaatcaatcatgggagatttaattcgtcaaaatccagacggtacctacacccgactggtatcaatgccgaccaccccagcctcagcagatccatcatcactttctgaggttttaaccaaagatgtcacgtttaacccaaccaacaacacttgggtccgaatatacttgcccaaaaaagcactagttaataactcctccagtacaaccaataagcttcctcttattgtgtactaccatggcggtggcttctacttcactaccgttgcgacaacacttaaccacaatttttgcgacacaatgtcgacacaacttgacgccgtggtggtctccgttgagtaccgcatggccccggagaatcggctcccagctgcatacgatgacgccatggaggcgttggattggattaaatccacggacgaaatttggttacgtgaatatgccgacatctctaactgttttcttatagggaccagtgcagggggcaacatactccaccatgttggagtgcgtgcatcagcagctgtcgaagaacttgcaccgttgaagatccgagggctcatatttcatcatccgttttttggtggggtcacgaggactgaatccgagataagaggtgtcaatgatcctgttattcctcaagtctccactgatctgtgttgggaacttggattaccaatcggcgctgaccgcgatcacaagtactccaatccaatggcggatgatcagtggtctgtcaattgtgctcgaattaaaaatttggggtggcgtttgctggttgcagggggtgatcgtgatcctgtgtttgatcgccaaatgatgtttgtggagatgctcaagaaagatggggttaatgttatttcacattttattcaaggaaatcctcatggggtcgagattacggaaccgagtacagctccagtgctatttgtttcaattaaaaagttcataaataatgacatgtgagttgtgaccacttgttgagtaaaattaaatttagaaaagaaatcaaataaaataaaaggaaattatgttgtcctaattataatttataaagtgttgttatatattaacttatgtatgtagcctactttaacttatagagtctctaattcaaatgcgtcttctcacatgttgactaaaaaagattgtttgtgacatgcccgtcaaagtaaaagaaattttgggaaacttattgttataattaagacactgagacttttacacctcagcaaccaactaaccgaattagttagttactcaacggaagccagcttataaataaaacctgctaatcctcagtattaaactatgccttctgaattgtaattagagggagatatagtgattgagagccaaacacagagtgtgtggtgggagggatgttaaagcctaaaggaattgctcatccaaaacagatgacttccctcctctgtgaatgatatgtactcttgattgactagtttaggggcttgaactctttgttctctatgctggtattttagttaattaataaacacaacaagcaaaactggttttaataagtccaaacaaatattatcaaaatatactataatactttttgatgtattattgtacagcaatgataacacaaatttgatgctattttaataaatagataattgatttactatgatatttatagttaattatataacacatttttgtactataaaatatttgttgtgcaaaatgaaaataattaataacttacgattcagtataccagaccaacaaacatgcaacataattaaaaataatttatcaagaaatcacaagaaccaagtaaagatttaaaatagttaaacaagaaaaataaaaccaggcttaaaaatttcgaacaacaacaatcatatctttattgatttgagtgttatcaaggttacaagaatcctcacaatctctcaaagattaggagaaaacgtttctctctatagtttaaactctctttcccaaccttacactatcacaatttttactcaagtaattatgttctagttcatcttcagattacaaagattgatcgctatttatatatttacattgttgtcataattagctgcaaaactatcgtggcacatttacagtgtcttaaatgttccaactcatgacaggcaacaataatccacgttccttccaaatttacatcctatgatatccaaaagttcatctttggactattaacaagctatccgaatgacactgcttatggaaaacatggttcacgaaagagccatccggactggccgcaacttttctcacaaagcttctagatgaacaccaagctttctaaaacttctttctgatcaacaatagcttcccagaagagaaaactggtaatcataacactacaaaaaaacccattttccccgactagttttttggtcattaaaactcattaattagtcacccaaaattttttgtgactaattatttttagtcaccatttagtcgctgaatgtcggtcatagaagagatttattgactaatatatttagtcacaaataattttattttctatgactaaaatttagttacaaaatatatattaaagttagtcacagtaagattgatatagtggtcacataagtaccaatatgcactttcaacaactaaaatttagtca

SEQ ID NO: 297821 - DNA, 2993 bp, Cannabis indica
cacttattttaaaaaactgacaccataaagtaatcttagttttaggtgtcggtttaaaactgacattgaaaaaatttaatagtgtcggtgaataaaccgacactaaagcataaaccgagatttaaaaaaataaaatacttatattgtctcggttataaaccgaggccaaagaaaattaaaacaaaggaatgagctctttaagtatcggttataaactgacacaaaagagaatcaaaaccttaaaaccaaaaatataattctcatttctcatttgaaaccccaaacccccgataccccaaaccctacgcctctctctcgtcttccctctctccattttaccccaaacggtgctgatgcccaaacagcgatgacaccccgtcgtccctctccccatctccctctcttcgttttacccccaaacggcgccgacaccccaaacggcgccgacaccccaaacggagccttcttcaggtattgagtgagtgtgcgttttggtcattgagaatttgttattcctttcatcaagtcttcttcttcttcagttttatttttccttcctataatggtatatcagtttcccaacaagtcaaactcagctttccaactcccccgagttcaactctgccatcaataccagcaaaggtttgattttcttcttctccatttttttgtccgttattttcttcactctttaccccaattactgttttgattctttagttattgaagtttgtttctgaatttttttattagtacggtataatttctaggttgaaagaagtagtatttgttatatatttgcttaagaatgatgcctataaactgtttgatagagtgcttgttagaaaataaagtttttggttggatatatattgacagacaagggtttatttttttcctttgttattgatacgacattagactatttaagtctttaatttgtgtttctctggacttgttggaaggtttggaatttgattcgtggcttttggtatctcactttcaatttgtttttctaagaatatatgatatgatatgaatggatagtgccgcaaacaagtttgagagaattagacatacccaattgacattttttcccccttataatctgttgaatcataaattcttgggtttgcaattagaatgtatagttttcaaaaagcattttttcctagctagagtcatatttatttgtgatttattttctagtattagtgttgtatggaaacgaggcaaatacgtaatgtttgtagaataattatctacacactcaagaaattaatcaaagagtttgtggccatggaaagtgataacaataataataaaattgtgagagtgaatattggtattggtaaaagaaacaaagtgttgggtgcactgggaggaactgaatggaaaggtttttagcacttgagagatttttctttgtctccattttagaaaaatattatcatgttaattgatcgataaagcatatcatcattcatcttatattatatatattcataaacagtcatgatacactgttaattgtattataatggcaacacctgagtcctaacattagaactccatcccacaatcatttgtatcccaagaaaatcgatcacaaaagctcttaattaattatatatatttttatatatacattcttagaaaagagaaagaaagactaaggtaaacaaatatatgtatatatataatagcacatttatattagcgttccttttttagctagctaggcttcatatttgtatgcctattttgccatgcatatatgtactcttggtgagtatattttcaaataattttatatctgaattagcctatgcaccaaatagcttgggtgcacattcttgtagtgctttcttatgcagaatgatacaccatgatcaagaatactatcaccaatgatgagactacacatattgtaaaggtaatgatgagaattaaaattgaaattcattgggtttgatttttatgttagaaatagttgattttataatgcttttgataactaaaatttgacctttcataaattacaaagattttgactgtaaagtgataagagattgcttatagttgttggaaagtgattactctaagctttattagtgacttgtgactggttgtaggaatgggagtcaatagaccatttcacagtaaatagtaagcaatctagtacaattaagtttagtaaagtactagaccctttcaaagtttacaattaactttgcaaaaaaaaaagtttaggaaagtgtgcattttgtttttcttttttatttattggatatgcttgatttgtacttgacaacatattgcattgtataggtgtttttcactttccactaagttataaaaactctcaaggttctttaacttccatttctgttaaaaaagaatgttaaataaaggtatgaaagttcaaagggaaactttgattttatatgtatactacaaagtcagtttttagtgtatgttataaaggggtataaaagatcacttacagatttgatttcttcttatttttattataaattttgtatactttttcattgaaaatagaaaagtcataaaatttccctgaatgatcctttcttgttatgtgattgtgtctgcgcgttgtcttgctttgatgtaaacttagcatagtttgtctttgttgcgttgacttaattttttttcatgataatgttttctatgctctgtttctgtttcgataattaaagtaacgtttatgtcttctcaagtttcattctatagcattgtttcgatttgtttttctgttttgggtgagccttcttttcagttcagaaatttgtttccgagatcgttgttcattagtcatttatttctgattatgatatttgatagctgttttttgattatagtatcttaggatcttcacaagtcataagccatcatcttgcaaagagttttattgtagttttttttttcattaaaattctgatttgttaaactaagtgtctcca

SEQ ID NO: 297822 - DNA, 8282 bp, Cannabis indica
tctctctctctctctcttcattcccatctctctcttcttcttcttcttcttcctccttcgtcggctcttgtttgggcgagagggtttttctgccaaaatttttgctaacaacgaacgtttctcatttttgaacacctgaatttgtgcaattcttgttcgatttttgtgaaaacgtggagatggcggagaatcttacggatcccggcttgaatcagtgttttcaaaccgcgttggctcggatgaactccgacgagtccaccattaccatcgacacttgcaaagatgtccggcgtcgttttaataacgtagtacaggtaggtttcattcattttctttgttatcttcttgattattatttttttcttcaaattttgcttctgactgtgtgtttggtgttgttatatctgaggatgtgattttagtttttgtcagttttttttttttgaagtatttgagattcggaactcggaatgagataatttgtatgctttgattggaatccgtacactggtatcccttgatttattactcaacataggttatcgttatggttattttggcttttcaatcaagctattatgtttttggttcgacctatgtgatattttaaccattattcaagtaatgttaccaaaatttgcagttaagaattttggaaaccatagatctcatatttgaaagataatatctaaaatctggaattgagttacgttattgcttaatttttttttttcaaaagttagagttttggttcattacctgctgtagcttgcattactttacgatgttacgaactcttggttcctttgtataatttaaggataattaacacatttgggatattccaactgcaatttgagtctgttttgtttcttgttgggtttgtaaacgtgtagactgtacaccatgcatgaactagcaatgttgtatgattagcttctgaaatcgaaacaaccctttttcacggttcaattgatgaaatatgagtttagcgataattgaacatgttgtgtaaatatgggaatttatcagtggaaatatgcaatgattctttgtttcttatgatctgcccaatcttatactttggtttacattttgcatgctttgaggttggagttagaagagccactttgaaattttaattttggtaaagattgcttttgattgacgctgcatagttacgttttatggcttagtttactggacttgaagaatatgtaacttagttttctgtaagcactaagaatttgatgctaattgttgataatgtgaaaatggtatttcaattttgagatgattctttctttcacctgtttcaaaagttaaccgaaagtactcattgatattgaattcgtttatcaacaaagacgatgggtgtgatgaaatgtaagaacagactcttgaaaatggacaaaactaactatctaatatagggaatcttggaccttgtagcataacctataatgtgattctcttctttcatgtgcatgctgttatgtataaagttgacattctatccgaacagagaaggagaataatgaagctatggtgtttaaggtgctatatggacataattaaaagttgttggtaaattgatattatattttgtaaatagaagtatgtttttgggatactagatcttgcttttaggaagccttgtaaatagaaagataatatgttgaataaatattaattgttaaagctgtgaaagttattcaacttctcagttctttgtttttatgaagaaatcctcacagaaaatgcaatgatgaactcataccttagccctctttctaaaatatatttatcttggtcttaacagggcaaacccaaagagtggacagatgagaagcacagtatgtatcttaactcattagaagcatcttttgtagatgagttatacaattcaaatcgtttgggtggtgggggcgtgaaaaagaactcttgcaagcgaaattcttccgaccaggtttggcagccaaatttgcttcacagtcctgatttgtgaaagggtgaaatatgatcttgcttccatttccctgctgcttaccttgtaataaattataaaattgcagtttgtggtgcttggggatggatgttggaagaagatcaactacgagaagaaaggatctttgttgagtcgcacaactgagtcccacttagtggcggataatcaatgggttcgtcatgttagtaattcaaacaaacgtcgccctctagcatgtcctgattctcaaggacgtattgcagtttgtagcaatgaaatccacttaagagggaagctggtatgcgtatgtggatcaaccaacggtttaaagcataatcctgtatgtcacaaatgccatcaagatatgattgacagcactgcaggtagctctctgacttcatttatcttgaagacctctatcttgttcaagttttttacttccaagtagctaataaagagaaaacttctattcctgttctgtatatttgttcactctctgtgagccttcttttgcatgaatttttaagtcttggttattctatttatagtatttcatgatctttgcattaagactatatgtgaggtcaacctccctatccacgtgtacaattttcatcttcctctttccttggtttgtggcttggttaatttacacagtggccttttaaagaactttaagtacttatactgtttgggcccaaattctgttgtcatttctgtacacacattcacatgatatgtatattatatatatacatatttcatatatagttgtaggaagtcatttcaatattccatgctaaactattttctagacatatggtagaaatgttaccttcatttcctattacacattatcttccatgctgtaaattttaatttcattggtactactaaccattaataataagcctttggcattatatacagtttgttttcttttggttgtccattagttcatacaatgcattgattgctatgaaagttccacgtcaattaactcacaatgctaattgggttatggtaatgcattatatgtgataaagtcaattcctcttttaaagtgttctcttctcctaagtgtggtgtcattggttaattagttaaaattagaaggtcatttactgttcgttgcttccttgggcacagtttaatatgattgctgtgtcagtgtgttggcaggactttacatcagaagcgaaagagtgggaatttaaattaagatatctgcaccacagtttaattgtttaaatgtagttactggactactttttttgataattccctaggtattttttcacgtcataatatgcgtctttttttttagtcatcatcgctaatgaaatagttgtcacaacttgtttcatgttcagaaactaactgtaatggtccataagaaactgaggtgtttgacatttgtagttgttgattctttagtttttccagttcttgggcttatggttccagttatttaattcgtaataatgtattttcttttttttcattcttcagaggtttctgatcagaattttatggaggataactctggagagaaacccaggtgtgaatctgtagtgaaaaggttgaaaacggctgcaagcgatgattccaacagtgatcaagtaattaatatttgcagcactgaaacacataattttggtggaataaattttttcaatctttataattggagtggagaactcacttgtttttaacattttcagattgtgccatcaaacaagttccacgcagcagatgcatcaatttccaataacaaacaaggacgccgtgaattgctttctaagcaccctgaaaactacgtctgcccaaaatctaacagtcactattatttgaaaggaagctgatagtgatttgtgatcttggttttgaagcttgggatgttacgattgacaatgacacagctcaaaagaaagttaaggttagcctcttagcttccctacctttctcgagaaacaaatcaacaaccctatatagctaccctacaattgaaatcgtctgctggatgaatgttgttgccttttaaggttattaagtgttccacacaagttcaaggccaaagaatttgtatatactggagtcatgtccttatacggttatacatagtatgtatggttgcataatatataaatatatataatatagtatgagtagatgaaattactatacaactctgaatgttagtaattcgatataagttttccttctggttagttccttcaattttgtagcaatgtaattctgatagaagcaacatgtaatagaattagaagataagaaatcaattcattggttgtatggctaagttagtttgtttcaatgttgtcattgtatatgatttttattcttctatgcccttaaattactctttcagggaatgcaatgaatgtcctattggattagttttggctatttactgagatgatttttctctttctgtggcaaaagctatctatctgcttaacatattcgcatcgcattagttttatttaatgaaacttttatacttatcaatgtgttttgttgttttttttcacctataaacagattattgatctagtgtaatatctatctcctactctttctttcctacgttcaagcactgtggcctccttctgtctatttctttgtggattggaatacaaatgaatgaaaagtaaaataatgaatctatcattatattgcgagtattagttgatgatacagttttaaaaatgcaattttcaattctgtgaataagatcttatttgggtatacaaaatctttaataataaggtaaagtgtaaagatagtaagatagtgtaacatatccacgaatgttgtttaattaaaggtgacataatagccacaataacatggaactataaaccaatcattattgacgtgacaacatgacacaacaaggtgagggtggagtgaagtttaggtgaattgtttagaaacttgagaattttatttttaaaatattagttttgatttgttacgccgcttattatagtctacttaaaaactttaaattttttttaataaatagtgttaatgtgccagaaaaagttaacgtggtacttataggaagaagaaattttaaatttttcttgttgtataagagtagaaatttaaggtcatttttacgtgtggataaattgtaaattgaatattgatactctcgaaatgatccaagcgactcgaactgctggaaacctgtaactgagattttttaactgagtcaataaaattcttcttattcttcttcttcttatttacttttgtggaatatctgttatgtaacaaagtggtatcagagcaatacactcgtaaatgggactgacgttgcgaaaaggatgatttgtggattatgctcccaccgtggatgtcggctctagggggtgtgtaatgttaggatcctacattggctaagttagtagtataaaactacttcgacactctcctttcttaggctatcttttgggagtgagttctacccaagtggttgtgccataattgcatctttatcttatattttttctttcttaatagtgataatacattttgtaacaaaatttgaaggtttttttttttttcccgcaactcatttgggcatttaatttttctgaccaaatcatctctattaggcatgaattcttatatcatatgccaacagttgatttagcatgattgatatggtattttgcttattttctttttaaaattagcattattaaagtagagagttcaataaaaaacaaacaaaaagtttaatttttttatacatataatataatttatttatttcaagtaaaaaaacatatatataatttatttattaaatatgatagtgatactttcaaaatttttacgttaattttttaagacacaaattaaaaaaaattgagaaatatactagcattaaaatacccatggatatcgatggaaatatatcacattgttgaggctgaaaaataaataatataaactttctagattggcaatataattaataattttaagtaactaatttagagagatacggagaatttatagtaggtcacccctatattgcgatagtaacgagcctacatctacttcgagtttttatttttcacgaaatagtaaccacagtaatagactaagtattagaaactctaaactctagagagagaagctatgatcttgtgggtaattttctaaatataaaaaatgagctaagagagctttctttttataggtcaaagaggcccacgaaaatagaaaaaaaaatcaaatcaaatgttttctaccgttgatgatgatttaacggtgataattagcttctggtagtgatggccaatttttggtgcccgacaggtcccgctgtgggttatctagagcttattttcgtaacccccttgaggtgaattttgatgacgatagcttcataatcacgtctggggtaggagagatgacttgctaaagcgtttaaataactttaaaacgcaagttgaataacatcaatcagataaaaattgagtgagttatcgctgttttactaaaggcagtttaggtctcagtgccaagttgatatctaatgcccaggttgacatcccaacgcccaggttgacatttgacgtcaacctagatgttgtataagtataaaaacatctaaggggtatcctttgagatgcctaagtgatagtttgacaccacttaacccatttataggttttggcaaagttagtcactagttcttagagatgtcgttgttttgcggaaacggaagactcgaaatttctgatttccgagtgagtcaatttgccaaaaaattgaagttgtgaatttgtttgttcatacttcatgaattattgcacttgtgaaaaactagttggacagtagaacaacatcagattatgataagcagaatccaacgaactaggccatttgttgacttgggtgttggaccctttaaactgagctttcgtgattctatttttgatacttttaaggcttctgaacttaagaatggggtctcctctcccgtttttgaccatgtcggattcaatagttgcatcagatttgtcatttgagcaattgaaggcagcgtcccagcttaattgtcaacctgagcgctaggccctatttttagggactcggatattgacattttatttctggtgtagaatgatacactgttattttttaaaaaataaataattttggttatttaaaaagttttatcttatatattgcataagaaaatacaagaaagtttgtttgatatatgttcattattgtgatcaatagacttctaaattaaacaagtttatgtttgtattgtaatttgaatgttttacaaataattttttctaatgatagaaaaaatattcaaatgatatttagattatgtgcatcactataataaataaatagactaataatattcacaaaatgaaataaataaaatgtgcaccatcatcattatttaatttattttatgtatatacttttcttaaaatgtaatagatagatgaaaattaaaaataaaaaaaatatttcatataaaaataattattttataaaaaacaaaaataataataataacagtccacattaaaagaaaaagaataataacaaaatagaaatgtatttatattttctttgcttgaaaaaaaaaaagatcacctgttataaattcctttcttattcttttggtcttttttaacaatctcgagaattacgtaggccgacctaagtatatagtaacttgagtcattacataagattcttatattaaaaggtccctttttattgtctctttatataatatagtaaatattttttttaaatatataatatacataataaatattcataacaataaatatgcacttagcacttaaaaaaaaattatgatcccaatacatataattctaaattttttgtttattttagaatttataaagtatttttttttgtaaaattaaatttatgaaatattgattgatatatatatatatatttttttttaaattgagtttatgaagtattgattgatatatatattttaataaaagactaaattttaatttaaggaaattacgtgaggtattcactttaagttaactattttaatttttaccctctttttaatattttattttttctacccactttcatagttattgtttctataataccctttcttcaacccaaaacagtatgatttaattttcagtatttaatgttaatgtgggagtatattaggcaatctcctataaaagtgagtataatttaaatgaatata

SEQ ID NO: 297823 - DNA, 3381 bp, Cannabis indica
aatctaaacaaaaaaaaaataaaaaaaaaaaaaactaactagctacacttaattactaatactacttcacataatataataataataataataataataataataataataataatatcacatcttatcttacaactgtaatatgccaatataaaatttaaaatataacatatttacttaacaatttgtatgataatattagaaaactattatggttagtatttttcctaaatctcacatatataaatccgatattaatttgtataaagaataataaatgatatggtatatatttctagttaattatgtgtgtaatgatgttttacctgagaaagcagccatcgtatatgatacgagcaccattggcagcagagcaattgtggatttgtttctccgcagctgcaaagcaagcggcgcagtcggcactcgagaggtagttcctgcactgtgccatggcatagacagggtctgatccccgtgcctgctgcgccgttgcaaaccacttatctccctctcgaatctgagccccgagatcggagagagtggcgttcagattggagaagaaatcagcaaagtctgtggcattatacgggctgcatgcttctttcaacagcttggtttgtgggcttgctcttagtgcctgcagccatagccaccacccaataattattattactagttttgaagccatcttttatgagttgaataatagttgtcgatcttttatatatatagagacacaaatatattattttaataaaaacttgtccaccaatgatcagagaagggcgtcggtgtgattagtgctggtcttatataccaataatgaggatatatatatgcaattaactaataatacaattgaaatttgatttgtcacaacccgagcgttaacctgtgacacacatgtattatccataagtggtcacaatttgacccttttgaaaagtaatacttacaagtgagataattgttaaagtcttgcaaatcaacatcaaactaagaaaactctcacatatgggagcaaataccagctgtggaactttctagggacctcttccctctttctctgattcttccagtcctcccaatcttccttggtgatgcatacctaccatctcaactctttgtcttaccttcatcaatgtgttttgccaatcattacaaaacattcaatgctcaacactcctcttcaaaaccgagaactccatttaatgcactcccagagaaccattgtctatactcttccatgagatcaaatctatcatttactctccatcgccattttcaggtggattcgaaccatcatcgcgatttctgcagacgtagacacggactagtgatggctatgattgatctagcccctctccagctttttcatactttcgcttccatgtattctctctgcatttttttctatttaaggtcatgctggcagttcaggtgctttactatccctgtttttgcccctttattccatttgtcctctgttattctcccactttgcatgtcttccacaatgaatactctttgatgatcccaaccattccatctaactcactaccaaggaggcgttgatccatgacttcgatcacgtctctattcacgctgaacctcaaacagattctttttgtctggttgttaaaatattgtctaccaaaccccttaagcctgactggatttgtaacgccatgaaagaggcctgtgtggcccgttgccctttcaccttctccgaatatcactctggaatgtttatggttcgcttttgatgcgaaggtgaccgtagaagggttatggagggacaaccctggcactttgatcgttccttaatgatctttgctatccctgacggttagataccatcttacccagccaactctgtttatcccactttgggttcaagttcattatattccctttggctctatatcctatggcctcgcccaatttgttgctgataacatcggggatctcatcgaggtgcacctatcctccctctatgatcctgtcactcctttcatgaggattagagttttactcgacaccactaaacctcttcatagaagtatgaacgtccgttttaagaaactcgccattaccaagtggctaaagtttctttatgaaggaatacagactaagtgtaatagtttccttcgtcattgtgacacccacttttacctccctcctttgagttacaaggaagcgcttagagcccctgccaaatcgatctactatcagagcattttcgagctttcgaattcaatcccgtttgaggaataaccaaatctctctaatgtctctagccaaggccttcaagaggctgttgatcaattcctcatccaaagcattgccaataccacacttgctaatgtccctgccgcttttcctcccacaaccctggtccatgataccaccactacaccatcttccacacctaatactgtccttaacaaccccttttccactcaggttacctgtcccataccttccaatcctattagtgtacccattgttgttacttcctcatccaaagataaagctcctatgttccctaaagtttccaggaatctttccatcaacccctagccaactcagccaagagctcccacaagcactgccaccaccaagaataagagatcttacacccgtcacacctgccaggtgggctcttctgttaggagcacgctaaagcgagttagggcttctaattccgactttgctgtggtccctaccatgtctgacaatgatgaacaggcggatgttgctaagcaaccccgcctagaaaaatgagtatcataagttggaatgctcgcggattagggagttcccgagcattccataatttctcacttcttgccaagtatcacaacctcaggtcttttttgttatagaaactaagctagctggtaattctagtttcttaactaaggctagacaatattttgttaatgtctttgaggtgccaagaaatggtttagcggtggtttgttacttttttggaatgatgtcgtcaatgtccatactttgtcatactgtatgcatcatattgattgtaatatttccattaatagcaatataaattatcacttgtcttgttactatggatccccttatattaacgacaaaaatgcttcatggacccttttggaccgattgtttgatgttgctcctttcagcccttggttcattttgggggatttcaatgactacctggggcacaatgattgtaatagtaattgcttacccctttccatgctattcataatttccaacactttgtttctaagtacaatctttcacctttaccttttgcaggtaaccgattcacgtggaaacatgaatcccttcttgagcatttggattggggtatttgttgggttt

SEQ ID NO: 297824 - DNA, 3500 bp, Cannabis indica
actcgagaacaacattgcatccgacgccaccccagtaattggaaccttgctccagcaactgctagcaaaagagcaccgcaccaacacatgcagaatcgtctcaggagcagcaaggcagaatggacacgttgcagcaattggaacatgttttatggagagattaaaccgagttgggagactgttggtagaagctcgccataaaaaattaagaacctttagagggagctgcagctgccataatataatatttagtttcatttttataattaaaaaattaaaaatgttaccaaaacaaaagccctaattattttgaaataaaaaccacaacacaaataaaacataataggaatcgggtcgaatagtccagtttgtatgtgggtttctaatcaaatagccccccaaacccttttctttcttcttcttctctctgtagcaaaagccctagcctcgaacccaacccataaccaactcctccaagtgtccgtacagagcgagaaatcatacccatggatttacagcagagcgactttgatcgtcttctcttcttcgagcacgctcgtaagactgccgaagttgcctacgcccagaatcctcttgatgctgatgttcgtatctctctctcttcgtttcttattcattcattctgttttatcttttatggcttcgattgctatttgtatggatgatatgagtcatatgacatttcccatttgttttggaatgtagaacttgactaggtgggctggagctctactggagttgtctcagtttcagagtgttccggagtcgaagaagatgattcaaggtattactttttaatttgtgctgatttgtaacttgctgtagtttaatcgttaacgcgtttgaagattgaaaataataatcgacttgtctataatatcgttctcgatcgttgtccctaatttgggctttgaaacttgtttggttctgacttctgagaaatgaaacgttttttttaagctctttttgaaatttgggtcatgagtttctgattgtgggaaacgaactttgattgctcagatgcaattacaaaacttgaggaggcattggtgattaattctaagaaacatgatgccctttggtgcttgggaaatgctcatacttccaatgcatttttgacccctgatctcgatgaggcaaaggaatatttcgataaggctgcagtgtactttcagcaagcatccgatgaggtttttctcctgccaaaggctatcatgtgtttctataatgatttgctgctcttatatatggtttgtaatataggcttgtttttcgataataggaaccagagaatgaactttatcgcaagtctttggaagtggctgctaaggtacgctctactgttatgtactatgggaaactccttgtgctttttgctgttgacataggcgttttaaatttttattcttttacaacggatatgaaagttggatggttatattttattcttgtggatttaacagtggtactagaatgtagctgaagagaggtgatggtcatgtcttatcattttagaacatttggcatattgaattagatattgaggtcatagagtgtagggaaaattgaagatgtcttcacgtttacaagtgtggttgtacttttttttctccaaaggttcattttgaatgtttttgatctagtttttcttgtagatataggttgaattgttggacagggttgctgaatgttactggacagtattttttcctgtccagtagagcatgaaatgtcatagtttggaggcactttgtagggaattatgtttgtagtccattttgattccctagtcaacctttcctttggttataaacacggattaaaattctttcttttaacactttctaatatgtaggccttccatgcttcttgatttggaatttacttagggagaattgttattattaactatgtaccataactgaagaaggaatggttagcagttctgccagcaagccatatatcttcaaagtggttgagacttgagacctagatttagcctcgtgtaatgtcattctctaaagtgtttttttggtagggacatggctgaaagttgtagttttttattgaatcatctatataactgaatgcctttagtttttaccccaatgactattgcaatcttttgctgtaaactatggttttcttatgtatgtttcaagcttttgagagaaaatttcgtttaaatatagcaaactcaactttataactgtttgttaaactcatcaaacttcgctatttgatactcattctaggccccagaattgcatatggagatccataagcacggttttggccagcaggcaatgggagctgcaggtccttcttcttcttcatcatcaggtgctaaggtaatacttgaaaccatcgtttggcttaagctaccattataattcttttttgggagaagcggtctattggtgcattcctgatcgaaactcttattttgcagactgcaaagaaaaagaagagcagtgatctcaattacgatatatgcggatgggtaatccttgctgtttgcgttgttgcttgggtaggattcgcaaagtcacatgtgcctcctcctccaccgcgataagccaaaggatttgtttggtcttgacattcggtgctttggtagagtgtttttggagattgagcaccattcatgagcttttggaggctttgtagcccacagtgcatgtagaatttagaatcacagttgattccaagatttttcacctcagtaaagattttcaccatgtaattgatgaaattatattcagcatttcccatatgaaatattgatttttcaacagtaattatatggttacaaaattatatattgttaatcaacaccaatgtgttcggtgctactatgaataagattttattttgattggtaattgagattcatttccctgtagaaagtagaaactcaagacctttaatttgtttggtgataattcatttcttgcttaaatgacatattatgtaaaattcatcatgttatttgaattcatttgttaaaaattcatttgaatacttcgttttgttagttgaattggtttattagtagtattaataacttgggtgggcatcaaatcgaatcaaatgttttttatttcgattgttataatccaatcaaattattaataatattgctattgttatagacaaatcaataataattaaatataaattattttcttaatatatgttatatgtaatttgattccattagtttttagttgaattttgacatcatttgctatccaatctaatgcaatcaaaattatttaaaaaaataaattagatttgtttagtgtaattagattaatttaggtgccgtttggtaacgcttttgtgtttttaattttttaatcataaaatgaatgtaaaatttttgtttttagaaaacaaaaagtacgttctgtaactatttttgtttttcaattttaaaaataaaaaacaaaagtgtgttatgtaaagttcatttt

SEQ ID NO: 297825 - DNA, 2110 bp, Cannabis indica
ctttggactgcctggacgacaaccaagaatcggtttcaaggtcaaccggtccccaatgtttcctcttgatccaactcaaggcctccttaacccctaccaattcagccatagccgaatccacacgccccactcgtactaagcaccctttaatttagcaatctctatatgtactaagcaccctttaatttagcaatctctatatgtactaagcaccctttaatttagcaatctctatatgtacagatcataatgccgagggcacacaaagagaaaataagtattaagcggttaatttgttcttggatagaaaaatattatttcattttcatgatttgtcaggaagattttgaatgtttatcaaccgataatataatatatttgttgaatgtagcgcctaattgggtgggtaataatttattaatttcatcaataaatttctattatttttttaattataaaaggcgcatgcatatatatactgcaagagaagaaaagatagtcatttcaatctattaaattttcctgaccaaaaaataaaaactataataatgtcctaaatacgtaaatgacatgacacgtggcaaaacatagaagtataattgaaaactatcatgaaaaacggcaaaacttataaaaaataacaaaataaaaacaacccatatatgaatgaagggcggcgaaactgattaagaaaattagagcgctgcagattattatttttgatccttaaacataattaattaatcaaattaatatataaaaacatggattattaattaatagccaacagatttgaaatcaacgatttctcatgcatgtcctctctgcgacggcgccaaagatatatttttatcacttagcctagattctcctagaaaaatatgatcacaaaagtcaaatgaattaaccctataaatgcacattaaaaacctatgaaataataataaatctcataaatttaaaagaaagaaaaaaaaaaaaatgggtgtaccaaagcttcctactatcgatttgtcagtagaaaaattgaaaacctcgtatttaggtacatgcaaggaagttcgtgaggccttagaagattatggttgttttgtggtgaattacgaggatgtttcacaccaacttcatgaatcactcttaagtgaatctaaaaagctttttgatttgccaacagatgttaagatgagaaatatatcagataagccttactttggttatgttggaaaccatccttcgattcctcgaaaccatgaaagcttaggtatttcaaattcaacaattttagaacatgttcagactttcacaaatctcatgtggccttccacaggaaatgaaaacttttggtacgtacgtaataattaattaattgatattatatatatatatagtttgttttatgaaacatataattaattatataagtttattatttgttttgtagtgaaactatgattgattatgcgactagggtttcgaagttggaaaaattggtgaagagaatggtgtttgaaagttatggggtgggtgagaagtgttatgattcacacgtggaatcgagcactttcttgttgagattaattaaatataaatcacctgatgagttaaacaaattagagattggttgccatgctcatactgataagtcattcttaacaattcttcatcaagatgaagttaatggtttggaaattcaaactaaggacggtcaacattggattggatttcaaccctcaccttcttccttccttgttatggcaggagatgctttttttggtcagtcatatatatataattaattattattattgttacaattattatttacttccaacaataaatatggttcgaaatttggatttgccctagatagatgtatataccctcaaatttttattattatatataacagaattttttttacgaaataattattttaattttatgcctattatctttaatttaattaaaacaataaaagagtaaaaaaagtatttatctatttaatatatagtttaaatatgataataagtacatttctttatatattaaaagcgtctatctaacggtaatttttggtttaaacccaaaaattaaacaatctttaaatatt

SEQ ID NO: 297826 - DNA, 2190 bp, Cannabis indica
agagggattgagggggattgagagaatgagatagaaattgagagagattgatagagaatagaagagaatcgaagagagattgagaagaagggggctgggaggttttctctgcaaaacctgaaaaaaaaaaaaaaatgaaggagaagaagggggcttcgtgctcctgattcatatatatacttttaccggcgcatccaattgcgccggtaaaagtgtttaaataaaatctgacctaattagccaaaacgcgcgtttaagtaaatacttttaccggcgcaattgtgcggtaaaagtatccccacttatcacattaaaatccacacgtttcctttaacacttttaccggcgcaatggtgcgccggtaaaagtattcccacctaccaaggaaatcaacgcgggaagtttccctctattttttttttggacttttaccggcgcaattgtgcgccggtaaaagtgaacaagcgccataataaatgaaatgaaaggcggcaaacttctcgcgcctgttggcgcttcattgggtcacttttaccggcgcatattcattattgcgccggcaaaacgttttaataccggcgcaataatgcgccggcaaaagtgaagcctaaatgcaagtggaatttcagattttgctgtatctcgacaacctttaccggcgcatttgacgaactgcgccggtaaaaatgccttttcttgtagtgattaaccatgctcttttagctaagctcgcttggcaactagcgagcaaagttgacaggccgtggtgtaatgttttcaaaggcaaatattttccgagagactctttttggagtatacaagagaagggctctgacagtttcatctggagaggcattttgagtgccagaaaaacgatttgcgatgaggcttacactgttatagcatcaagggaggatgtggatgtttggtggcagccttggataccttagttgggttatgatgactttcgagaattgatggaaagcattagatccaaagctcctagtctaagatgcggggctagtagatcaagaagttggaatttgggttatctttgcttccaaatagcaaggaatgcggtctgtgacactcttatttggaaagattctatggttggaaattttagtgtaaagggtgcttattgggtagatcaaaaggatatatttgggaactatgatgcgctttggagatggatttgagattcaaaggttcacccaaggctgagtttgatgatttggagggcctgctccgatgttcttccaacgggcgacaggattctatccttggaggtaaactcttgtcctgtgtgtcactctgctcctgaaacctctctgcatctgtttactaggtgtaattttgcggttgcactctggtttacttctcctatgctcgttagaattgacacaattcctggtaacaatatttctgaggtcatccgcaatctgtgctcttcgttggatccttcttgcagggtcaaaatgcttggttgtattggggttattttcgattgcttatggaaaaccaggaataagttcattcactcccttgcctctatcccttgtttggactctgttagaaaagaaattactagcagatttcatgaaatgagtactattggtgatggagttcctttgatgaaatctaaccaattgtcgacgaccgtttttcctaaactctatacggataaatgtatcctggtggacgagtcctatctggatggaaggtttgggtgtgccttgttgtctttggtgaggggctcttttgattggtggaggtgttcctcctctagtgcgtgtgagtcagcactggaagctgaaatgcaagcgatggtgcttggtcttcagtgggcgtctttgaatcattgggataacttatccctcatctcggattctaaggtcctggtggaggccattcgtgtaaagagagcacctcattggaagtgtactgctttattttcttttattttacatatgttatcatcttttacttactgctgtgttgttttcactaaaagagactgtattgtggatggttaggccaaggctgctcgaatgtgtaatgttgagtggcagaactctaaaggggagggatttctctctgtgaatcccaattccttttgggctttaatctaagcggaaccgaggttctttaaaaaaaatatatattgtaacaccctaactaccttaggcg

SEQ ID NO: 297827 - DNA, 6193 bp, Cannabis indica
gtactacgatatatctaatactgttgtatattattaaatgatctaatatatttatttattttgttacaatatcataatatgacaataactaaaaatattatgtaacttaattttgttattatatatatatatattttttaaaaatatgtgataaatctatttttataatttttattatctaatttattagatttggcctatttttttaatttttttaaaaaatagacatttactaacttagtaactaaattgagagctattttgcatctcaaccctaatttttaactgtttttaaaatcgcaattatcttttgttatttgtttttttatattatttagttgcaacttgaaattcctaattaatttttgtttgagagtaaataataaattaaacacagttttagtaaaatcaacttatatttactgctatactaaaataaataataaaaaaaaaataaaaataattaataaatttattgtgacacacaataggcatcaattgacaactatcatagcagccggacaactatcttaggagcagtgtatatgctcatgtgggtggtatgcacaccacttgaccccctctttttttcaccaaaaagaaaaaaaagtgtttcaccaaaatcataccaaacaattttttttttatattctcattcctaagaatctaaactaataagtgcatgccctcctccaagctccgaacccaatcatcctccttgcattgcttctcttgacaatgaaatcaatatcacaagccaaagtagctattatgataaccttctcaactcaactcaacgtttcaatttgaactatgtcgtctagggtataaatcatttataataaaataataaaaactcctttgggcacctgttattttcaccaactaatactacgcacatatatgtatttggtttggtagttggagtttaaacttgaaatatgcgttaaaagtctaaattacccttcatacagccaccacaccgctgcgcgtgtcgtataacaagtaagcggaacaaccatggttggtcgcaatccaattaaatgactattatacccttaaaataatcatcaaactacactcagatgattcattattttctgagaataggagggtattaaagtaattcaatttcagaaaaagctcacccgaaatctgagaaggtcctaacacgtcaaccagtttgttgttttctaaattttcaaaccttttgactccctctggctgtctctatcaacctttataaattagatttatgtaaactagaaaatgaacctcgttatttgtgtcgtaacgttcttctcagggaggatgtggggagaacgaagaagctggatacaggggagagtttcttttcgaaaaacagaatgaagaattttatggaaaagatctcacctttcgaaaagggtttctgggttttcgagtttaatccttaagctttaatgggaaattgcttggaaggtcgttctaaagtggataactctctcagttctcgaacaagtacttctggtaaaattattgaacccagttcttctttcctttctttgctatatatattgcatgcaataaaagtggttttcttttattgttattatttatttcattgggggcttgaaaatggccaactttatgtgaagaatccttattcatatctctatacattttgtattgggtttattaatgaaatgagtttttgacattttgttatttaagtatcaccagtaagtagtagccatttgttttctattcatgtagtttgtattggttgttttagagaataaacaaaaattcatttctcttttcgctcaagagttgtgcttttcagttacagaaagttgcccagatgtctttcgtattctgtcttcattcatgtggtgtgctaacataaatgatggctttttttttttttttttgctaagaattatcttgctaaaatgaaaataatgatacatactgtgctgtgcgagtaaaggtaaggttcaattgtgtcaaagtttacaggtttatactgtttggataatgaagtgacactatacttattggaatttcataattttttcctattattttagtagctacctttataaattaatttttgcatttaatgattgtttatttgatttgaatgcctttctttctttttttctttttcataacaatcaatttgaatgcctaatttgaaactttgtttttagtactatatataataacagttatggtttaactattggaagagagaggctcaggcttctctggttaaatgtcgttttagagttattcacactattatgtcatcaaaagcaaagaccccgcctagagtgtcctgtttattcttttttttttaaagttctggtgaaattaatttgttataattgggtggttggtcaaggtacaactgacaacttaattgcaaaaaacaaattgtgataactcataattaagttcacagttgtgcttgcagaaaccttcaattgcaaaacatttgattttatggtgtggtggttgtaatggaggtttagtaggatggtcgtcctcgatgcttgtaataaatgtaattcgcgacatacacaaagacattttattttctgcatatatttggctgacatggtgtatagcatcttggaatgattttgattgggaaatataattcttgtggccaggatagtttggcaagaattgtaggaatagtaatgcagtagaaatggaagattggattactttcttgaattctatgatgatgtccttactttcatagctcacatcttagatgcaaattagtaggctctaaaatctttgattttcttgtattgacttttcagaacttgaccaaacacaaggttttgttttttttcttaacattaattcttccactggattgtggcaaaatgtaaacatctttgatgttcgttgacctctgtaagtcttattgtaaagtgtgggttttgttctctctttatgtgtttttagtatatttatcttaaaagacataaacattcatcgagatgaagcgaaaggaaaggaatggggagaaaacttagataagaaagaacatctgaagaatataggttaaaattaatagcatggtaagtgatttgtgaaatcttaaacttcattatcatttcataaaggagataagcagtcttagtaggtgtgcgccttttaaccttgcatgtttcatagcagttagaactaacaattgacagatcactaaagatagtttggaaagctatgggcctggaaaaacattggccaatatgacacaaattagaaaacaatcattggaaattttcctctataggaccattactgtagactgtagagtgcatataacagcctagtattggacctattcgttatcaatacaagtaatgtctcatagaatttgaattactacaattcaagaatttgtcttctcaaataaaatatagtgtttgtggggtaactctctgcctttatctgggttagatatctatcttatgtgatactaatgatgcttgtatcttttatcattgggcctaaaacatccataggttgataactacgcactctggtagctaaatgggaaatgccttctataagacttgaagttgatacatgcctcgcaatttggtacttaaataagaaattccttcgtaggactcacaattgatttgtccaaggtaatgctctactaagtcaccatcattagactcaatccctcaaatgttgggataataatatcgctggcaatgaaagaaaatgcttgagagcatagtttatgttgatgagtcactacatgaagatgaatttccttggagttttttttaccctaaaagtactatatatcttaatgtgtaattaaagggttaagaaacatatgcacattcttttaaaaaaaaattatcttatagattagagcttgttgtcgtcgtgatgagtccaaatacagtatgttgttgtaaatgaaagaactttaagtgttgtcgatgcatacaaggcagaaaggtgttttcattcaagttaattctttaggcactgtgagaaacatatcataattgactattccccttgttcctaggtcttcttgatttttgtgaaaagaattcgggtctatgtggttcggattttcctctgtgtgcattgctaagtccctagttattatctactcatggccctttcagttgcatcgtcatttgctttcgtatccttgttgtctaaaatctcagttgtttctagattgaactacagtgcatgtaaatcaaatgaaattaccaaattggtttcttgagacaaaaaagaagttaaaaaaattataatatttgaagtgtgcttatccatttgttaagaaaggtaatgtgatatgagtaagagtatagtttcattaatgcctagttgaaaatgactatgctctggtaatgttgggatactaagtgcatctcagcatagtttatgcacactaatgttagtaataagtgcattgaaacatagtcacttgaattagtttcattagtgtgcttatccatttgttgaaaatgcttgagagcataatttatgtttacgttaaaaattgtggtttgatgggaaatcactttaatttagttatcaaataaatgttggccctgagcttgcttttctcgattgatgtgtatttttgtgtaaaattataatgacattgacatgactagaagtcaagtagctaaacacagatcagtacatgacgagaggagctggtgctaaaaattttggttggctagacaatcgttggaatttgttattcatgttttgagttatattcatatgtcacattgttgatgttgatcaaataaaagtttttctagacctagttttgtggttggtgtatgttacacttcattgcttaagtttagtggttgatttagttttgttctgccaattgctaattttcagctgttcattctcaagaaaaaaaaatactttatcattaaataatacttacattttgcaggaaccacacagagtgcgtataaaagtagcaattctttgagactttcgaatctgactcttcccacaaacagcgaaaaatccacatcaggaagtcttcccactcctaggtccgaaggagaaatattatcatccccacatttaaaagcatttacattgaatgagctcaagaatgctacccgaaatttccgtcaagacaatcttattggagaaggtggttttggttatgtttacaaagggtggattgatgagcacaccctaagtgcttcaagagctggaagtggaattgtagttgccataaagaagcttaaaccagaaggttttcagggccataaggaatggttggtaggttccctttattgtttttaattgtcctgtaaagcagtaattgaaaacattttacagtttagtagaaagccggtaaattttaaattaatatctcttaatctgtaatgctggtctggttgcagtcggaggtgaattatcttggtcaacttcatcatccaaatcttgttaagcttgttggatactgtgttgatgggagtaaccggcttctagtttatgaatatatgcctaaaggcagcttggagaatcatctatttaggagtatgtcaaactttcttttttccttttatagcaagagcgtttataattaatgtgcatgctttagctatcactctgctaaaaaacaatgaagaaaattgcaagagcgtttcatttgcaaagaaagatactttatggcaacaatagttataatctcttatctaattaataattggcacactcctacttgagttatcaatttacttatcccaataaaaaggaatgcaagctagtatattaattaatagattactggttctttctgcaaggaaatgtaaatttctttattgggtgtgtgtgtgtgtaatctataaatgatctatttgcacttcacaggaggtgccaggccactctcttgggctaaaaggatcagagttgctgtagatgcagctcgagggctgtccttcctgcataattctaaggagcaagttatctaccgtgatttcaaggcatcaaacatcttattggattcagtatgtcttgttaattattagtgtatgaactgcttcctttcgaatgcacatgtcctgttataatctatgtggggtggtggggtggggttgggtgatggacaaaagggagcaaataatgagaaaacacattctaaggttgcgtttggttgggaggaatg

SEQ ID NO: 297828 - DNA, 1604 bp, Cannabis indica
tttaaaaaaaaataaatacaaatgttttgtagggatacaaatattgtaactcaatatggatggtagcctcgaaaagagctcaccaaccaccgtagacttgtctgttagtttgtttttctacaatattaattacaatattattttttgtctggaatatttattataatattagcgctcttaaaaacacaggagctgtagtcattgttttatattttattggaacttaaaacaaataattaggaaaacttgcctattgttttatatattttatattttattgtttgttgctcattattataattatattctccaatcagaataattacacttttataattattcaattgtaaaagtcaagtccacactacattcatcaaatattactcatttcatacttttttagattgattactactcgtcattctggtttatagtattcaaaatcagtcatcttgatctgcaacaatggctgatgctgtgatttctgctatcctcaatcagttggctttggtcattcgtcaatatggtgaaaaaaaaagtgaagctggtaatgggagtcgatggaggagttgaaaaccttgaagcaaatctgatagccatcaaagcagttcttacagatgctgaaatgaagaagctgtgaaactctggcttgaagatctcaaagatgtttcctacgacatggattctgtcctagatgagtggaacactaccattctcatgtcagaattagaccaaggaggtaacagagctgaaagtagtaccagtcagattactaaaaccaaggtttggtgttctattctattctcctgttttaattgtaccaaactaagtcctccagtgatcatttatcgtcatcacatcgctgaagaaatccagagcttaaaccagaaactagggaggatcaacgatagaaagaacatgtttggttttagatcaaacacgattggcgatactattgaacttaggcggccagacttcaccacctcctttcttgatgtgcctgtgatttatggtccaatggacaataagaaaattctgattaatcaattaacactgggtgggagtagccaagaggaacagggactcaaattcattcccattgttggaatgggagggattggaaagaccactctagccagaaatgcttataatgatcctgcggtgaagactctttttgggggtaacatgatttgggtttgtgtttcagatccatttgatattggtaggattgccaaagaaagtatcgaacaactcaccggtgtaatccccactgtcatagggtcagagtcactaatgagaaagtttcatgaagctgttaatgacaagaagtttctactagtactagatgatgtgtggactaccgactatagtaagtggcttttactagtgcaaattttaaagtttggcgcaattggaagtagagttgtggtgactacacggaacgaggaagtggctgaaatgattggagatacaaataatatgatttgtgtgaacaaattgggtgaagaagattgttggttgttgttaaaagaaatagcactttccaacaagacagaacaagagaagcaaaattttgatgccattggtcgaaaaattgcacgtaa

SEQ ID NO: 297829 - DNA, 1090 bp, Cannabis indica
tataacgaaacaaaagaaaaacatcaaggaagagatgaataagaacaaacctgtagagaaaaggcaatatctggttgaagagaataatactcatggaggacccaattagtccgttttccaggagaagtgccttcatggaagaccaaaatcctcttccttccattacaacctttggttttgcgttccttaccagtttttttccagaaccctgttttagtcgtcctgtttgacctgttattatgtctgttcttataatttggtcgacacaagaaccaccattccatattcgattccatcttagacaaagctgaattttgatcaaccccaaaagcacacacaatattaggatacataaaagttattctaaaaagcattataaatatgtatggacttacgaggtagttcccatggctgccattcgcagaaatgatcgatctgggcaatgcaagaatcgagatcggattccatttccatagtcttaagattcaagtgagcgatcagttcttcctcggtgggtttgaatttgaagaatgatggacaaacccaaagtggtgattcattgacgtagtcactcatttattctcttccctcccaactttgttgagtatgatttgtgtgatttgagttgggtttcgctctctattgattattttcagtgtaagcacgatgagcgatgagaagtgggaatggaatggatgattttatagaagtagttttaggcctcccttgcttgagaagttgtcttatggctcattcatgttttgacaagtggcatttgaggaaaagagccaatgaggtgaagcccttgttggatactcttgactgatgatgtaactgtacagtgatgatctccagtccatactcttgctctctacttttggacgatatttcgtggaagctgggatgggaaaaaaataaagggtaaataccattttagatcttgtgttttgtaaaagttatgaactgaactttctgttttgttaaatgaaaaaataaatcctatattttttaaaatagtaaaaataagatcctaagtttaatttttaaacattttatttttcaatataactaactttaagataatttttaa

SEQ ID NO: 297830 - DNA, 3736 bp, Cannabis indica
ccctgagaatgttgatacagcagcatctacgttacacaaatagtgatttagccagagatgtactaggcgacctagagaatctcctacctatgtttgtcaaggttattccccgggaatacaaacgtgttcttgcaaagatgaatgctggggaggccttaaaggtggacgtggaggtagttgctaaagatgacgaggagcaacatgatgagactgaattaatgaaaaaagatgcttttgaagagctaaagaagatggcatctgcatctttaaatggaaaatcaattcaggtatgaagcaactgcagtatctttttatcccttcacttaggttgctgttataatattgttggtgtaacttgagttttgcaatttgcagaaagttgaagaagctgattcatcaaagaggcctagccaggttgataatgctgtgaaacatcgtggttttatctcatatgaacgtgagggtgttaaatacagggatccaactgttaggatgaatgactggaatgaagtgatggtggaatcaaaaccaggccctcttttagaaactcagtctgccaggtgtatggactgtggtactcctttctgccatcaagtaagcaaaattttctccttgctctcttcagtcttatcttccaaacatagttgcttgtcttttctaaagattgttgaactaatctcttgagaaattatgttcattgaatttgcaggaaaactccggatgtcctcttggaaacaaaatacctgagtttaatgagttagtataccaaaataggtggcgtgaagcattagatcggctccttgaaactaacaatttccccgagtttactggcagagtatgtcctgcaccgtgtgaaggatcatgcgttcttggtatcattgagaatcctgtatccatcaaaagtattgaatgtgccatcattgacaaggcctttgaggaaggttggatggttccaaggccgcctgtcaaaagatccgggtatgcatttttcttaacactgatattttggtggattaggttaatagtaatatcttaattttaatttcaagacgctatataacatttttcaatccaaacattaaatggggattcattgttttaatgttgcaggaaaagggtagctattgttggaggcggtcctgctggtctagctgctgctgatcaactcaatcgaattggccacactgtaactgtttacgaacgtgcagacaggattgggggtcttatgatgtatggagttccgaatatgaagacagacaaaatagatgtggttcagcgacgggtcaaccttatgaccaaggagggtgtcaacttcgtggttaatgctaatgttggaaatgatccattatattcacttgaccttctcagagaggagaatgatgccatcattttggcagtaggatccacaaagccaaggtaatttgatagttggtcatatctgtacactacagctctaagcagtacacatcgactagtttagcttaattagcaaactaattcattttattttggctgcagagaccttcctgttccgggacgggagttatcaggagtccatttcgccatggaatttcttcatgcaaacactaagagcttgcttgatagcaatcttgaagatggtaaatacatttctgccaaaggcaagaaaatagtggtaattggtggaggtgacactggtactgattgcataggaacatccatccgtcatggctgcactagcattgtgaatttagagcttcttcctgagccaccggtaaccagggctccaggcaacccttggccacaggtaataagctgctctttttgtatttcaatctaatttgcattatgctattccattttcattagatttctttggtacttatttttgtatctccaatattgcaattcgcagtggcctcgtatcttccgtgtagattatggtcaccaagaagcttccaccaagttcggaaaagacccaagatcttacgaggtattaaccaagcgattcatcggtgatgagaatggagttgttaaaggacttgaagtggtacgtgtacgttgggagaaagatgcttctggaaaattccagttcaatgagatagagggatcagaggaaatcattgaggctgacctagttcttctagccatggggttccttggccctgaggcggtaagttatccaaaaaccgaaagatctctacgcttgtgagatttaatttgatgcagaaactcaatattttgattatttgatttcagaacgtagcagagaagttgggattggagcgagacaaccggtcaaacttcaaagcagagtatgggcggttctcaacaaatgtggatggagtgtttgccgcaggtgactgtcggcgtggtcagtcattggtggtgtgggcgatctccgagggtcgccaagcggctgcgcaggttgacaattatctcaccagagaagacaaaatcgaagctgttagcaacggagcccctggaaaagatattctgaagatgcacaatgatttttcgaagaggcaacaagacagtagcagcaaacacacagtgatgacataaagcagtggcgtttcggttgtagaaatgatgatgacgcgggagcccacgggtcactggagtgttatacagaggtgaaagatttgtagtaagaaatatggtttgagagtgggagcgtagtttgttagatatatttattttgttgatagttttagccgcctggttgctccggttaagctttttttggtttacaaggaataatgtacagttttgtttcttaatattgattttagaacattttcacagaaattttctagatctttttctagtttatcaattaatggaaatttctgatattcttctttatgttatcttttcattatactattagatattgtttcttttattagtgtttttaagtgattactataattctcccttactcgtaatgtttttttaattattcaatgacaactttagagtgcaactacacacaaaaacaatatgaaaagaaaatgagttatctcactgaataatttcaagctgcaacagtttgaatttttttttgttcaacatataaataaatgataaataaacataagagtttatataaataagacattaagtatagaaataattcagaaaacatatcctatacccagaaaatacaatcaaagaataaggctaattcgtgcaggtagattttaatgaatttcagtgttaacattcttcatctgtttttgaagttgaaggtaattcaataattttttcttccattttcttctacgaattctcttctacttctttagtatttggtaatgcttcattttgcagtgaccaccatgacgaagcttacccaataccatattttttgagatataatacttttgcagttgcaaggttgcaccatttctatccttttcgttaagatacactgtatcttcttatcgaatttgctacgtagatgattttgcacgaatacgcaacacacacagccaaattctcgaaagtggcttattgtaggtttacagccccacaacttctcaatgggtgaagcaaaccctaacttttcttggggaagtatatatcacatgagttgctgtcttcaaacctttggctcaaaatcttcctggaacattctccgcgtgtggcatgcttcgacatgtctttgcaagatgtcaatttttccacgtgtcaattcttcctctcggctactccattctgttgtggcctatttgtacatgtgaattgatgg

SEQ ID NO: 297831 - DNA, 4902 bp, Cannabis indica
gtttcttttctatgtttggtagacatcttgataatcttttcaaacatgcccaaaaatatacatacctcaggtatattctctattttattgacaatcccttggcatgaatttctatgccaacttatagtgagtccctcgttgatgatgctaattcatcaacatctaggaccctcgtatatttttcccgtcattatcactaaggttttactccttagttcatacgccaccattgctctcttgcaatcatcactatcttcatacttggttaatcactctaaaacttattttacactcaattatatagttcgttgtttaataaataacctactttgtgatccaacattcaccaatcacgcaaatacatgtccgttaaattgcatctcaattcataagcttttctccattttgggtgagtgtgcctttctataattgcttaataaagtaatctttttccagaattttaatggtctccttatatatcatattaactatccagccaattttgaataataaataatataaaatttggtgtaatttttagtgttgtgattgtaattgaaaaaaaaaatagtgttgaaataataattttttggtgttgatttaacactaaatttaagttttattattggggatggccttagaggagctaatcaggatgctctaaaattgaactcactaaatgaaagcttaattttatcatttgctttctataattttaagattgagttatcataacactcatctagtggtgctattccaattttgtaatatttaagcattaaaattgaggaaaagttggttattgttattaatttgtcattcttaactcttttgaagtgaaaatttaaaaatggtgggtgaaacagtggtataactctaaaagtttgggttcaagaatgacccaattgtgtcaggtccgtaaaagaccatcattcaaaagctagataaatccacatatatgtagataaaaggttttacttctaggccaggccctttcctaaaagtccaactttacacagcacagcttagaaagctgttgaaagagcaagcagctttttttgagtgcatcataaagaaaagaagaaccaaaatctaagtgcggaaaccctcaattataaaagtgcagcatgatacagagcttttatcaagctggtaaaagatcaatctttgagttcagaaaccacttttctatttctctttttggattttagtcattagctgtgagcatcttccaaaactgggaatatattcttgtgctttatacttcataattaatgtctctgcactcaaatcatgtctgttaagattattacactattatgaaggactatttggttaagaaaccttcttccttaatacactagcaaacccaagcccatttacatacctcacgaggaaaagtgtggaagtaagtacttttattttgaataaataagacatttttctttccaagacttttgtaggattttgttaatgaacttttttctttctgatattttctttgaaaaaattccaccaaactattacaatagtttcaaatgtccccatatcgaaaattcatagaaaaagtagccataactccatttattctatgtttggagtgattaaataacttaaaaaaaaaaaaaaaaaaattaacaaaaaaaaaactgtgggtgttttatcctgtgttttgtcctacattgctaatattttatgaaatttatattatgctatatttgagtggcattaaatctaccaaaaaaaaaaaattgtttcacattgctcatcattttgttgatatttggtgtgattaaaaaaaaaaactcctatttattcatttttttttcctataataatcataataaaactccggtttcaaaaaaaaaaaggggaatcaaaataaattaagataaatagcactaatttttattagataaattagtacaaaaacggtaataatgcttatcaccaaggttttgaggtagtgacaagttctctttcaaaaaaataaagtagtgacaagttgacattgaatatgtggggtccacgaccacgtccacaccaatgaagtaaataaaacctgcaaaacttggccaaaactccatgtggatataacaatatgagttaggcacatttgcacgtgtaaactagaaggtggtgaactatatagctttctcaaaaaatatttatgtctctatactaaaccctaataaattacatataagtatagttggattggaagtgttcaaggccacgtattgaacacaatgaatggacttttgttggtccaattaatagaatagaaaagttaaattaagtaaacttaggcagtacccaactcaagtttgaacccaacaaagtactcatcttcttcctctagacatgtctaccacatctaaattatatttagaataagtcactttctaagatgtcatcattaaaaaaaaaccgatttatattatactattttagtcaaatttaaagagaaatgtagaagttagtcagagtatccaaaggtgcttaaattattccaatttggtaatattcaaaacatataataaagcatagaaattaggaatacaaattagtcagaaataataaatattaaacacagctaaccatgaggagtggcacagtgagttatatgaacatatatattaaatattattattattaacactatatagagattctctcttgcaattacaaatgtgaaaaatatcaatatattcttgaatctttttcaacaaaaaaaaaaaaaaagatttatatgtctattcatttgtaaatctatatcgagtttttgtggacttaatatatctaaaaaaaagaactaggagaaacaaataataataaagaaaaagtgaaaaattaattttaattttaatcacaaacagttggtgagcatgaatttatgatacccaaccttgtgtttttccagaaaatcaactctggatcgagcttctctccagttctggccggttctgatttacaccttgttagtatgaggggtcgttcgaaccctgcaacttcctctgttttcgattcttcttcttctaatactactttttcattctctgtgtttgccgactcggacactattttctcagttgaggttgttgactcgtcaacttcttgggaaagctcgaacttttcttcaatctccgtctgtcttgattcaaaagactccaattttgagatgggtttttcttcattcgaacaatcttcttctctgtcttggtcttcatcgtcatcgtctacttgttcgggttcttgctctgttttttcagactttaatggcgaaccccagaatctagaagctaaagaagaagatctatagggagcagatctacaacgagtcaaaaggaaagcattcttaggtggagtggtagaacaagtagtagtagttgtagcagtagtagtagtagcactagcaaatatcttagcttctctttcttcttcgtctgaatcttgactcttcacatcgaatctcgaaccaatcttacaggtttcttctctactcacaacctttcttcgaaaactagcttgaaaaaacgaacaccacttgctccaaactggactacacaacttgggtctgaatttctctgcacaataatggtggcaaaacagagctctcggaatccatctacaccggcaacaaaccgagtcctccaccttcgccggagctgactcagtccggcgaggcttggtgggtttcttttgtttggaagaccttctgactcgaacttggcccatgcatgtaactttaggagaagaaggctcttgagtttcaatggcggaagaagggttcttcttcctaacaaacattggactcgcacgtgaccttcctctgcttttgcttcccacattggttcttagaaacctcatcaatggaggtgggaacttctcggttcgacccggactggatataggtttggtggataacttcatcttcaacttccaaactctccaaaaatccaaactttcttactttctctctctgtgattatggtttgagcttttctgtctctatggattaacagagaagatatgaagaagagaaagaagatatggatggtggtcctttagggggttttgtttgtttatgttttcttaatttttttttaaaaaataataatttaataaataaataaataaataatttatctttacacggatgggtgaatcgactgtgaagattttctatttttcgaggtggtgtttagtgtagttttagtagtctttgcagggttgtatttggctggttgtgctctggtggtcagtcaattttttatactattttttagggactttgttttttctaaataaaataataataaaaaaatttactgaaaattgggtggcaaaagtaaaaggaaaatgaagaattgaaatttgccattgtgttatggagaactagaatatttttttttagggagaagtagaatagttgaattggtgaagtttgcaagataaggcaaagtgcaaagtgtttggcttgtccactcaaagttactcaaccattcatgattggatggtgattgatttaaacttttgtttttttttccctattgtggttgatgcaacttttttttttttttgctaaatgttgatgcaactttttaatgtagacatattgaaacattgacaaacaaacaattttcttactatttgttttttatttttattaacaaaatgaattttgaaaaaaaaaacaatatggagaaagtgaaatataagagtcaattactatataatttttatgaccgaatattttttcaggtcaatattattattttatagtttctgatatttcaatttaccatatatgttaaaaaaattcaaacttatttctaacgctataaagtattcaaaaaatgtcaaaaatttacaagaataatattgtaactataactaaca

SEQ ID NO: 297832 - DNA, 1888 bp, Cannabis indica
ttgctaccaattacaactcggatcgttggtatagctagctagctagctagataatccataaaacataaaagtacatggtcgagatatctaaaattattgagtacattatatattctcttatttttcttacttcaaatatattagatctttacaaatatataggtagcttcatccattaataattcactaatatatagttaatctttatgtggtggacaaagttatacattttcgattcttcatttgtgaaataacgtacggagacagagagtgtagcaagcggcaagcgcgttaatttgatcaagatcaactatatatatatctttggtaatatttcgatcttttcaggaaaaaattgattataagatggtatatatatacctgcataattacgagattaaataagaaattattagagtaacataaaattgggataacaaatatataacacataacaacacaggtaggtgtagtagtgtttaaagaacctttattttcagcaaagggctaagtaagtgatcattagcataatgatagtaaattatgtctctctatatatatataccttttaagtttgagttttgaaatgacttaatattaagtatgttgactgggctggcttaattgaaggtggactgggatattatttgactgctctccattcatgtccagattgtaagaaacaatagtgaagttgttttcgcttgttgtcgcagtcgtagtagtcatgtcccttgcaccataaacctgcgaaattatctatatgatgctacctcttaataaagctaataattattaactagagcaaaagtaatactgtacttatattaatttatatatgtaaatttattttgacaaaatatgtatacatatgcatgcaaagagccacagaaacatgcaccatataacattatatataaatatatgtgtataccttattttgcaattccgtgttttgttggctaaagtgatttatcttcttatataaatcaacattttcctgatgaataaggttaccctgtcgtatatgaaacatccactaagactgcggacttgagactatatgtacatattcatgtgtatataaaaataaatgtatattaagtggtgaataattaaggtatataagtaacaacaattataattatgtttatatatgtatatcttgaggaaaataatatgtacgtacctttcggcttagctcttgtatttcatcggtgagcatttgctccttcaggagaatcaattaaagagtgttaattattggccaggatattggatataaaaatcaaatgagtatacgattttctgacctttttcatacgaatgcctttgagactcaattccaactggttttccagattttgtagctccttcacgctcaaaccacaaagttctttccccattagttgtctgtaatttatgtatattaatataaatgtgatcacaattaattctaaaattatgcaagttaatcaattatgtttatattcatcgtcctcatatattttttttttttttatttattattcgtaacagatcgaatcgactgctttattgattcaatgtataagctagtttacgtatagaatatatgagtagctattgaatgagagtgaaaatagaaaacttatggaaaacaatgcatataatgagaaaaagaaaatatatataattaacttgtataattcatgcttataatcatttatatgaaattattcaaaaagaattcaaccattaacacgatataaaaatataataataatatatataaataagtttatattatattaaatgtggttaaataatagaaattattaggggaattacctcatatattatttttttaactcttttcttctaaatttacggtttgagtttctaaagt

SEQ ID NO: 297833 - DNA, 3378 bp, Cannabis indica
aagttttcattaaaaagcaaaattttaattaatcacgattttcataaacctcgttgattagcaacgagctgcagagtacgtttaaaaatcacataacacgcctagtctagttagggtgttacaccagttatcatgataataaaagcttgagacttatcatgggatgtatgcatagaattcctagcaatggtattagataccacctagctcgagatagttcagcctgaggacattaaagtggtagtagaattcttggatgaactccagaagaacatccaagaaccaccccagtgagaggttagacattgtaattgatttggcacttggagcaaagtcggattatagggcaccctataaaatagctccaacagaacttaaagaattaaagttacagttttagtggatgtttgacttaggatttttctaaccttgtgtgtcaccttgggaagttctagtgttgttcgttaagaaggcagatgggtcgattcatatgagtattaactatcgagaactaaaaaagttgacaatcaagaacaagtaccctctgcctaggattgatgagtggtttgatcaacttcagggaaagacagtcttctttaagattgacctttgcttggattgtcattagttgagaatctgagaggaggacattccaaagactgccttccgtactaggtatggtcattatgaattcttggatatatcttttggactaatcaatgttctaatagcttttatgtatctgatgaatagaatattcaaggattttctcgatatatgtgatgtagtatttatcgatgatatccttgtgtactctcaatcagaaacgaagtaggaatagtatctacggatggttttatagtagccacaggaacataaacattatgctaatccaagaagtttgaatttcagttattctaagtgtcctttcaaaggtacattttagtaaatatgggaacatggtcgatttgggaaaggttgagtccaacagaaattggctaaagtcagaggcacttacaaataggagttttctaagttatgttgagtaatggtatcactttgtaaaagggttcctaagatctctaagcccttaatagagttaactaagaaggttaaacagtttatatggatagataaatgtgaaacaagtttccaagaattgaaacaacgattgcttacaaccccattgttagttttgccattagattaagaatagttcatggtttattgtgaggcatccagataggatctgaggtgtgttaggatgcaagttgttagggccattgtgtatgcttctcgttatttgaaggggtatgagaagtgttactcaatttatgacatagaacttgctgaagtggtccttgttttgaagagttgatgaaactatttttttttgataaaagtgaaaacttatactgaccacaagattttcaaatatttctttactcaaaaggttagaatatgagaaggaagtatgattagaattagttaaagattatcattgtgaaattctctaccatcctgagaaggccaatatagtggtagataccctaagtaggaaaggtctcgggcaggttataacataaccatgatgtctcttcagttagcgactgatatggtcaagtcatgtattggatttgtgttgggtaaacaaaataaattgacacttcaattagatttgatagaaagaatcagaagtgtttggttgtagatcaagagttagtggaaattcataaagaagtcttgggtggccagattaatcatttttgagtgtcaataatgggatgttactttaccaaacttgaagtgtgtactaaatattgttgagtttagaaggaagatcctagattaatcttgtaccacttcttttgcactacatttggtacagtgaagatgtaccaaaacttaaaattctactttctaatggtacagtatgcaaaagggtgtggtagattatctgttcacatatttgaattgtcagcaatttaaagctgaacatcaaagatttgtgaggttattataacttattaaacttcccgagtgagaatgggaatatattactagaaattttgtaattcgattacttagaaccgtaagtatgtttgattttgtatggttgaatatgaatcagggtactaattcagtacaagaactagtatggaaagttatataagggagatagtatgaccttatgagactctaaagtctattatttcagataagaaaccaaagttcacctttaagttttaacaaagtctatagagggccatgagtatgaagctgaagttcaccactctcttgaagatctcgtgtaaataagaattcagtgaagtgggtttaattctatctccttcaatgtacattcctttagtcgagcaatacaataattactaccttcatagagatctgctggtacttctttattatttgtaattcatatgtacttaaccaatgatctcagtcgcacacattctatactttctcatgaatattgcaagtatctcaatttaatttaaagttgcctcattaaaaattatcaggaaaatgccgcgagtcaaaacctaagctaagagaaaaagaatgtaatatacacaaatttaatattcataattatttgtaagttttcttattaaaaactttgtcaggaaaacctagtagaacaaactctaagctaagggaaaaagagtgcaatataaatatgtatccccctcatgcacatataattcataattattttggtgatattatatctcataagattattgtttaaacttttaaaatatcatcatatattatgtatgatcatatatttactacaactcttcctgagtatgtgtaaacttctaattatggactaggggtttatggaagatgaatatttattcaacttatggaatcactaatgtgtgtgtatacaaaattgttcaccaaaaaatttattccattcaagtagatatacacataatacattaatataaatttttatttgcaataatgatggtactacaggaccatgtatattttccattcttattccatatcaaatgatcatatatttataattcttgatacatatgaatactttaggacttctcaactaatacttatgaacaaactatatgcatttaatatttcactatatacaaaaaaaagtttgttcttcaatatttttataatataaccagaaactcttcaaaagtctattaaaatgtataatttacgaacttatattacacagacagtcattcatatttttcaaataataatttacatacatgtctttaagtttatacaaagatctttcttatataatgcacgtgactttgaatttatatcacttaagacatgtattaaattcttctagaatttttatataag

SEQ ID NO: 297834 - DNA, 1508 bp, Cannabis indica
ttactacagaatcaacatcatccactctcaacaaaattctctctacaatctcttctggaattaggcaaaatctatttgttcctgcatcagtatcaaattcagtactcaaactattcaaatccttgtccttgataaggataaatcattataatgatggtgtatctaatctatgatcaaaactaggattaataatagaagagtaatttaccagtgtgatgggtgaggccatccaaagccatttattaatttgaaatttgtaatgtatctgagagaagtaattttgagaagaaaaaaatatcaaaacaactaaaagtttcagtctttcagatctatcttcagtgaaaggcttaatatccgtaacataatataattcaaacaatagcacagactttcaaaattcaaaattccaaaattagagataatatatatagtgatccgaaataaaaatattataatccaaattttacagtcattctaaaaatcaaaactaataaaaagtttgaactttgaatgaaggaataaacaatatacagtgaattttgaactcacaattttgcccccaatagttggttgaagagattgtatggtggtttccttgctaacattaaatttttcagctttggtaacagagaaaacagaaaaaggaacaatttttcacttctctttctctctcgcaaagagttgagaattgtgtgtgctagggttacttacaagtcttaagttatagaaagtaataagaaaaaaactagttatgatacaagattactataaaaattgcttctttgtttccttaaaaaaacaaaaataaaaaaagattactataagtgttttcttcaaaaaaagaaaaaagattactaaaagtgtccctccaagttgggccaggcagatgaggcctaacttggagggttttcctctattcatacgtgttcgtacgacttgatgttaacaggaggtcatgcgccgctgatcgtgtacaataaatgtcagagtaatgaacattggatagaaggatatgttgctttttgtgctgtgcacctttcccaagtctaacataggaggcaaacccttgattctgtgggactggggtctgatgttagaagggtgccacgtagtactgcacccggacacctcttcgactactcctctaggactacccctgagggtatccggttgtgttttccggaacctttacttctctgggcgagagtcctccttccgggaccaaaaaggttcgactttcaaaagagggttatgattgaacccgaagccgtagtccgactccgtttatgggctgacccattgctctgtttgggcttgacgaatgtgcctgtgagttgattttgggccttggaaatacacatgtcacccatccgaaaacgcaggtaacaataagaacaagtttcataattcaatctcattttgttaattagccatgtgtgttttagcccttttaaacagtttgatgtacattataataattttataataatatacttaaatacacaagt

SEQ ID NO: 297835 - DNA, 7816 bp, Cannabis indica
ttcaagtttttttttttttatttggaattgttggaagagatagatttagggttgtggaaggtcagtagctctgattgtcgaaaaaattattggaaccaaaagagatttaccatggtgttttaaaccagattttttttttggaaccctttgataactgtagttttgccaaaatatatatagtataaataattatgtttagctatcactatatataaatacaagaagtccaatttcaaaaaatatatatatatcatatttttttaaaaaaatatattagttaatttctagaactattaattttagaagatattatttagtttatttattttgtaatatttgatttcactaagtattatttaacattattttgtgttcgtaaaaaactttaaaaaaattataaatgtatcaaaaaaaaatcaaaattgtacttccaagtatctttttcatatattttgttttgtcacacatgagtgtaatctagatttcgtattattgatgtataatatgggtataaaattgcgtatatacttaactgtgtcttttttatatgtgatggatagtgaataaaatagataaataaataccatatttttttttttgtcattaacttataataaagttagttataaacattcaaatttagaattaacatttcattattttgtgtttctttgtaagaaaattgatctaaaagcatgacattccaaatcacttgactaaaaagaacttgcctttaattcttacaaaaatttagtttggatttccaatgctaacaataatctttgagcttaacaagtcctatatggtgaagctatacatattttggccattcagtagtactattaatcctatttatctccttgagattgtaatcagttgaagcccttgcccttggttcaaagaaaggtttaaaagggagctaccactaatcgttgtgaagatgcatcggcgaaaattgttgatgatgttctactttcgactatcaaacacacaaatgcaggatctcttcgggacagtttttgaagagcaacttcatcatacttcattgactgaatatgcaccaacaaatacttaaatatttaagggaggtctgtacctttgtgtttcttctataaggaagtcgttaactttactagcgacgagtcaaaattccctgaattgagcctgcaactccacgacgccttccctgaacatttggtacgcaatatgagtcatcatcatgcatattctcttctgatttgtttagaaaatgaaatcttactcaccctttcgttgttaaataagtcatcggcaactgcttccatttgctttcttcttttctcttcttttacaaactcagtcatttcctcatttccgttgtcagattctctgttatcaagaagcatatatggaaatgatatcaaacacctgaatatactttaaacatcacaaagaaaggagttagccatagtcgaaggcaaatcttacttgtaaggatactttgagaacggaatcaggttgttaaagctattcccagattcagtatctctctacagttcaattccatataaagatacagataagaacttgtaatcattcaaataaaaatacagataagaaattacatggaaaattgataatatatgacttggattttaattcaatatatatagacacttaatcatataccgtttactacacattagatattctgcagaactaagagaaagttcaatgcccaatttaaatgtaacaaaagttcataaaaaagaataaaataaattgcagaaatatcaaacttaaaatagttataaagcatgccatttggttccccactgggaagtgcacaattacctttctgaaacgtttgaagttaacaacttcattgtttacagtacgtctggttgtagaagaagcgctcatatcccgaacaattaaattctggctgtaaatgatatccaagttttcaccttccgtctcgctaaccctgtcatttttgacatgactactggtactactactgcccctaaagcttgataaattaatttttaaagcacaatccttctgttcatccatgttatctacagtgtcaatgactgctgctgcaggtgcaatagtcgttggaggaattggtgtaacaatgttaatgacttcttcagaatgtgcagaagcagtcgttggaggaagaactggcgttacaatttcaatgacttcttcggaatgtgtggcagcagttacatggaccgaagacgttacagcttctgcttctgcttcagcttcagaatcttctacaaatgtctcatctgtggagcatgaggatgatacaactactgcaccgagcatacattcaaaatgttacttcagtataaatatatttatgatacaaataattttacaagcatgattatgtagattgagatcacatctctataaaattatatgtctaaattacagcagaggagattattattttgacttgtaaattatgagaattaaatacacatgagatatgcatgaagtaaagaagggaaagaccaactataaagaatctttttctgactaatggaaccaaataaatgataagtacacaagttaattgaaactatcttaataattaggaatattttagggatataattacatattgataagcaaaatattaaactagaagacacaggattgtaatttgtaagtgttttactataaaaatattaaactagttgtgaatttcaatttatgattgtaatcataacagattattgaattatcattctcttcttccctctcctctttactcttactttctataccgtcttacatcagacacattagcttagccagtattctagtctctactaataagaaaatgagggacccgaagcgataaacttttggaagcatttgatcatctacagcaacaattgttggaaagaaagacaataacaaagctgtaatttatcacaagcaaaacaaacaaactcaccgcaaggtgatatcaaaatggatcgatccagtaccccagttaaaatggcccgtatcaagtctatttccttcactctagatactgcattgagtttattaaagcaatcgattttgtaggatgaccctccggggatgacacaaacaacataactgctttcttcatgttttgatccctggaagaattcattcaaaaggtttcagatagggacaattttaaacaaagatcatatacagccttatttttctagaaagacaaccacgaataaaataattccctcaagtttttttatattaataaaaatatttttcaacggcaactaaaatacaaagcttgtcttaaaagagagattcatacttgactgcttgaactaaacccttcaatggaaagaatctttgctccagctagctctaatagggacttcaactgatttcggtatttatactgtatttgtagaaaagaacaaaccgaatgaaattagatttttgtgattatgtagctcaagaatatacaatcttgaggttgttaatcacatttagccctaaaatcaaaaattattatgactgtagttgatcctactgtctgtttttttgagtgaattgttgtgtaataggcatagtcataaaagctccttatcaactataaacacaaaagttataatatattcatataaaaatatacattacataaatgggggccaaaattttacactgtttatcgagtccaacacaaaagtatatccatccaaacaattttcgcgagttcccgggtctgcaagtttgactgagacatcctctactgagagagttggggtgtggctgataaagatcagaaatgatactttgattagagtgataattccaaatctacacataataatcactatctataataataacttactcgctgcagctagggatttcagtgcaaatcttctcttcagcaactgtctacagagaaattaacactgacataagaaaaagttaaataaactataattgcatttttaaatgttcctataaatttatgtaatcaataacatttgaaattgaatatgaaacatttgtttacttcaacccagctaatccgaacacaagctttcttcgccacaatagcatctagtaactcttctcttaagggagtcagctcatcaacaagtacatgggtgcacttttggtggaaattgtaagtaatatcagcacctggggatcaaaacagaaggtttaaaaaaagaagaaaaaacaaacaaacaagtactccaataggtaattaaatcagacaaacaggtatctttaaaaaaaaaaagactgaaacatccaaagaaccaccaatttatctgtaattcattcttgccgtttctttcttggtgattttccatcccttctttctgtttgtatgaattatgtcaagaaatatactattgaaaaactcagtttaaatgccaaccaaatttaggtacacgcggtataagccaagctactgactccccaaccccacaaccgtgttaatattcagcagcaaaactaactacatagccaatacttgatttgcaaagttaggggagttgggtggcatactattttattgaattaaagaagaaaaagaaaagttcatttgtgttttggaggcttccttcttcatctatgtttggttaaatttgttgtctctttgtaagcatcgaggttatgtaattagtaaaagaaaataacctatagcagaaataatacttttgagattattgatatccagcaaccaataaatttattagccataagatatggacattttctttcaaggaaaaaaaaaagaagaaaaaaatcaaagaaaaaacttttagcaattatatactcggtatcaaaatgttgctagcagtatttatccactaacctattaatgaaagtttatcttgaaaggactgagtcgcttggtgggactccaaagagtagacccaaataatgaatggaacaaaagaaaacctgtcaatttggacacaaggaagatgcacatgtaattgaaatttttcgcttgttgaatccactaaaagtataccaacaaatataactacatctaaattctccagcaacagctacgatttaaagagacaatgacgttaataaactcacaagtttttcaaataattgtacaactttctatccaaaaacactttcctactcgttgctttcgccaatagcaacacttagaagagcgaaaacaagggggagagagaatacctgtatgttgcattcccagttccaaatgaaatcaggttcccatctgttaaaactgtttcttttcctgggaactcatggactttctccattgacccaaggctcttgttaataaatgttccatactttgagcaatctttaattcgaactttgttggacaaattagaagtcttcgtatgtgggggattagcagaagtcatctcatcaacaaatatttctgcatggacccgagaaacacctttgtcctttgtgataattatatcacaccctacaatgacataaaaggccatacataaaattttcatttaaaaagaaaaagttataaaaaaagaactccatattgcaacattctcatttggggataaagagtattttcacatcctttttcatcaatctacagtgtggttgtcatttaggttttcaggaggataattaaacatggtagttgtcattttcatgcttcatattgcaatttgcaaaattctcctaacgtgtaattctcatggataaagaaaaataatacaaaatagacatggtgtattgtacctttgcgacccactttgtatgaaccctttgcagtgatatagtatttattttcacctgttgtgttaatcatactcagtgattcagtaaagatctaaagccaaaaataaataaaaataaaaaaacataaaatcaaaaaataaagaccaaccaaaaccacagcaaactgttccataaacattgtattttcattaaagttacaaaagggtttaagaaactatatgatggaagatccaaagtaaggtagaaggccaaaaacctatatatcaaagcacaaagaaaacacaaaccggtgagacaaactaaaccatattcttcaactgaaattaattgcaatagagggtatacatctaaattatctagaattgctttttatttcatttatcctttgtcagtggtgcctcccattctccataccctttgtcctttcgaaatcatgggttgcaccaagagtgggaagtgcccgaccgcagtctatccaatcttcagctcaaggttaagcacatttgagcctagtccagggcattaaatgcccaagactaacaaaaacatgggaattcgaactctcaaccaaagaaagggacatttaagaacatcctaacccctccactacaccactaatttagtcatcaagaactgaagttgctgtacactgatttctatcccataaacccaatccatcctgggaattgtcattaaaatctatttcttaaaatcaatattaaggaagaaacattgttcaatgccacaaatcaccagcattctcttgttacacaagtccctccctaccaacataaacaaacttcccctttcttcttacacagacacacacaaaccccttcagtgtataaacaaggaaaactgtacaaggcaaaccacttttggagagcattattcatatttacagataaaacctatctaaatattaattaatttttgggaaaaaaaaaatggataatgaatcagtggtgagactttttggtttctttgcctaaaatcacaaataccatgataaagattacatatttattgttaaaattttctgggaaacaaattaaaaggaaaaaatgagagaagatttcagtgaaatggtaagctaacctggggagggatcaacgggaatgaggccgaaaaccatggcttccgtagatactgttaagttgagtgttagctattaaaattcaaaaccacaacaacaaattgcggtatgttcttgaaaatgattttactactcaacagtcaacactacaaatccaccaagcaccccaaaaaatccataaatgttctttttttggttctattttcaaacccaaaaatattgtcccgccgcacgcaaccccttcattttcttattcttcttttcttttcttaaaatagttaaaatgagaggaacttagattttttatttatttaggctaatttataattcccccgaactttgacttaccaaatcgtgctccctaaactaattttgacgttaaaaattatcttttttttttttttgacaattctccttaaacttttgataatgttaaatttgtagtatagtgtcttgttctgttcattttaataacagagtactgacgtggctcctattatgcattttacgtaatttaacacgtgtaattttcttattttttttattttattttttaggttcagtttagggttttgagacccattttctccagaacacccccacccaccacgagatgacgaagaaattcccccacccaccaccagaagaacttccaacgagaagaacacccatccaccgccatatttttgggtcttcttctccaatatgaaatttgtcttcttctccctcattctctttcttcttctccgtcattctctttcttcttctccctgattttataccaaccggtgtgccctttcctctattctccttcatttttcttatgaaaccaaagaatgtcgcactttagcaactcagtcaatagttgtagaaggtataaggtgttatattatttataataattgttgaccgaggttttcggcaactaataaaatatgaatataataatgagctgtaagaaagcgagatgaagactttttacgtggt

SEQ ID NO: 297836 - DNA, 1399 bp, Cannabis indica
aaaaaaattatgagttgtgatgaaagaatgtaaaagtagaacaacggaactaatgatggacttctacagaatatataacagaactaatgatggacttcacagaaaatatctaatggttcacacaaactgaccaatcacactcaatgccgtagcctttcttcaacaacacttctggagcaatgtaatccggagtgcctactgttgaaaatgcctatcatccaaacagtaaaaaatacatgaacatatgactaaaacaagtctaaaagaactacacagattgaacataatagctctacaaaacttctgcatcatcgattattatggaaacccatttactatgcattattgtttcttgagaatggtacagtacttctccttatcaccatgtttcctttaagccatttcagaatcaacctactttggactattgggcctacctacaactgcaacatggctaagtgtttatgacttattcattcacttaagattcaacagtattagttgaaacaatataatcaaactacacccccacagcctagtgaatcacggttgatgtataattttgtcacatttttattacatgtattccaaagggtcaacgttttcagttaaaaaggatttaggttgctggtgtacatatttacctatttcattattgtgatattatgctctggaaattttgcaataattgaagaaatagttcctaacaggacaacatgattggagccactttagtaagactaatttcaaggcaacccttaacctaccaattttctcctattcatctgccaatgtttaagttgttccaggggacttttccagcgtctcccacttttcatatctgtagagtatccttccaggtccgttgtatcattcaagttatcatcatcaaagacttcattttcttgaatgggcgataaatttgagcagtcaagaggcttgcaaagaccaaaatcagagagcttcatgtgaccatttttgtctaaaagaaggttgtcaggttttatatctctgagaataaaaggaagagaagggttgcataagcaaaaaataattgtcaataactgatcactctcttcattgcttgaaatggcaaagagtagaggaaccaacctgtgaatgtagttatgtttatgaatggattcaatggcaagaacactttgagcaatgtaaaatctagctacagtctccgtcaaagtttcttctcttattagtaaagtcattatgtcacccccaggcagatattccattatgagatataagtattcagcatcttgaaaaagaatagtatagtttgaacaatacagtggcttccaacctcagcaagcaaattcctttccagctctaacatgctcaacctggtaatcaaaaaaaaaaaaaacgaaaaaagtacccgacc

SEQ ID NO: 297837 - DNA, 2727 bp, Cannabis indica
ttttagatttttttaatgatttagttgataattaaaatatttccctctgaattcagtaatagagtcgtgtgtttgcctctataattttcctgttttggtgtttctctgggtttgattcccaacatttatccactgaaaactcagatatggtctggtcacattttcttaaacattagctagacagtaaaaaactacacaaggaacccataacatgaacaacactgataaatttctcaaatgtgaaccacgtcattcattaacatatagacaacactgtatttcaaccaatatattgaccttttatatgtatatacaaaatacaaggaacctaacaagagaaactctgacgaaaagtgtaccaatgagaatactgtaactttttatcaatgaacatcttagagcataccaatgagaatacttacttgattcaggtttgaagtcagaacaacattaagatccttaatttcctttttaagccatttgtcacgagcagctttattcgagaattgggtggcacgaccttgcttttgatataagatgctaagttgcttctcacgctccattatactacaggacatcagcaccaatcatgtcgaaaaggtatcagcaaatggggaaatttatgtgaggccaaatatttagtaattgaatactgccacatgttataagaacaaaattcaatgtgaaaagaagcacacgtataaaaagaataagcctttgccaatagagtgaaataaagcatatacttaataatgaatgccatcaaagctgaacaaaggctaccagtgtcaatatgaagcattagccaataaatgcactcagcataaacccaatatgaattctagtacagctcgaaatgattcatctaacagctaaagactgtgaatttaatttttgcctaccaagctgaagtttggcaaaaagttgttggaataaaaaacccaactaatcctggcttctttagaaaagtattaaaactaaacatactttgcatatttacaggatgggaacagatggaaaatcaatttatgcataccaagctgcagaaatgtatgtttaaaatgcatatagatttaactgacgtacccttttgttatctccttttccttcatgatttgactatcatacaaagggcttatttcttcaagctcattcattgagtcctgaatttcattttgcagaagttgaagttgcctcacagcatcattctacagggatatatacataagtagatattagccacaatcattggcctctcattaccaagcaaaattcacaaatttgaacaagaaaaacaaatgaaatgaaaaacatgctgggcattatcaacacatactttggctcgagtatttccaaacatcttctcctcaagatccttcacatcaagctcaacctctgtctgcttctttattgcttctgttttttggatttctgctgcttctttctccttgcttaaaccattaagttctttcgttaaatctttcattgccttatccaggtccttcgatttttcatgggcatccagcacactattatacatttttgtagatgtttcagaaacccttgttcgtgcctcttccacctggataaaattaattgacacaaccttagacacagagccattgcttcatacacaatcacattatgatagtcatcatttcagcccatggcgatcattttatttctaacaatatggttaaaaatatggatgcattctgcactaagatactattattttggctcaatatctatgcagctattattcgctttatgtattgagagtcacaggctttatgtaatatcttgtagcattctaatgtttttacttgttttgttaccacgttttcctcggccattagagaggttccctaataaatttgggtggaagtcaatcttagacacatgacctcagtctcttttcagaaaggaaaagattacaatatggtttgaaaatatagcataaagtatggaacagcacactaaaacacagaattcatgatactagtaaagagaattcttcaaaatgcaaacaattagaatcacatgacaattttcatcatatggtgaattcctgaaatatttccatcaagtcatttttcaacatgttaagctctcctattcagattgtaccatgacaaaaaagaaaaagaaatacgcagttataactatagagtatttgggtgcttactagccttcagacgtttacatatacatgagggatgagtacatacaaaagatcttttcagcacatatctccttaggctggagtgtacaatgcaaagaaagtggagatcatctatccttcattataaattctctatgcaggtgtagttctagatacttgttgaatcaacttttggagtgctgccgatcacactaccgtgtacagtttctaaattttgaggtcatgggtggcatacagaaacaattactttggtaggtagattatttaggttgcatgactgaaaagatgaagatatattatggaaaaaaatcagattctggattgcaatttggcaacatgatgtcatgaacgccaatgaatctaagggcattttgctttctgatttcattagagaatgccattttctgtctctgttttgctctttatttaggttactctgtcacacttggtattgagtacacgccagtcactgtttcttgcattattgcttatcttttttttgaaaaaagaggagagatcagagttaaagactgatcaccctc

SEQ ID NO: 297838 - DNA, 4667 bp, Cannabis indica
aaactaattaagtcatatagacaattaataaatttcgtggtgagggaggtaggtgaactcataaaaacaagcagagatcatagtagacaagagttatcgagaggtgtaggtacatgacatatttatggacacatggtagcctaatgtgataattttgaccaaaatgagagaataatatatatggaatatgcatattcaatgagagcttctgattttgggtcacacactcacactactgtgcagatgccttgggatcgcacctagctaccttataaagtcgtgtactgcatgttccttctcaatcgaactatcgcatagtatcgtaggccacggaaagaagaaacaagtgatgatgacctaattaattaaccaattattcttgacacataatgcactgcttttaataggttgccactgtatgaggtccacactagctgatctacaacatccaagtgctactaaaaataaatattcatgttctttcttatgcaagaattttaaaggggaattaaaagcatcatggcgcatgagctcatgttacaatcacttaatttatttagtacatatataccattaaaatgctgtacattttttttttttagaacaatctttactaatttcttcatctactaacccactaatttataggagttgttgatatgaggcattgaaagttttgaagtagttttaataagggtgttgctatatttaaaattaagcaaatgtcatgtgcattacatatctcaatccatatataattattaagggtttttaggtgaaaatattaaacacacagtacatataaaaaaagagaagagttgtccgattttcaaggatcgaaataacataataataaattaatatatataagaagtagtggatatgtgtattaatatataatatatagatctcttataattattaattaccgcgtggcaccatcaaatcgaatgatccaccaacaaaaattaatgtcaataagtcatgaccagaccaagaaagtaaacgaccaatttcaacaaccatgctgtagaacgatctccttttccctcctgggcatgcatggccagtttttgcaatctcacttcaaaattaaatatttaaataataataataataatgtagggtttagaaaaagttagtaagtaagatcatggcaataaaataattatgcattccaaagggaatggataagtaccattaataaataagacacgagatgatggaagaaacttctttaaatttcaaattcaacccttactttactttttttttctcttttatcaaacgtacgtgtttaagcagcattagcccatatctttttttcttcttcaaaagagaaatatgcatatttatatatttataagcatacaatatcacaacatgaaatggggggaaaagcaaaaggtttccaatactactaataatgaaagggttagctttgatttaaaacctaacctagcaaagaggcccatgcatattgtcttcttctatctctttttttaccaattaggcaattaccactactactactactattaagtaatatattcaatgcttttaataattgcatgtgaactgtattgaccccacaccacattaagcaagtcttcttcatattccaattccaatctgtatcccattctccaaccttttctttattttgctctctaatattagtgggccctcttgaaccttaattggcccacgcgttatttttatttttgctctcttttctttttctcacctgcctcaactatatctgcaatatgtttttttgataatacattacacatcctgcaacaaattttggcttttaagaacctggtatacaatcacacactatatacagcacacacatatatataagaccaaatctctaattatgcattttactattctttcacccttatttacctttgtattcttcctattggcaaacaaggttggaaataatggtccacttaatttgtaattcaatttaggctggaaaaggacaatctcagttaatgtccttatactaattttgggtccccgccaccttcaaactttccattgtctttttggtttgatatttgaaagtgttgtatgaaactgtacatatatatctaattaataagaccaattctttaattacatggtcgatttcgtagcccagtaaaatcaaatgaaattcatgatgaggcgttacatttataaaatgtataatatatatcatcagtactagtgtttggttctagggaataaatatggcccactgccaacatttattttttcccttccaaataataatgatgataaaaatgaaagaaaacaactgtcatatatatattatagccatccgcaaatatcaagtagtacatttgcatgttgggttctattatcttaaatttaaacttaattttgtgaatatataactagatataaaagtcacaagcttatttaatttgtacaatacgactatttaaacaaaggttgggattctatgctactagtatataatatgctacaatacaatatattctggtgttttagtacataaatttaagattcttttgcttgaattctacttaataattagcattatattattatgcacattacaagagtagtgacaataatattgatacttaataattattaatcggcacaaatgatcaaattactttgaaatatgatctataattaatcatatgttctgacatcatgcatataagattaacatcagtagtatataaatcggtgaagcaattgatgccccactcccaatcgtcaccctctcccctcaccaacaaaacaaaagcataataattttcccactcagcacgtactaggagaaagcaaactaataatatatgtatatgttgttcctttgtctatctctatatatttaatatttattttgctactcatatatttaataataatatatagattcgatatatatatatactattataatagaatataacgaatgtcacttaagtgctagaatgatgaagaatgacaaatttagacggttgcaaaaaaagtccaagttagacaatttttctgctttattaaattttaaagaatataattagttgccataatattaatttagatgcattttgcagtttcctagtgagcggcacatatatatgctaaaattttaagtagttttttattatttaaatgattgcagaagcatgcagtgctacatatctataatatttagaaaaaaaaacataaataatttttttattttgttggaattggttgattaatattttcacaataataatttgatcaaaatcaaatattttcccaataacattcaataatttgttcttagtaattattaatttgattttaataaataaaccaagaatgattaaatgtggtaattttatatataaaaataaattgtgtgtttgttccacatagctcatgtgtgaataatttgtagtattgatttttggtaattagaaaaaaagctctattgtgtgaattttattaaaaaaaaaaaaaattactctcttgctaatctcaaactattcccgctcaaatatattacaggtatagtatttggtgagatctttttactggctacatttatttgattttttttacttctcaagctcccccactgcacaagaaaaatccatatgttatttttcactgttttttatatggtttctttatcttaaccacaaataacatatatataaaacttgtacatatgtgaatgtataataatgtaacagagaaatgagtcagctagtctatatataaagcctgtgaaatacaatggcaaagtataagtaagaaattcagcctaaataatgacaactccccgacacaaacccaaaagacatcgaaatatgatctttatatattttattaataagaaattttattatttttataaaaaaaatataatcccaaaatccaacaaaaataatatatagttttattccaccgtccattttggtgtcacggaccaaatatatagataaatagaagtgatgaatgaaaaagaaaattgtttttacaaaaggaaagtaagaatagaactatatttatatatagcgatttagtaaacataagcgtataaacatagatatagtttctttggggtacgtatgagtagcaatatgttttggcatgtaaaaatataatcattcaaattcaaatatgttctagttataacttatattaggggtgtcagttggtgtttatacctctcgtgttgagacttcaagatttacttacctactaatatcaatacgattcgtgatacaaaaaaattattaaacactgacatgcacaaatacgtcttgcataagtttcatgtcatatcgatctaacctgcaaaattttgggttatgttggtgtattataagctaaattactttttgttatcatgccattcatgttgattacatgatcgagttcttaaatttattttagaagattgataaaaattaataaaatgtagacagaaacacaatctgcataaatttttattgtgtccaactcacgaaatctatcgtgttgtgatcaaaattatttcacaaaattagattttaaataattagggtggttgttttttattaatttgctcctaaatcttgtatgtatataattaatttcttttacccttaattttaatattgtaaattatt

SEQ ID NO: 297839 - DNA, 1974 bp, Cannabis indica
attttatgtaatatttttatataaaattatatgtggtattaacttttatgggctcctaaatatataatgttttagtttaaattaaagtttaacatagtattatataaaaatatgatatataatccaatttaatataatataatacaatacaatatgacctaatacgacgttccaaacaagcccttagacactaattgcttaaggccttacgagttgttagttatttttaatcaattattaaattagcacatatttgatgaattacatcaataacaggcattttgctaatgaacttttggctctctaataatactatagaggcagcggtaaatacgtgcggcccaacctggttcatattttggaaagcttgtgataatataagttgtgtcgtattgtgctaatattttaaagggtaatctcagcatggtctgtaagtccatatttttgtaccgtattcggattcgtgtcgcgcgtgctttatacgtgttagtccgtttttcataaacgagtcagctcgttttctaatatgagatcgaatttgtgcttcacttttcaactattttttatataattatatatatatattttttataatttcaattatttttatctaattatttaataatattttacacataatcataaaaaaaaaaaaactaattagaatgattataatttgaatatcattagtaaatacaaacgtattattattatttttattagaatttttaacgtgttatgtttttggttagtccatttgcacttgcatattgtgtcttcggatcgtaccatatcatgtttaagtttattttttgtgtcatgtcatgccaatttatagtatcgtgttgtatttgtccaaattcctatttttccgtaccaagttgtgtttgtgtcggtttcgtatcatatattagaggcagttataaaaaaaatttgaatcaatctccttcaaaagaaaaaaaaaaccaaaaattgaatcaatctatgtatgtactgccaaaacatttttctttttcttttttacgttgtttattaattaccttttaagtcgttgatcaaaattaatttattattatttcgtcaaacaaagaaagagttattttagtttgtgttattcctaagcaaaatgcttatagacctcgtcataattatattggtgtgtgtattatttagtagtacaataagccaaacaaaattatgactcatgagcttacgttttctattatttcatttcttgatatttaaaaattatatcttgtcaaacaaaaactcacgtttaatcaatgaatagaggtaacaaagtatcaagttaattttgaattaaccatataaataatttaattgaagtttttacctaattttgaatatatattgaccaggtttatatttattggtaaaacaaagaattgtatctaaggtgtctaacactatttgatgtaatatgtaacactatttgatgtaatatgtatgaagggtttaatataagatttagttattagtctgaacaagattccttgtataaatcctttggtttgctatatattggctcatttaatcactctttttctgagtctctctcttcgctttagtgcgtacgaaacgggctcctaaattatacttatttcttcatttctaacttggcgagggaatttctcccaacacccctagcacatgtttcgagggacacatccccgaatttcttatcgttcgtgtcttacatttgtagtacactcacttgttttatatacattattttaaaataaaatataataaagttaaatttattattgaggtctcatgtaaccccataatatagggatatgattttgtctcgttattgtactttcacggattgtaatccgtgatgtacggcagccgtcagatgagggagttatttgatctgacggctgagattgatctaggggtaattagggtcaaaaagtagaaacgtaccctgacactcatttaatgtac

SEQ ID NO: 297840 - DNA, 6940 bp, Cannabis indica
aaactacatgtaaacttaaatgacttctaatcttctattgatagcaaataagattatattgaaatgagttttatttagggcataaaatcccaagacgtttaatatttattattgcatgtctcgtatcccgtatatttaatattggaggggtcacatcaatcgtcttgccatcattccaactcctctcaaggaataagcccccaacacgtgtgtgtcactatgcaattgcattaaaggtgtcccatgcatgccacaccaacgttacatgtggttaatgacccattcttaatgacaactcatgggatacatctgcgattccagccaacaccacgtgtcaaggacgtgtcaccaagaagcagaggaatgctgcaagctttaggaccgcgcgtagcgtcccaaaagcttggaggtaaatgttatccacatttctacaaagtatggcacgcggcatttaatgaggaagattaatttaataatttcttaatcaaagccctttgatacaactttatcacggagagcctcttagaactgagaattatccaggatggaaagacacacagaagcatacttaggctcgccttagcttctcaaacacagaaggcaaattgcttctcttggacgacccagaggggtataagaagagaaactaacccagatgatatccagacgagcattcgaagagcctaatccagatatcaatcattctggggtgtcacgaatgtcaaccttttatgcatgccagatcaccaaagtgacgctaatactttttgttgtcaaggatcagatcttgtcgcctacattcaagcatgatagtgcacgtaccaccaccacctttttgccaggaggatattacagacccctacttgtaaaggaacaggctttgagtaatacgtggtctctacttttaaagattgaatctttgagtgacatgggtccaagtggtacaaaatagtcctcattatccatccgttgcacgtacgggcataaggtttcccacgggttcattcgctcagctctaacattgcatgtaatttactccaatagtgagatttttagcagaaaccttagacgggtcatgggcatgtccatacccaccacttagcctataaatacctctcaattctcataaagaaagcggcatcacaatttacgcagctaaaactctgccaatattactgtaggtcttcttcttctccaatagaaacttagagtaaagagttaggatttcccactaaaatattgtaaacacatcaagctcgccctaaagaggctaatagactgactcgtagactaagctttattgacacctcaaccacgcaaaaaaaccttcatctctttatttctgcaatttataattttttttagttcttaattattcagtttctgaaaatctcggtaaacactactcatacacacatataaatatataacattgtaaaaaataacatacaaaaaatatatacagattaaaaataccattataaatacatatatcaaattataacataaaagattaaaatttattgtctactttctttctaaataatttttctataaattaattttatagtgatatatgcatacagattaattaaattattttataaaaataaaaaaattaataagattaacatatcaatatgttttaaaatataaaaataaaatattgtttataaattatattaatctcaacacaatattccaattagtcaaatgcaataatacaagtatcatgaaagagaatatatgagagagagtacctgactgagattgagtggaggtcgacgttgggtgaacgctggagttgagtggtgcggaagggtggtgtggacgccagtttgggagatgggttttttttttctttgtattttaagagagaatgaattggagaaagcaaaataagaagatgaaaatgaaaaaatttcgataaataaacaaatcttgttctcgggtcgttaatggctgctctctcctcttcctcttcttttttttttttctggtctcgaggctgaggtcgttaatggctgctccctcctcttcatcttcttcttgttcgtggtcatggggtcgaggtcgttaatagaggtttttcagatgacaaaaaagaaaagggaagagaatggatcgggaaagaggggacttgagctttaaatgcaaaactattaggggcgaccattagaggcgacgcaaggacattaggagtgacttttgtcgcccctaatagtataagcagggaaattcccgccctcggccgatggataatttttaatttatcacgagcaatttttgtcgcccctaatagtaacttgttgcatctaatacgtacttttaggagtgacatttgttgcctttaatgttgtaccgattaaaaaaaattaagttttttttagggtcgatactctttcgtcacccctaatatttatactattaggggcgactttttattgccatttaatgtgtcgcctgtaatatctgaaattgttgtagggaaagtgaaagaagctagcatgcatgttgaatatttatatatttcattcacaagatcatcatgcgttaatattctacaacacaaattacaatcctccttataatgtttgataacgtttatattcttgtgtatatatatgaagttattatgaacattatcactcatacacgtacaaccaagaaggtaataaataataaaagtaacaaaagattacaaacagtacagctcacgaaaataaattaaacaaattattaattaaaaccctatgctctatctaaaactcaccaaaagcatatttcttaagttacacacttgattttttcttctagtgtgagtaattatttttcacacttcatcattattatgccttcacttagttttatattactttcatagtataatacaaagtgagaattaattaatcaaaaccttaatgatacttgccatttttggtggccatcaaacttccagtggctccacaagcaagagcttgactaggtatgcccttaacagaacgaccttcaatatcaaaaatagctcccattcccatatgcaaatgaggctcaatgtggcaatggaaagcccaaactccacgattgtcagccacaaatcgaagtgcagtccaaccccatggaaatataactgcagtgtttcttagaggtgggttctttaagttaagcttttcctcatcgttcttcgaattaaacttaccttctccataacccaagacccaaaagtcatgcccatgcaaatgccaagggtgaatttcactaacatttggggttatagcattggtgttttgaagtataatgtctaccgtggtattgaattggagcctgtagatcccactgctagtggtgacgttggtgttgacaggtggcttcatgatatcataatttgctgggtagttttctggtgggctggtctggtcaaatgtatggtttagtaaaaatttaactgagcccaaatatggggtagatggtagtactaaggagacattgtttacggcccactttgttacaccgtttaatctgttttgagtgttgaggagcatgatccgacggttgtaagttgttggaggttttggggaccccattcgagccaaaatatttttggtaaaggatttactgtggttataatcattccattgtggtgtgactggaggtggtgaaacggggagttttgatgctgaatttgggagataatttaggagggtaaggccttgtggggtctttggttctctccctcttactcctactgaaacccagtagttgtttctagcgttttgatctgtggttattaggactgagtaactttcgcctgaataaatgtctaaatcatccactaagaatggttgcacgtagtttccatccgcttctactaccaacattttgtgattctgaaaaaaaattaagcaaaaaaaaggctatttattacacaacagatcatggtaaatgtctaatgatgcgagacaatataattatatattagaaaattgtaggaatcacctctcaagggatgtactcatagtttttgtaagttgttatttaagaattattgtaaaattttaagtaaatcgaaagaaatttaacacactaaaaataagatttaaacagtatattgtacgcgtgatttgtacgcgtgattattttattttatacacgtataaaatagatcgtttgaacaattttaatttttatgttataaattatttcgaatttttcaaaattttataaaatatcaataattataatataaaaaaaattaatagcaaaacaagtaaaaagtatatcaatacatttttttgaagcgtaaattctagaatcaccatatataatattccttccttttctattatgtaagatgtttcgaaccgatttttaatttacatataattagcagcattcaaaagcacaaacaaatgaaagaagaagaataattatacttgtgccaaatgaaaagggaaaagaaaaaaaaatacttctacaaatggcctctttccaagatatgcaattatgttcgtatgtccaataattatattttgttggtattttattgttaaattaatgagagacaactcatgagagaggtggatgaacatgtgaaatgagtcaaatgactgatccactaatgatgaatagtacacggagagcctgtagtgagcttaattagaataataatgcaaagtagcatatcggacccctcgagctatattagaaataatacgtactttagaaagaacaaaaaaaaaagaacaaataaaactaaacttgattaatatatatatatatatatatatacatagtcataattgtatgttattattatatacattctctagccaatagatttaatttgtacctcctaaacattaatattttcttgtttttttctcattatatatactaataatatatatatatatatatatattggttaagaagcaaggtatcttttctttttaatatctttggcaatccctttaattccgaggcaatggatccctatgtttcatattctatattaatgattattttatgtaaacgcatgtatataactgaattaattaaatagaagaaatgtcaaaattaaggaacctgctattttatattttcaaacttttatcaatcttctgaatgagatgatacccggttaaactagagtactagtaagtctagtattattactcatatatatatatatatgtcaacctctaatcacgttgattcatgatgaatatatatgattatcagctaataattaaggttaattagtcatatttacaaataatataatttcaaataaagaagaaaagagaatacaagctatgtatttgttaattttcaattttgttgtcaatctttaattataaagaagtcctatatttgggagtggccgccttagacccagaggccctatggcccctatctataaaagcaagctaaattttattttcttttctgaataaaagacaaagcaagttaaaattattccttgttgtaatagttactttttgcttagaaaaagtgttcaaatgattttttcaacttgacccttttcatgttaaggaaactaaataaaagaagaaggttttggtctgatctataaccaacatgaacctaatgtttacatgagatctactttcgactttcgactttcgagaaaattaatgttattttttttttaaggaaatattaatgttattaggcgactatatatatacacatcttaattacctcattttaccatgtgaggtggtatattaattatatatagatatatataaatcagagtctatattgtgatgtaagtgcaagttgatatatataaaataaaaatatttacaagaaatattatattataatattggagaaataatataattatatatctatctaaatatattatattgaagagattaaagcagatagtacgtaatatagataagtaaataataattaccccgatggccaagttgagggcggctagagcagtggtactggcgattcttagtcggtaggcttattgggctgcaccttcagaatcttgggtgcgcactttctccaccctttaagttgcacttgtttgacgaagagttgctataatgcgctgccaatgagcaattatgttgtcctcttccattcaacaacaagctctgcaaaattaagcatatccaaaatgagattccatatatatttatttatataatatatatatatatatatatatgttacgtaatgcatatttaccttacaacttacaagtaaatccaaactgtgcatgcacgtactgaaatattatacatgaattattttttttttggttttaattctctacttatgatagttatagagctgtattaattaaagttgtctgaagtaaaataaaaacatatgtgcgatctcttttttattttctttatatattatttgggttgagatatggtctacaaagtacaattaattattagaaaaaaaaaacagaattatttaactaatcctagtatgacataaaaagttgaaaattagaaaattccccagtacttttgttgagtacactatctagtgtaattaatagtaataagttgggttgatggatatataattatatatatggtcggctatatttaatatatattctctaatattaattaataggagtaaatatatactcgagataaatttgatatttttttttaattttatagttacgataaattaaaaattaatatgtagaaaatatgtgttattagatctattcgcatattatcaggatcctcgtcttttagtaaagttgaaaataatcattttcttttcaccgaatgatcacttatcaaataattatccagatatgtttcacttatcatatatagctgtttagacgtaaaattacgaatacacacattttatttgtatattatacgtactttaattaaatttatatatatatata

SEQ ID NO: 297841 - DNA, 1525 bp, Cannabis indica
ttttttttattcctttagaaaagaaataaagaaagaaagaaaacgtttcaaaaaaaaaaaaaaaaaaccgcacacatttacagcacaaaaacatactatataagaacaaagaatttaccctacccccacggtcaaaattcccaattttttaaaaccctaccaaaacccagaaaccaaaaaccatgataatcaccattgtcgatcaccaggataactcctatacccataacaactacgatgtaaagatcgggctggtgactaccgtccgaacattagtgaccatctccggttccatggtccactcctggatccaggacatcaagcgtatccacagtcagagtctccaccgtcttatcgttggactcgacgtagagtggcgaccatccttcactagcggcgtcgagtctccggtggccataatacaactctgcgttgatgataaatgccttatctttcaactccttcacgcggactatattccgaattctctgtccgagttccttggaaactctaatcacaacttcgtcggtgtcggtgtcgtggccgatgtagagaaactgcgcaggcattaccaactgtacgtacgaaatccggtggaattagggaatcttgctgcgtataagcgccaggatcagagtctgaagaatcaggggctgcaaaggttagcgacgtacgtgctgggactggacttggacaagccgaggagcgtgacgatgagctggtgggataatcggtatctgaattattctcaagttaagtacgcatgcgttgatgcttatgcttcgtctgaaatcggtaaggtgttaatggctgagccagagccgtattttggatttcgttgatgggtttagtttctactctagtcgccgcaaatagttttattttcttataacagtattgttcatgttttagaattctgtttgggtaattgtgaataatttagtttcaatttcagttcggtataatggtctatagtattgcttttcgattttagttcagattccaagagaaaagtttaatgtctttcaattccatgttcttataagatttaaatcaatttgcaattttttttttagtaacatggagatttatattgatttagtttgaagaatgtaaagaacacaacgagaagttgcttttatttcccttcgttttcagctgtttgattctattggcaattatattatataccaatttaacataaaagagaaagctaagtccacataaaatcaaaatctaaaaaaaaaaggctacaatctcaacttaagaatattttaaccaacagaattgctaaaagtaaagcacctccaatcgggtgctacttatagatagtattaggtgctcaataacaatgctcttaaatgtatatttttttacctactttcccaccttaaatttcgtaatagatggaatagtttataaagaattagagtgacggcacaatatttgaacataatattttaaaatggcataattgttataaatattaataattatgtggatgtccaaattttttattattacc

SEQ ID NO: 297842 - DNA, 2775 bp, Cannabis indica
gttttcttaaatccttacgtgttaatttcattgttttagagaattcatatttaggatgttaatgaaacatacttgttagtaaagctagatcctggtaaaatattcccaacaaaggccctggccaaccatgtctagctggccctaaaggaaggttataagtcgaccaggtcttgagaataagctagtcacgcaaatagtgattattaaaccaaaaaggcttgttcaaccaaggaagcctgacccttgtaatggaagctacacaaaaaagctagaaaagctagcagtcccataccaagactgacaggtacaaaccaaggctagcaagcacaaagaaagttggcaagcacatagaaagcttgcaggcacacaccaagacttgtagggacatagaaggctgacaagcaaatagaaagcttgtaggcatatagaaagttagtaggcacatgtcgaggctgtaggaatagtacatggtcgtccataggaatgcataggctgaccaggccctaaaaaatcgggctggccagccaacatctgtagacaactctgaatagttgagaaatattatgagataggttcaacaaccctcaaaaatagggattttccaataagatattggtcctattctctaaggatttagttattcttttatgtaacttaattaataggtaaaatgatgttaatattcctatttataagggatatctttacctatttgatttaggattgtttgtaagccatacactctataaagggcattctttcactctcacaacgtgcaagctgctctctcttaatcctcacattctactaatgcctcctagacactaagttaagcatcttcataagtccttcacaagatcttatcagttcttggtctgtaacacattgttctcataattgtaatactgaagagagccatagctagaaatcacaaagttttcacctatgatctgcatggtgttatctcaagagtgaatataactaaaagggagtaggtcattactcgcttaacaagggggatgaacctctataaatctctttgtcaccataactatttactattcttatttacacgtggtgaatgctaatcattaataaggccccgctataagtgaaccaaattctgagtcaacattttggtactttcattgagagtcctttttaattccttcatctctttttgattaatcatcgtggttctaacacaaagaactctcccctcagatcctcctcaggatcccatgacggtagatcctaatattcttattgctctaccacaagaggtcctactaatcggcataacaccgtcaatccggcccatcttgtgaatcctattgatcccaccattcctctaaggctggtacaacccgtaggatctcatacagaagaacaaattaacatggaacaacctccacagaacacaaatggggttgttccatagtgctctacaaaagaaacagggataggaatcgacaaactagttattggtgaacctcacttggcactaagagatggtattgagttggccaggcttagagaagctataggccatgtcactaaggtggatggatgaccaggaggccatcctatgagttagtcaggtagaattaaatcgccataatagggaggctaatgacctgataaggtaatttaatgagaaaaatattagaagaggtcctgatctgataagagatcctttggagggaggcctatagacagatcagacaagatttacaaataggtagacaatggatagaatgtccaaccaggtccctggaacaagagaacatacccttccctacctgatgatggtaaaatcttgccagacaaactgtatgggacaaaaagccagttcctagcaccaggagccattagaggacaataaagcaaatctaaagagggggtattacatactggccaggccctggccgatcacaactatgactctctctcttagggtatctgagaacaagttgttctaaggcctagggaccctgtgcttgacaggctaggtcctaggataattgacaacacataggataacattaactcgaggagtgagaactaaaatgactttattccaccactagaacaataatttttggcaggtagatcaaccaaactcaagaaattagtatgatcaacctcccattaacccatagactagcttggctagacagaagaatcaggctagtttggttggccaagacagtccacccaagcaaaggctagccggccaaggaccaatgttctgccaaaggatggccagccaagtcccaatatttagctaaaggcttactagccaaggctccttgttatgcaaaaggctggcaagccaaggctagttgcctagccaagatttggcagaccaaggatacctctctagccagtaaaggctacccaggaaagagcccacctgattagatccatctgtgcaagcacaattggatcaactaaaagacatgatctaagacttgtgtggcttaaagaaatttgacctagatttggacaggtcaaggggattacccttcacagagtacattaatgcacttctccttccaaagttcaagatgccaacttgggagatgtacacatggaaagatgatcccctagcacacataaaatactttaacatccaaatagatcttaaaaagtaactagagatgtgtaataccgaatatttcggacaaccctgtccgaaacaacccaacaatggtattataggctagccctaagaaggtttaattcttgggaagaattctctcgagaattcta

SEQ ID NO: 297843 - DNA, 761 bp, Cannabis indica
ttgttttgagggtgaggattcacatctttcacatcaacatattattggaaacttaccttttttgtttatataccttttttattttctgtgtcacacatgggcacgaagaaggactgtggaaacttacctttatgtataataagaaactattctctgcttaatcaaaccctcaaactaattaagaccaaaaattcgtggtactcacgacttctttataattaattatataaatacattttgatttagtccatattctggttgtatatacaacaaatgtacttttaatcaccctattattgctttttctcctttgaccattatatttaacagactctatataattgaatattttaatttttaagttcatattatataccatacgtacattagaattaaactgagtttttcgaatgttctatgttacttcttaatttgaacatttgtcttcttaatttgatcctttcctctaaggttattgctatcttaattagtgtttatatatagtatatattaaacaatgttagttgggctgccattcttgatttggtgatattactagctaatagcaaaaattcaacttcgtccactttttaactgctcctgattatatattattcaaaaaagaataatttacggcataaatacttaaatttaacttttagttgtaaataagtactataaatttaatgtttggcggtaataatactaaaattataattttagaacttctgtaagtacctggttaaataaattgacacgtg

SEQ ID NO: 297844 - DNA, 2885 bp, Cannabis indica
tttgtcaagtgtccagatatatctagatttgaatggtacaacaaacaatattatccacataacatttgtataactttatgtttatcttgctatactcaatatttggatacttagaggtgggatttgcttcaggcatcctttctccatcacttctgcaccaggagatgactacttgagtgttcacataaggagcttaggggattggactagagcacttagagacagatttgaaaaggtagcaaaaatcatggactgaaactaaacttgtaaatcatgagttttgcttggattttagtttattgagtcaatatgaaatgcaggtatgtaagcaggaaaatacacaatcaaagagtggagatcttgtgaagatggaaaccaaaggcatctcagatgaagaactccaatcaaggtgatcagaaactttagctagacatgaatgttcagaaactctatcatgtgaacaatattcatatcaaacattgtcctttatcaggtatcccaagatcctcataaaagggccatatggagctccatctcaaaatttcgatgattatgacattctcttgctcattggtcttggaatcggcgcaacaccattcatcagcattcttaaagatcttttgaacaaaatcgagctcaatgacattgaagctgtgagtttaaaaggctaaaccatttagtacattattcttgaatcttaaattggaaagcgtaaatactatattggactatgtgttttgcaaaaattattagttggattttctgtttttttaaatgacaatttagattaaaacttattaataacttaacttggagatgttatgatcatactgattatattttttgtatttgtttgtgctagaaactgatctcaagttcgttatattaaagaaaaaaatgataaaaattgagctctagatattattttatactttttttgaaaaatacatggtcaatctgattgaggtcctgaatagtgattacccaattagaaatgttgtttaggtactaacaatcaaaggggacactaatgcagggctcaagaggtagtagtccatcatcagaattgaatggaaatggtcttagaagagcttacttttattgggcaacaggagagcaaggatcctttgaatggtttaaaggtgtaatggatgacattgcagagcatgacaaacatgtaggccttaaaaactcaattattattattattaccataccttttagtaattgaaaaaagtttttagagtgaatgagaatgaatcattcactaaataaagggttacctttaaaaaagaaagataagcaatcacatcaactaattgaaatatttggtgacattttgatggatccttgaatattaatttgcagcatataatagaaatgcacaaccatttgacaagtgtacatggagaaggagatgcaagatctgctctaatctccataattcaacaacttcaacttgctaagaatggtgttgatgttctctcagaatgcagggtatgtattaattttcaattatttataatgttacaaaacattatttgttaacattatttgttaacattatttaacaattgtttaacatgtaattaaattgattattttgacagattaaaacacatttcggacgacctaattggaaaaaagtattttcggatttagcaagtaggcatcaatcttctcgaataggtacgtaattaaacttgacctacattacactgagtaatttgcagtaaaagtactcaacatttttttctccatagtgaaaatatccaatatttaattttggcaaattatgatttttgtctcatgaactttgacacatatcaaattatatccctaaacattttaatctgttaaaaattcttcctgaacaactgagattgttagattcaataactattttccaattccgttcaattttactaacgtggttattgtctatatattaaatcttgctcttcgaactttcattcacgccaaagttcttgaatcaacaatctcaatagttcggaagaaatttctaacatcttgaaaaattcaggaaatataatttaatacatattaaagttcgggagttaaaattcttaattagcatttctaattagtgataataataaattattaaaaagtttagatatgaagatttatattttggtttattgatttggttaaaggtgtgttctactgtgggactgctgcactcaccaaaaagttgaaggagctttgccaagaatatactttgaatacatcaactcgattcgattttcacaaagagaacttttagacaacagttgagttgtcccattagtattactaccaaatttgtgtacagaaaaaatcaactactttcttcttattatctttatctctatcttatttggtatttttttgtgttttgaaattaaagtagaaaagttgagcaaaaagtagtgtgatataatcctacttgtggagcaatgcttgtctatttttaatattgagtggaataaaaatttaaaataaataaataacagttgggatttattcaattgtcttagtcatctccaactatagcactatatttagtattgcaccaacattaaaactagcactatatattttttcctattccaacggctaaaaactactccaaatattacttttcatattattatattaatttcattattaatacatacataaagttatataatattaatataattaaaaaaaataaaaatatcgtaatctacaatgcactgctatatataatgggatactataacaaaacggtaaagtggtggacattatgtcgttcagttggagaaaaattacacactataaatacatagattatttcaaaaatacataaaaacaataaaaaaatttataaaaatacggtt

SEQ ID NO: 297845 - DNA, 3746 bp, Cannabis indica
atgctatgaagctttatggtagtattctaaaaaagtgatgctgctttctggtggatttgtactttgaatatttgtatcagatgattcgctacatagaattatttcctatctagtcatcgatggtgatgtacaatggaaaattttggtggtttgataattagataattggttcttaggtttatagccttacaattaactggatatacgagacttatttatgagggttactaatttacacagtggattagattttcattctctcgcttgctgtttggactatttctgttttctattttttttttcattatcaactaattacttcatataattggttgcctgttgccttttctccatttctcacccttagtttttattttactttaattgatgagatgaaatattgacctatatttatgtttcttttccttatagcaacatattgttcagggagtttgccctgatttcaatgtggagggtgccagcaatgcccataggtgcccacacattacttagttttcttgctgaacctttgaagcaactatcagaatctactgatacattggagaattataatgcttttgagaatctgaatgaattccaggattgggtatgcatgtcttccttttctgccagttggtagccaacttttaagatcttttgtgtacgtgcatgtgtgtgtgtaggttctctattccagagttcaattttgatatattaataccttctcttttaaaatagagtgaatattattcctgtgatgcaacatatcgcaactggctcaaaattgaagtagataatgcagaggttcctccggtcaagctttcattggaggaaaaagagagaactattttagcagctagggagactttgaagtcttctctattattgttattgagtaagtaaatccacatctttatttttctacaattgtattcgaaagaatggaatataaactgaattggctagaacttaatgtagcatcaaatttttggactggtggatttttctcatatcatatgcaacttcttggactctttcgggttaatatgtaaatacattgatttaaattcttcactgttcaggagaacatccatggttagtttttactgaagaccataacaatgaattggcggagcctgcattcctcgaactccatgccattgcaatgatctgccttccttctggtgaatgcatgtgtccagatgccaccatatgcacaacattgatgagtgccctttactcttcattggatgaggaaattgtgtcaaatcggcaactcatggtatgctgttttatcccaattttgctaaatatgaaaaaatgatgaaaaggaaaatttatataagtattacttaactctatttagttaaatgatatcatggtgcaaactcttgtggaatatcagaaatccatcctttctgcataatcttggctaaccatgctccttttacccgcttattctgaaacttccttttgtaggtaaatgtttttatatcttctgtagacaattattgcatcgaggtagtgcttcgttgcttggctgtagcaggtgatggtcttgggacacatgagctaaatgacggcggtattcttggtaccattatggctgctgcctttaaaggtatgaaattccattgaattgtcgtgcttttcttgtgagttgctgttgttttgtgaagtaaatttaccatattggaggaattttgtttcaagtaaaattgtttttgaacagcatccaggtgtctgtcatatttgatcaattttagagttgagaataaattacgtttaattatagataccttcatggaactttgaaatcacctttttttgcaaatgataaatgaagtaaatgagttgccaaagaactcataaattgtctttgaagctagtatgatgaaaatgaagatgggtacactgattcacttgttatctttatgcaggtgagcttcctcgatttcaaacggggattactttggagatttctcgattagatgcttggtattcaagtaaagatggctctttacaaggccctgcaatgtacattgtgcggggactttgccgcagggtctgtcttccagaaaccattcttcgatcaatgcaggtacgctttctagttatagactccatttgcaagttgtccctggattactaactttaaatgtgatgaaagcacaacttcatgttttttggtattatttccgatttctgtgttcacatatttgcactttccatgtcatgattgttaacatatatgcaggtctctgtgtcactcatggagtcaggtgtcatgcctgaaagcttggataagttgattgaactagtggctagcccagatacaggatttcttcatttgtttagtcagcagcaattgcaggtaagctactaaactcatttacaaaggaacaagatccgagtcatgtacactgattcaaaagttgagtttttatctttatgcaacattttatgtgattgggtggacttctttcttgtgcggaaagtagtcttttcagtcagaaacttttcttaaagattatccattttcaaattatagctttgtaagattgaatataataagggtgttatattgttcgaggcttactgctaggctttctattctaatctaaacccatattttgtatgcacatatcattaaatctcatcccattaatttgtttcaggaatttctattatttgcgagggaatactcgatatttcaaatggagttgcaagaggaagaagaacagacatgattatattgctgctgaagattaccgaaatccccacaattgtattttatttatatgttacagaagctgctgcagatgtgaaatgagaaagaaaaaaaaatatgtgttctatatttcttatttctgttgtataggcatttctctttttctctctcttgatatgcgaaatagagaacctgtgatatacttaattttaattgctgaaattttgtaggagataatatgggattaatgtagggtagtcaaatttccttgatattcatctttttgtacttggattcataaattaatctgagtcaagtctttagttttaataaatatcatctattatccgaatcaaacaattgagctacttatagctacttattgaagttcttttttttgaagttttttttttttttaagtaaaaaaagtaagacaataactaaactacgttagatttggataatacgttatggatattccatcaaaaagaaaaaaaaaatagtggataataacttaaaatatgtttggtcacattaatacttattaaaggcaataattagtttacttggacctcaaatacacaataatttatacatgaaaagcataattgggattcaaatattctctcgaaagcggaaaagaagttttgaataaaaatgtcgcttaggtgttactaagctatgttattagtgtttttcttcttcctattgagataagtaatgacatggaataacgtatatggtaaagttttggtagaagagtttcaattttattcattgtctagggagaaattgagtaaacataaaagtgtgggagggatgggctttcacaatctttcggatcataattaatcacttcttagtaagcaaggctggtgactttttactcgtccatactctttggtttcaaagattttcaagaaaatgtatttctctcatggttcttatctcacggcacaattaggtcataatccaagttttgtttggcataacattcgggagactcaaagtgttg

SEQ ID NO: 297846 - DNA, 815 bp, Cannabis indica
aaagtgtgatacaaaattaagtgacaaattatgttatgggtatcaaaaaggtattaaattgtcgtagaaagaatgtgtagataccataagtttatttataatttattgaggggccaaattataaatacccaaaactcattatataatgaaccttctctggaatctccaacaatggcttcaggtttgtgcttctgctcatcttttatcatcttcttcttctttaaatttacaaaggctctatagatttttgatttaggattttatatattaaaacacttttagaaatatgtttatatctgtgatatatatatttctcgagtattttataaattctaataattatttcttaaaaagttgaagaaacacgtctactagtgtcttttctcttctccatctagtagctgccaatttcgtgttttccgaccaggttcgccagcctttcttgggcttgtgtgtagttttgttgggcttgatgatttgtactatagggtggatatgtggtatctcccttttctttaccgtctgaatatttctttttttttttcctaaaatttttcttccctactaacgtttggtttgcattttctagaaattttttcgaattgtcgagcgacagatgttgtagatttaagaagcctcgctggttgaggttcactgctaccgtggatataggtccttctccaaatctagcaagtcgtgagtcaagcccttcggtatgggttggttggtggtggtcaggtgttgtggcctttgtgggtgtgtgggcgtatagtttgtagctgggtttagggttcaggtgttgggttttgtgccct

SEQ ID NO: 297847 - DNA, 1371 bp, Cannabis indica
atatttccatacaaaaataacttaaaaaacaattaataaaatatatttatgaatagtgtattttaactttaaataaaggagtttagacattagttagaagctgttgagtgctctatgtaaattattaatttaatcaggttatactgaacggcatgcatccatcaatgaacaaatatgcactcatgtttcttattcgcagaaagatctaacgaggatggaaaatttagagtaaaacagtacacagtttatatatataagcttggaatatagcaagacattgtgcaataagaaacccattgggtcatggttccaggtaggtgtggagttgctttcctggaccttcacttacatgaaattatacactcagctactaagatgatataacctagacacaagggactattgcttccacgtacacctaatataattacaggcttgaatcattgctagctattcaatgccgcaacttccatttccaccacaacattttccttctaagcaccatcctcttcaacattgttaacacgttcacactcgtcgatccattcactgtatctgcaagagcaaaataatacatatatgtaaatgtgtaccgtgtagagagacccagagagagagagagagagaattttacttacatgtcaattgcctcagttaaagctgaaatgacagaaaaataagatttgattaggaggaaagataaaaataattgttgtaaaaactaattggaaattgaaataaatatgagaccagagcaacagctgaggatcaacaattgggatgaaacctcctcaaccaggctacagtcaatgtggcatagctacttaaagacacatacgaaaaaaaccaaccatttttggatactaagatataatatttaatatagaggaggctaaaatagactcaagaagagtttatgttatattccatttttgtttcttatcatttcttcctaacattttttacatgaaccttttttaagttgtgctgtgccatactagaataaggagttccacctcaatggcccagtacagtaagacgagcttaagttatgtattgtgccttgtgcttccataccatgccatgttgaggctagaagggtgtatcctatagtaccaaaattggctaatttaattggtgggttttaattatgggttatggtgaagagagatcctgaacttcctatcaaaaatgatccttaaaacgatcttttgggttacaaatagtctcagaacattttagtatacccccaatggccctgaaactatctagtatataacaaataggaaaaacttggtgtgactaacatgcttagggcaaggatatatcatgaaatcatatatttttcttttgataaactacattggaaaa

SEQ ID NO: 297848 - DNA, 1361 bp, Cannabis indica
ataaataatttcccataattaaacataattaactgctaatttccaaattaaactaagcggtctttacagctattgtggccccctatactattttagccgacctccttcattggatgagaggggattgatgaaaggacagaaggtgcttgcttttgtagttactgttgttgatcttgttacagaggttgtggaagttgttgttgtgttagttgttgagcttggggctattatggttggtgaggtttgatttgttgtcttctgttgctgctggagctattgttatgatggttgtgcatgtttttcttttgatggttgttgcttggtttattgttggcttgggacctcgacctacctcagatttccttctcccataagagactactactcgaatggtatcacctttcccttctttgcctccttctcaaagccagtaggataatatgggtgcttggtggataatacaactttcttatgcaacacaaaaccttccatgctttcatctgattgtgtagtggcttccacactatcttaggttgctttaggggtagttctcctggaagaaaccttaataggagccagattgagttgttaaagaggtggaatgtaacacactcctaaggcgtgttatcgtgattttcacttagttgtgcagctcgctactaatcaacgagtttattgaaaaacgtgattaactaaaactttatttaaaaacatatcaatatcaaaataacatatatataactgggatcccgagaataaaatatttacaactgttacaaggtatgtactacaaaagttgccgcctagacactatacaaaatacaacaagttatcccaaagaccgtatgctccaggcctaactgccccgacatgtacaatctccatccgctcgctcttacgattgctcaaccttagccttgcccttacttacacatgcaaacaatatatgtgagtcaacaaactcagaaagaatagcataatcaatatcataactataacccgaattataatgaggcgcccatacacccaaccaaaaccctatccccgtgttcaacacagtactgagtctataacgttcaaacaacaatactattgaccataatatcagcctatactccgcactcttgtcatactctagtcgtatcgatgtgatactatcaagtagaacaatactattaacaataatattagcctatactcggtacgctagtcatactctagtcgtatggatgtgatactgtgaaatagtacttaagccaacatacattcatcaatatctaatataatactaaatataatgacatcgctattcgaatgtaatctaacaggcttaacaaatatgtacgctaaacatgtaatca

SEQ ID NO: 297849 - DNA, 671 bp, Cannabis indica
tttctttttctctttcccccacagtctatctcagtctatctctctcttctctctttatatctctctcttcaaagtttcaaaagaaccgcactatatataaccaccaccggtagtgctccgacgaggctttttttggctaccgtctgaccacacttgcctgagcattagactccccacatgccgatgatctgaaccccaaagcaacacctcttcattcgctaccattagtgagaaatctcgagtcaaagtttggaggttcaaactttgaacgtattttccaatcaacttcagtttttgtttgatgagtcgtcttcaccacaagactcagcttgtcgaggaaaaccgtctacactaagtcatttcacccaacttgctacctttttctagtgatgttttcttagcgctgcccctttctgctaactttttggcgctaccatgtatcatcttgacgaatgatttgcgtgggtatgatctacttgtcaggtagttcttttgatatatactacccctatatgtacgtatttagtgagattttagaattttaaactttaaatataatcatgtaatatgtcattaggctaagtttttaatgtagaattgaatcacgatagtatattgtgttagataaattaacaattaacccaagatctattagtatataacatagaaca

SEQ ID NO: 297850 - DNA, 2888 bp, Cannabis indica
aaaaaaacatgaatctttagtatgcagacttggcttgtcacattgttgatgatattacgtatatattactctacccagaaggaccaatcggctttttagtactgatcagaataggaacacgaagtgtccttttcaaaacaagattcgtatttttttcaaattcaaaaatatttgacgactaggaagaataatacactaccaataaactcttttatgtgcccattaaaaaaaaaagaagaagaaactcttttatgtgcatacaaaatagagttatacatattattgttttcgtaacaagagaagacacacgataatttggggatcaaagtgtcataattatgaatatttttagcccataatttcaaactgaatttaataatgtcatgttaataacttaatgtaactttcccccaactaatttcactttttggtgaacaacaaattaattctagtaacaaaaggcgtgactagtggtgaaaagtaacaaaactggctatcattcattcttctctcaaaaaaaaaaaaaaaacaggcacttttttactacaaacacaaaaaaaaaaaagtagtcatctttagcaggttcgctcatcctcgaattcaaatgccatgaagttatttaagttaataagaagtcttttcgaaaaagaaaaaaaaaaaaaaaaaaagaagaagcagaaggaactatttcattaaaagtagtaaaaaaagactgggttcccaacaataaaaaacgagcaaataattttcaatttcaaaatgagaacaagtaatgggcaacttttttaaaatgtattatttgtatacgtgaacagaaagagggtgtcgactcgaggaataaatatacataaaagctcagacagaaaggtcattgtcacgtataccaacaaaaacaattatatataattttataattttatacggctaaaaagcgacatagagttatgttcatggaatacttgttcacatccaaattttaaattttgaatactataacaggcttcaaatatcataaacggaaactatatgaataaatatgacaataaagtggaataatattacaaaaataaatagatcagctatataggtcactaaactttattttaatttcatgaatggggactacttagggagctaggaccacctattccaataatttgtgttctcttcacatttcattgggtcatagaatgaaaacacattttactatgagtataatatttgcatataactattgaatctaaatctaatagaaaactgtaaaacacattgggtgcaaggtggacaagtcttatctttgacttttcttttactgtatttctaaataaatgaatgttcccctcaaactatgcaaccataaaccaatgtctctcctttcactgtgataatttacagtgatataccaagtcggcaagtcgacatagatatatatatatcatatatatatttagaaaatagcattaaccaaagataaattaaagacaaagacagaagagaaaaaaaaaagtgtaaacttagttaggatttttatgtgatgatgatgcctaaccaccaaatacaataaagataaaaaataactaatcataaaagttaaagagattaatagtgtggttcaaaaagaaagataccagaaagcgtggaaagaagccagcttggtttgtttgggtatgtgttgctgttggagcacaagtttttcatgggaggcgatccatttgacgccattaatgttgctttttccatcatcattttcctgcaatccaaacacttctagtcaattaattggtcttgtgttgctgttttctagttttaaatgcagatgaactttagggctcaaaaataagtactgttacaataataataaataaataaataaataaatgagaacagttagctatagatcacatcaaagaaacattgaaacgtgacataaataatataaaaaattggtgatgggtagaaattggtacaaaatctgaattgcattaataaaagaagaagccgtacaagtaccatataatccttcgtataaacattagaagaagcaacccataaagacaagctttttattaaatttgtagaaaagaaaacagataatcgtagatctcgaggtaataacaattaatattttaagcaaccattgaagaaaaataaaaactcaaattcaaatatgtcagagacgaaaaattaatacatatattgtcaatctgaacattcaaaactgtggtggacccaaatccccatgcatacacatacatatactctttttagtcactctagaacaaaaacaacataaatagttttaaaaaactcttgtttggttgccgagaaaacgctagaaaatataacttgcaaatatgaatatccctaaaaactaagccaactgacctcactcgaccagagtaaaacaatccattatttcctaaattccaaagtcacagaaagagtggatactagtttataggagatcaaagaaacaaaagtttctcgagaaaattcgttggttaacctaataaaagcttaccaggagcaccggcagagccgggtggaaaggaaactagaagagaggtgagtgagggaacgaatcctgtatacttgtatagttgtataggatactctcgctttctctctctctctctttctctctcgggctcagtatttatagtctgaaatttcgctcaaatccgcacccgatgtgggaccttttgaggttgactactcggctttttatttatttatttatttatttatttttggatatattacctttttagaggcacactaaatttggtgttacactatcactaaatttagtgtcaaaaagtattaccactccaaccacaacaccaaaaattacactaaaaaaatattccttattattatattatttt

SEQ ID NO: 297851 - DNA, 3692 bp, Cannabis indica
taattttttttatttaagttgtatatttatttatttagctaggtagaagtatttatgtaatattgttactttccttagttaaaattgaacaaagccccagaatattttttaaaatatatgtgcgagtatgtaaatagacacaaaaattatagtggtttagtaggagctcggcctacctagtaaacttttaaagttattattctatatttttattcaaattagcctcttttgaatggaagtggatgcatgtaatgactagatagttaaatcatgagaattagaagagaataaatgatttaattattaatttatgattatgtgctccttagtagggtttaggatttattgtcaaaaataggccatataaaaataatatcttaattatggagatatatttaaattctaaatgtattatatatgttgtatgtaaaattttacgttttttgtgttttgtgctctctgtgatagtgtcatacgtcggtttgcccattagagtagatagtggttaagtatcttagaattatcaagacaagaacgttagatatttagaatgtagggatcatttaggaatatagttttagaccatttacccctaggttataagtttaattcaagaggaagaatggaaaaaattatcattatcccataagttattaattgttgtctttagtggaatttgtagcttattcctaagactaaatgctaattattacttgaactaaataagaaaaacttggaattatctctaagttagaaaaaagcaaaactctctctttccttatttagttcaagtaataatcaccatttagtcttgggaataagctagaaatttcagtaaagacaatatttaacatctgatggcaaaatgctaattattatagagttttacaaaaacattattataacttgagatttttggaagctaataaattagagcttaattaagaaaggagtaaaatagtaaataaaagataaataatttttacatggttggagcgttaacaatcactagtccacgagtcagttgtattggccttttacgcaagtgtttgaataattcaactgtctgtagtataaaccatagctctgtactcctttcgtttctctcgatgaagaagaaagctagaaggaattttagaatagatttggctagtatcaatttattcaccccttgtacataaataatgaggatatttatatgcttacatgtggatataagggtgttccctttaccgacctagggtttcatgctcaacacgctgtaagggcaggttcatgacaatctgaccattggttgataggaaacttccccattgtgttgtgtacgactacactgaaggatctcttatggatagggacacacatcattcaaagtttttaccttaaaaagttattgcctagacaagccattcgactaaaaggaggcttcagtggcacatatgcgcattgccatggtctgacacagggaacatgatctaatttgatgttagagggtaagtaaatgtcgctctgggtttcgaatagggtactatcgaataagctctggtattaacgagccaaagccttcccgaatcacactgacctactaccttttctggaatacttaaagcttcagagaactctgatccttcccaattacagatggataataagagtccttgagcactattcgtactcgctaacattggggacctttaattggcttctagaatatattaaccttcaccatctccaagcagtcagcatatactaatcttggatcatccagagtggcactcctttgtgactgccacgtattagccatctgggaatgcatataatatttacccccaagctcttgggactcttgaatgatgggaagcttccagcttccttctagatgcttgatctattattctgatatgccaatcatatcttgaaatttggaagcaactttttgtactactttggacaactaaagagttgatatatcatgtgatacaactatcgtgttgttcaaatgtggcatccattttgtgaagttatggggattatgtgccaggcttaggcacgtcttttatagacagtgaatggcgacaagacatgaaaagagagccggtttgtgctgcattggacttgctacatgaaatgataagtaatgaagaccccattttttctcaccaggtgcattaaatgcaaactctttgagtccccagttattggataaggcagcttttgatcgagataatttggaccgtatatttcaaaacttactaagtcgttgccatccatataaatgaaaaacttggcaaagaagttcatttttttctttgtcactttaatgtgcaagttttaacccacagagcttcctcaggaaaaacttcgaaccagaagaacactcaccctaacaaactcctctgaacttgaaacctcattttattttctaaccttgttggtagattttccaatgattgaagctcgcacagatgatgagttctgtccaggaaaataactagaccattgagcggcccgtgggaccttgaacaaccgcaagcaatcaacaattcttctgtaaaccatctgtaagtaagtattctttttatttataccactattttcttctttgattatgaaatgtggtttttagtttgtagaaatacactattttgcttgtgtagggttgaggtttgaatatgaggtttgatgtgtatgaaaggggttcgcttgaaccttagggggaatacctatagatctagggctctactgaggttttttctcctttggcctaggtcggtgtgagtgtttgtgtttaagaaaagtttcggtttttgatgttttggttaagagtatcttggtttaggtacaattctaggacaatctccttttcttctttttttttttttttttttttgttgaggggataatccagacttttgcttctattgtatttttaggttcttgatttgtcaccattgcagattgctccttaagggtggcctttttatgtgaagagttctattgggacctcttcaagaagtttggggaggccttccccatatcctatttgacattttgatatggggtattaaccacttaggtgttctttttcatcgcattttacagtgtctggtgaaaatgatgactcctattttgaaatagtgagccttgacaagttctctggagcatcttcagtgaacgcaccccctatgtgttcgggtcttgaggacccagctctaggataagggccttctcacgacatccaagttacaagaaaagtgaatgagaaaggtaaacgtaaagcctgcgctacttctctatcccctttagcgcttaatatctcattctgggagattgattcaacatcccaatatgctaaggaattatagcttgttggtggtgcattctagtgatggttgcatatttcatgcattgcccacagctcaattttgcgttaaggcgagaatcatgccttttcagcttcttccagtttcttacaaactgttatccaaatggtttgtattttgtaaatcctagggccaggccaccccaaccccggtggaaatattgtatttttatgagttaaaccgcaacccttccgggggcaccctacaaaggttgggttctatctgttggaaatattttactaggatctagatttactacgaagtatgtttcattaacatcctaatatgaattctaaaacaatgaaatta

SEQ ID NO: 297852 - DNA, 7451 bp, Cannabis indica
tgagttttatttagggcataaaacccaatagaaacatggaggtgtacgtcgatgacatgttggtcaactctaagaaagcccaagggcacattaaagacttaaaggaatgttttgagatcttaagacagtatcgaatgaagctcaatcctctaaagtgctccttcaaggtaagctctggaaaactccttgggttcatagtgatctctaggggcatcgaagctaacctagaaaagataaaagcattgattgacatgaaatcaccaactaagaataaagacgtccaaagcttgacaagatgaatcccagccatgagtagatttgtctcaaagtccaccgataaatgtgtccctttcttcaacatcttaagggccaacaaaaaatttgaatggactgaagaatgcaaaagcaacaattatcccagcctctggtcctttctaaacccctagatggtgaagagttaagcatatacctggcaatgacagaacatgtggtcagcgcagtcttagtatgggaggaagataaggtacaacacccagtctactatgtaagaaaaaggttgataggggtggagagtagatacccccttatagaaaagctaccctactgcttactattagcgtttcgaaagttttgaccctactttcaggcgcactccatacaccaaatgttacagaagcctgatacgtcgaggcgcatccttcagtgggcgatagagggggcaatatgaaataatttatcaatcaaggtcggctattaaagggtaggccttggctgattttgtagttgaatgtactggggtccaagatgttgaaactgagataagagtgcaagagggtgaccagccattaacagtcattggcacccaaaggcttgacccaagcggctcactcgaatcacatagtctagatgcagagaaaaaggaagagcaaggtcaggcaatagaaacttggaagctacaagttgacggttcttctacatagatcagtcatcgggggcaagaattaccctaataacctttaaaggacaacgaatccacacaaccatttgcttcaactttcctgcctcaaacaaagaagcaaaatacgaagcattaatctccagtctgagactagcaaaggaggttaagaccaaatacttagatatttacagcaattcccaaatggttataaatcatgttttggtgagtacacagcaagaggagaaaagatgatggcttaccttatcaatatacaaaacctactcgcccaactagaggggtacaccatctaacaaataccaagagaagagaatgctaccactgatgccttggaaagactggcgacgagtgcaaagatagacaaggctggcgcggctggagatttaaatggtgtgctggtgcgagatgagcgtgagaggagcaatggctggtgtgcgagcgtgcgtgagactgagagtggctgagtgagagagaagacaactatggactatggtccaactccatggaggtctaagttttttttttcaaaaataaaaaaaaaaattgctaagtaaaataagatgatgagagtgacggctgctagggttggttggagagagatgaaggggtttaggttatgttgtattaggtttagccttggtttgcatatatgtatatatatatttgttagttgggctggtcggcccagtttgggttgaaaaactattagccgaaatatcaacccatttggtgcgggttgggcttttttcactccatgtgatgctcggcccattaaatctgaccatgcttcggcctatttcgagttgggttggccgggttggtcgacccatttggaacccatgcttagccctactgctaaggtaccttcctggaagatcctatttgacttgggcttgacccaagttatcgtttttaggcctagtggtgggcttttaatgctgacctgaagtccacctgtcccttgccggaaatacgaataacaactcttaaccaaaatgtttgtaaatgtgacattttcattagcaaaaaagttttctatccaaacataaggcaatccatgaaattgcagtttgtttgagaaaataatagcaaaatatggttgaaattgggtaatgttagaattttagccacttgttagttagtaactaacttaattgttaattaggttgttgctcagttttttcccaactctttggatctccattgcttgtttatacaaggagagattgttctaaattctaggtgatggtctagagagagaaattaagaagaaaagattgagagaagagggttatacaggggttgtgtgtgtttgatcacaattccctcaggtgagtattttgtaggtgcaagacaccattattgttattgatccatagagatcactctttgtaatctgagctactattttgaataaagacaggtcataaggtggttcctctatggggattatattcaagaaaaaaaaactttagagattgaaacctcattaatttttttgtctcttgttattaatgccatgacattctgtcaaagcatatgtttattattttagtaattttttccagttttctttaattaacattttgtgttagttagcattactactgaagctaatatattcttaaaatgtgttaattcacaaataaggtatcagagcttcaaggttgggatcaaatattcaagaactaagtttcaagttttaagaactcggcatcaatggcatcggttagatttgaagttgaaaaatttacaggcacaaatgacttcagtttatagaagattaagaggaaagctctcctagttcaacaagaaatttttgaataacttgattttactactatcaaagagcttggagatgacaagaaaaagatccaagaaattggatctaaggcttagtgtgatcttgttgagcatcagagatcaagtactttgagaagttttagatgagactactacagagaggtctcaactacagagattctttggacaaagcttgcagccatttacatgaagaaatatctagccaataaactttacctgaagaagaatctctatacgatgaggatggaagattcgaaagagttgaggaaacacttgtacaagttcaataaaatttttctagctttgaacaatattggcgtgaaggttgatgaagaggatcaggccattatattgctaagttaattgccgaaggcatatgaacattttcggacaccatttgcaatggcagaggtgaaggttgcatagaaatcaaaggaaatccagaagaaatccgatgatcctcatgacttaagtggagagggtttgtttgtgaaaggaagattagacaagaatggtttcaagaaaaccaaaacagggcacaaacaaaaatcaaaatcaagagttctcacaaacatgaaatgtttctattttaagaaggatggacattttagagatgagtgctatctcctgaagaacaaattaaattgagataagcaaggaaatggggaagttgatgttgtgacacagagttatgactctacatatgtgcttaatgtatcaataacagattttggtgatgattggattttggactcgagatgctccttccacgtgatagcaaacaaagccatgttcaattctctttaagagaatcaggtggtactgtattgtttggaaacaacaaagcatgccaaattcaaggctcatttcagatgaaaattcatgatggcattacaaggactctacaacaagcctggtatttcctaatcttaaaagaaacttactttcaattggtatgttcgattctaatggattttctgtcaagattgataatggtactatgaagatttctagaggttcattatttggagtcaagggaaaacttagtaatggtatgtactacttagttggtaatgcaatattaggtcaagcctcatcaccaatcaatcaagatagcatcttaggattggttatgtaagtgaaagagggatgtaacaactaggaaaaagtgggggggggggggtttaaaaggtggaattaaaaggaagttgagcatctgtgaagaatgtgtttatggcaagtcttgcaagataaaattcacacatggtgttcactcaacaaaggtaaaattagactatatacactcttgtctgtggggaccttccacgatacgaactttgggtggagccaactattttttgagcattgtagatgattatacaaggaaggtatgggtgtttctgttatcgaacaaggatcattctttcaacacctttactatatgtaagaagctcattgaaaatcaaataggattcaagataaaaaaaagctaagaactaataatggtttggatttttgctcaaatttgttaaaggaattctataacaaagaacaaatttttagacattaagggtaaccctcagcaaaatgaacatgctaagagaatgaacataatccttattgaaagagtgagatggatattgtaggatgctgatcttaagagactattttggggaaaagttgtgaaaatagcgagctatcttatgaacaaatgtccatctgttgcactaaatttcaagaatcctcaagaaatgtggacaaagaggccaccaaagtttgagcatgtgaaagtccttggttgtattgcctatgctcgtattaggcaagacaagttgtaaccaagggcactaaagtggatgtttctagggtatcctgatggggttaaaggctataagttgtggtgccttaaaccaggacataaaaaatgtctcataaacaaagatgtggtgttaagagaagatgaaatggtaatcaagtcaaagggggtactgtaactggtacataacagacacaaggtgataacttgcaatttgaggtggagtaatgtctccaatcttgccaaattacagaagttccactggatgatgcagtagaagttgaaactgccatgcacacagatacaactcatggtagattaagcgcttactagttggctcgagatagagcaggaaaggacattagagcaccagacaaatatggctatgttgaatttacagcatatgcattagctatttagaagaaattgagagtgttgaacctaatagatatgaagaagccatcacaaggaagaatggtaaagcttggtcaaaagctacatatgatgaaaaggatttcctcaagaagaataagacctggatagttgttcctaggcctacaaaccagagagtgataggttgcaaatggatttttcaggcagaaggatggcattccaggaatagaaggaacaagattcaaagctacagtagtttcaaaggggttctcacaataagaaggggtatattttaatgaaatattctcacctgttgttaagtaaacatctatcacgcttattatgtcaaaggttatagcatttgaccttgaggtggagcaaatggatgttagaactacatttctacatagtgatttagaagagaaagcttgtatgcaacaaccaaagggatatgacaatggagatcccaatcaggtatgtctcaacaagtcattatatggcttaaagcaagcacttaggtaatagaatttaaagtttgatgaattcatgagaaaactagttttatgaagagtaaacatgatccatgtgtttactacctcaattaaatttttattgtatgttgatgacatactcatagttggcaaggacaaatcttccataaaccaattaaaacaacaactctattgtgggtttgagatgaaagacctaggtgcagccaaaagaattcttggcattgagattataaggaacatgccacatacagtaactctaattcaggaaggctatctcaagaaaataattgacaaattttgcatgaaagacgacaaacctatttctactcaactaacacctcacttcaaactgccacaagaataatcttccaaaacagaagctgaaatagataaaatggagaatgttccctattctagttgtgtcggtagtctcatgtatgccatggtctgtacaagacccaaccttgttcctatatcattgtaatgactagatacattgcaaatccaagaaaccattattggactgcactcaagtggatcttgagatatatcaaaggaaaaatgagaacatgcctagtgtatggaggtgagacaaatcaaaaggaaaaggaagtgataggatttgttgaatctgaatatgttacaaatctagacacaaaaatgtctctaactggatatgtgtttagagctcgtagaggatgtgtaagttggaaattcaacttgcaaaaggttgtagcactctcatcaattaaggcagaatatagggatgcaactggagcccttaaagaggttatatggatcatagatttaacaaaagaaatgggatacaattcagacaccatcacaatgcattgtgacagccaaagtgcactccacttgatgaaaaactccatgctccatgagagatccaagcatatatacataaagttaccttttattaaagatgttataactgcaaaagcaattggtgtgaagaagattagtacacatgtcaacccagctgacatgtttacaacactagttacaatggaaaagtttaggttatgcctaagcttattgaagatcgaaggaatgcaatagcctctgttcagaggtactcattgattgatggaacgatcaattatttttttattaattcatatacaattagctcaattttttaatgctatcaagagactaaaataggtggaattgatagaatttcagccacttgtttataattaactaacttaactatatttgacagttttgtttgttaggtgattgcttgattttttcccatctctttggagatccattgcttgtctatatcaggagctttagttctcaatgctaggtgatgatccagagaggttgtgtgtgtttgatcacaattctctgaagtgagcattttgtatgtgcaagacactattgttgttattgattgataactctatgaaaatagagttatttatatctttttgggtattgaagtagctttggtctcaagtatttttaatttattttagtgacttttatgtggttttatttagttttacataaatattaattttagtatttttagattaatttttaattaattttgtaatattttatcaattttatttagtttctcatgttaaaaatattattctcaatattgtgtatttttgtagaaagtttaaatgcacattttgaatttattacatgagtcaaaatatggagcaactatcactaaaatggactcacaaaatggattgatatttgttattgggctcttgtttaagaaataaacaaaaaatgaaaaaaaaatgaaaggaattacaaatgggcctaggatgataaagaaatgaaaagtacatttccatctcatttattcatatatatagggaaatttacatatatactgttttttgaccaaaactttacaaaaatactaggacacggcaaa

SEQ ID NO: 297853 - DNA, 3786 bp, Cannabis indica
cactgccaggatgctgaattcgcttcagcattgcttcagcaatctgctccaatttcagcttgtgttccttttcttccttgcttcattttctttttcctatcaatttgattcttcatttttcaacaacaaacaagcacaattaattgaaaaaacacacccaacaatatcaatatttacaagacttaaaagttagcttactaaatagaaaataacactaaaactaactaaaattaagcaaacaaacacattttcactgctcttctcacaatacttttagtttaaatgcataaaaaataactctataccatagagttatcacaaattgtcactgaatgtaaacaattattttttgagttgaaaaatattttcgttatttttgttaaacaattaactaatgtggtagctcacaattttataccaacttctatattatttcttgattatcgtttcgatataaaatatattgctttcgagttgttacattatttggtaacaaattttattggttaataataatttattttttattaaaaaaatcattaattattaatttatatttctaaaattttaaattaattaaaatgtaatgttgatatttagtagtgaatgttatattcaaatttattaaatttaatgtataacaccaatatttaaaacaacaatatatactacccttaagatgttagccttgaaatctgtgaaactttaggcaattgtgttaaagttgccatactaccataaaggaggaaaacgacagtgattcatatggtagatgagataaaacgcagcgccgcaggatcacgtgtaatttcactttcacacattatctcacacgcgttcctatcctatattattaattactaatattttattaacaaaaattaaataaataaaaaatttgacatccaaaacggaagtagctccttccttctaggtattgcgaccttctaattttctctctaatggactgcgcttgcagcaatttcagagcttttttcttctcttcttcttccttgtccatcctcttctttcttatcactctcttcttcttcgtctttcccttccaagttcagattttcggtatgcctttctcttctctcgctctttcattttgtacgtttgtttgttttgtcgtttcatcgatataactcggtttacttgattgcttcgaaccttttataacagagactaaagcgttccgacctgattaagcagcatctggtgatcagaaacgcttgtgggttcgacggaaatggctctgctgatggctttcccaacatgcccaacaagcttttcatccaagaggttcgtttttctcttgcccctttttatatatttgattggttgttgtagaaatggatgcttcggaatagaggaatagaggtttagaaatttcaagtttaacttctggggtttccataatttgcgttatttttcagtaataattggtggactatgtgacatacaagaatttcaataaaaagcttcagttctttgttatttcatttttttttctgtacactgaatttgggaatgatagttttgattattatttaattttcttttgcttctcaggctattggagctgaatatggggaaggttttgagacttttagacaagatggacctcttaagatggatgtggtaaggcttttgttttcttttcctttaactggtatggtaattttattcattttattatgtttcccttcgaattttatttaatattgcttgctgcaacaagtggcagagaatagtctcttagttgtgtcattttttttttctcaaataggattttttgaatgaaaagttgcaagaaggttttcttcaacgtatacgctatgctatgaagccagatgaagcttatggtccttatcttttcatttgacaatgtcgtggtaaatttccaaatttggcgttctatttgagagattgtatatctcctgagctttcacccatttaattccttgtataatgtgttttaggcggatactcgggctttgaagttggccgcatggaagcagcttgcctcagaagaaggtatgcttcaaaaaatttcttttagactagctcatgtgatgggatttctgatcagtgtctgaagcagttgttagattaggcatttgtaataaaattgtatcttttataagatgagatttcagtcgatacgaaattatatagttcaggtcttactaagagttaggtttaatttctcataatctgatgacacataccttattgtctcttaaaaaaaatgattattgtgcaggtaaagaaattcctgatgatagtgaattgcaaaaagtgatgctatctgctggtgctgatcatgtgttgaataaggtttcaacatcgttcttatgttcatgcaaactatttaatttattgactttcttttgttttatttttcattttcttgagtgtccctcataagtctctgaaaattgtcagcttttattgtgggatgaagctgaaagtgagatggatagactgagtttgagattttcagagttatattacgaaaatcttttgaaggtaagaactatatgtggtctatagttttaatcatgtgtttttcaattagaattggctattaaaatattatttttcttcctcttttccttagcttgacagacctatagagggcctcaaagaatggcttgatgctgtatccactgctagaattccttgtgctttagtgtcaagtcttgataggaaaagcatggttgaaactgtagatcgaatggggcttcaaaagtactttcaggttggtgatctataaagatgtgaaataattttttccagtgtacatattccgcaataggtttttctatcactacattaacattgttttagataatacaaatgctttatcccactgagctgcctcagctgagctgactaccattcaacttctttgacaggcaattgtgacagaggaggatggcatggaatccatagctcatagattcctttcggcagctgtgaaggtattgtccttggcacctaatgatgaatttaaatatatgcctatcacataatattgagtagttccctctactgaaatggtatattcttccttttctaaagaatcaaaattgtgttataatgtgcaacacatattctacaatacggatggccatgcattacacagagaaactaataagaacagtaattttatagcttatcaattatcctgctaatgtttctgttttttaaacttattttataacctgcagctggaccgaaaaccatctaagtgtgtagtgtttgcggatgatccaagaggcataactgctgcccacaattgtaccatgatggctgttgcattaatcggcgcttaccctgcgtgagtaatcttgaattaacaaaacaatttcaatctagggtagttgcttttttaaaaatatatatatttctcatttagctttgtttaataagttgtgatcatagttttaagtcattatctggtagagttcaggagatgtgataagagcaaatcgggtatatcaaaacaatgattgtttagttgtttccttaggttgctcatgagttgaatgctgctgtcatttacaggtatgatctagaacaggctgatcttgcagtagctagtttcaatgaactttcagtgatcaacctaaggagattatttgccaataagggggccactttcatggaccttcaaaaacaaatagttgagaaatctccacctaaaaggaagctgactattgatacccttttctgattctttttctttagtatctctctctctctctctctcctacc

SEQ ID NO: 297854 - DNA, 1189 bp, Cannabis indica
tccggatctgggtcccgagtcccaagtcccaagtctcggtcagggtctgggtcttgggtcccggttcgggtcttggtcctgggtcccggtcctagtcctggtccgggtttggatccgggtttgagttcgggtcctgggtcctgggtcccgcgtccgagttcgggttcgggtctgggatcggtgtccggaccatgtccgggtcccggtccaggtccgagtctgggtctcgggtccgggtctgggtctcaggtccagatcccgggtcctgggtcccgggtcccgagttagggtccgggtctgggtccaagtcccaagaaatccgagtcttgaattaagttttttttttaaataaatttaaatcgggtcggattaaattcgatccagaaaaaaattaggcggggtggagcagatttgatccaagatccaataagtatttgaatgtttcagatcagaggtgatccatcggatcgaagttctaacccgctttaactaaatagatctttttgacatgcttaatttttaatttatgttatttatagaaaagtatgtatattatttaaatgataaaaaaataaataagttgatatttttgtggtatgatagacaaaatgaattttcaatgagatactttagtttagtgggagtggtgttacaccgcaaatgaaatattaatatcgtcgtaatatgaagtgtaagcatagatccaaagtctgttgttattattatttgaaatcgaaaatagctgttaaaataaactaaaagcctagcaacattttgggtccttttaattaaaaaaagttaaggcactttaaatattatatatatagattaaaaagttgttggtggacatattacaccaatagtttttgtattgtagtctctctcttccgacgccaaagacaaaaattctccagctcactgaacacgtgcgccactaatattaaattatttatattgtacacacttcatataggaaaatttttaatctttttttcctgcattaattaaaagaaaattatttagaattttcactaatgaattatgagttatattttattgtaccttttattagaatggagaatccattttacttttagtaaaagaaaataaacacttttataaagtaaattatattttaatgagagattataattaaatagaattatactgaaaaaatttaaaaaaaaaa

SEQ ID NO: 297855 - DNA, 3242 bp, Cannabis indica
cagcatacaactatcttcagcttatttcctaatcataaagataaactaaactaaactaaaactccccaaactgaaattcacattgtccctaatgtgcaaagaaaacttaagggaaagagacttacctgagacccccatcagaaggggttcggtggaggcggctgatcatatggatgaaatcgaggaggtggcgccagataattggggtctttgatcccaatgttcatgcgagtgattagagagttaagttgagtgacttgactctcatcatttatactcctcttaaccatgtaattttgcatatggttgttttgttgactgatgtagttcagttgtgcatgtgtgtactgcattgccggattaattgggccaggcagttgttgtggcacattctcctcctcctctgcactttgttcaccagggcgccttctaccttgtggttgagtttctggtggtggctgcccatagggatgaggctccttgagcctattgaccatgctcacatccatctttctctgcggcactaccttgttgtcaaacggtaactcacttacgtcataagttccgcaaagatcagtaataattccagccaacccaagtccacctctcgtggcaccttgaacgatcaattaaaaactaccccgaacaacttgacccatattgatcttgtaccctttcatgatggcgtacacatatttcagacgatccatttgcacatcagaaaagtgcttgctaggcaccaaccgagaactcacaaaatacagccaatttttttccacaggatttatttcacactgatgcaataaattttggcgacccatcatgcccattattatcattaaacctaaaaatcaggaacccaaccgattcatctacatccactaagtcaagatgttcttcctcttcaagtaccctcaatcgctgttcatctctagtgaaattaggcaatccatagagtgggttgattgcatcagatgtggctgggaattccttatcgcgaactttaaccaccccatgtttcctttcaggccagttggccaagaattcacaagccatggtgacattggctcgttctttgacatccacaaaactaccccaattcatgctttcaatttgaccccagattatttcaaatcttcgttggcgtctcaatggggtatcggtgtaatcaatcccccagtcttcaatgtagggcctatccttcaacttaaggaaccgctcttgagctgcttcacttacaaaccgggacctatcaaaagattgtcttggattggaccggggaggattggatgatgaaccatcctctttatttgcccttgttctcttacgtcccatagttaccaacaaacacgaattttatacaacaaagattttcgagaaattttgacagcacctaccctaattttcttcaatttcccacaatttcaatattaccaaaaacacacaatattccaagaacaatcaccacagtcaccaaaatcacacacaatactccaagacaatcaattcctcaatatgccaataataccataatccgaaaatcccaaatactatagcaaactattcaatcctgtgggaaatgcatttaatcaattaagatattgaagggaatgatacttactaaatgagaatgccattaatccacctccattgttgaatcaccatggaaagcttgatcttgaagatgatgaatagtttattttcagaattgggtgtaaagtggtaatttttggattgatttttgaaggaaagtgaagattgatgagaaaaaatgtgtttgtgggtgattggtatggatgatttgaaggaagaattaagaaaattgggtttttaaggtgtgaaatgggtttggtggctgagagagaataggggtttggttagggtttatggtagatgaaatgaggattttcggtttgaaattgggtttttaaaggcaatttagggtttcaacccgatcactggtcgtgaccacctaatgggctagtcgcgaccatggatcgacatgaaatagcaggctctctgtaagccctgtagttgcgaccatggtcgcgacccgaccatgaaaaagggtcccgaccatagaaagagtctagtcgtgactactaaaggcattgaaattgtaggctttctgtaaaactccaggtcgcgaccatggtcgcgaccatggtgaagcctagtcacgaccactaggttttagcccgaaaaaattatttttttcttttttgacttttcacgctttgcacggtttaacttaaaacaaacgtctaaaagtttacaaaacattaaaatgctaaaaataaataaatacataaactaaagtctcaaaaacacatcaaagtaactcaatcacttgggttgcctcccaagagcgctgtctttatcgtcatatagtcggacgttgagttgcttttcaaagaggcgccagtataatggcgcacttagcttggtcaatttgacctcccaagtagagctttaatcgctgtccattaactttaaaggtttctggactctcacctttcagttccatcgctccatatgggaataccttgaccaccttaaaaggtcccgaccatcttgacttcaattaccaggaaacagttttaaccttgagttaaagagtaagacctgctgctcgggttgaaattctttcctaaccagatttctatcatgccatttctttgtcctttccttgtatatctttgtattctcatacgcttcgtttttgaattcttccagctcatctaattgtaacagtctcttctctcctgtggctgctaaatccatgttcagggtcttcattgcccaataggccttatgctccaactccaccggcagatgataggctttttcatacaccaacctatacggtgacattttgataggtgttttgaatgctattctgtaagcccacaatgcatcatctagtttccttgacatatccttcctcgatctttacactattttctccaatatcagtttaatttcccagttggaaatttcagcttggccattactttatggatggtaaggtagagcattcctatggcggactccatatctggctagcagagcttcaaactgtttattataaaaatgactcccttcatcgttaataactgctcggggagttccaaaccaagtgaatatgaacttttgaaggaaagacaaaattgtcttaccatcattggcttgtgttgcagcagcttcaattttgatacatagtccacagccaataagatata

SEQ ID NO: 297856 - DNA, 5409 bp, Cannabis indica
taatatatactaaatcatgttcttgaaccatgttagactttttttttttactaaatttagacaaaaattcttaaatctaacaatctcaatagttcagaggacatttttaacgaccttaaaagttcaggggcatgatttggtacatgtcaaaattcgggggataaaattcctaattagctttctgaaatgcagtagtggtgcttagtacctttttcgtgtaaatcgctattagtgcaattaaatatcaaatttcatattatttaatgtaataatttttaaacaatatggttaatcaattacaaaataatacatctagaaaatattaaatagtagtaatatccaataacaatattatattgctaaccaaataagttgcgaataacaatgctcgatgtaaatctaaattgcaatccaatttgaaatctcttcttaaacttacattgaagaactagtggaagtggtatagggtttagagactatagagtgagtgaatataaaaaattggtcaaaaaaccttgttttagtttctatggttgagtgggtcccagctgatgaggtggcaagatttagttgggccagtggacgtgttcatagttcgtcgtaagtgacgaaaatgcccataagggaaaaagtgcaattagcttgggtcagcgatggcataatcgtccaatagttttagcgcccaaaataccgtttaagagaagaaaagagaagacaactctttctattttccgccattgaaattgaattgaaagaagcattattaatattatatggatctgtagaagaagaagaagaagagctcgcccaaaatgctacaatggctgactcagatgcgaactgcatttggggcttcctttctttggctcgtctgcttgatctactttacgcaggttcatattacgattttgatgaatttcaatacatttttcatgaatttcaatgcttattacgattttaatcatgtcgattttcctattttgactttgggagtttattttttaaatttgatgaagattgtttgtgttattacgttgaatttgaagctgaatgtaccataccatataatcaactttgaaatatgattaaaaatatctgtaaaagtggcatttcctttcaatttaattaatcaaatgattatttcagcgatcttttttcattcatggagggagataaggaaaattgtttggctaaatgtttagattacttataatgccattaatatttcaaattagtttacttttcatttttgtagttggataattgtgcttctatctctatatcataattaatcataatcataatcatattatgttttgtgttgtgttaacaggggtttagatcgtttgtatggacagcagtttcttaccaactaaaagatgggcttaagttaacaccttcagtttctcaatttgttttttcagtagcattttttccatggagcattaaaccattatacgggtataaatgtttccttgctttcttgtgatacagaactaacacaaatatatgtgctgagaacatttttttggttttttttaaactatataataacatggttttgttctcaatttatgtacaaacaagaattgtgtcgattcgtttacaatgtgtcattaactaatcttgaaagagtgtgaaattgaaggcatagggtggagttagcaattgacatgtttctgattgtattgctcatttgcagaataatctcagattgtataccaattaaaggaagaaaaagggttccatatttaattatatcaactgtcttctctctcgtaccatggcttgtactagggcttaatgaaagcgttagaagttccagctggcacctcacatctctcttaacagtgcaaaactttggctcggccatggctgatgtagttattgatgcaatgattgccgaggcagtaagattcgagaggtacattagtagaataagtttctttttgctacctctgagaaagtataacagttgtagttcatatctcaaacatgtttcttgatcagggcttcatttgctggagatctacagtcaatgtcttggttggcaatggcttttggtggtatatgtgggagtttgtcaggaggatatgcattaactaacttcaagattgatacaatatttcttctgtttgctatattaccatccctgcagctgttatcatgtggcttggttaaggagaattctgtaagcagtaaagttcttgactcatctaccttggaaaactccagcaaggcaaacgggaatagtagctctatggacggagatgatttcttggacaagaaatccagcagcagtactttcagaagaaaaaagagtcaaaaggacaataaagcagtagcagcagttatctctactgaactcgagaatgttgtaaaggttgattccttagcatcgtcgtggttccactcgctaaaatctgcagcttatagcttgtgttgtgcttttggaaaaccaatcattttcaggtaattaataagggtcattttcatttatttttattcattatgacacttaatttatttttctgttgggaaggtcagaccaatggcttggttttttctggcacatgtagcagtcccgaatctctcaacagtcatgttctattatcagactgagttcttgaacttggatgcatcgttcttggggactgcacgagttcttggatggttgggtctaatgataggaacatttgcttataatcagtacttaaagaccatgaagttaagaagaatcctcatgtaagataaaacgagaatggtttcgttttcatttttacatggattaaattctggtgataacatcttcaccttgattcttgtttaggtgggctcatattggtttgactgtattgggtctgctcgatgttgttttagtgtctcggttaaatttggtctttggaatatcggataggataatggtgctttgtggatctgctctaactgatgcagtcaatcaatttaagtaagtgaaactgatcatataatcttactcatcccactcttttacccaataattttcctcaccattttgagcttggtgtttcgatgaacgaactctgcaggtttatgccgtttctgatcttatcggggcagctgtgcccacctggaattgaaggaaccttatttgctctattcatgtcaataaacaacttaggatcgacattggggtcgttcatgggagcaagtttggcttcgattttgaacatatcatcgggttcttttgacaacctccttttggggatggtcattcaagtgttgtgcactctcattccgattgtgtttttgtttttgataccaatggaagctacaggagtgtcagcataaaatggatttaaagtaaactcagtacaatacaaacatattacaaatgcattgattcattgtaggaagttgattaatatagttatcaactcttaaatcatgagctaggcctaggaggagggcttgatataatataaatgtaattccaagctttgtagaagaattttggtttgtggatgtaatctttttggtattattaagttaccagaacataataaccaattacagtagtatttctttgttgatataaagtgttagcaaatagcatcaatcattggtatgtattggtgttctagttcatgcctttttggcccatttttttgtcttctaaagaaccagaaagttttttttttgctcattttgttaacagttctgtagtgtctcttcctgagataaaccactctcttcatctcgaattggagggaaaaagtgttaataacattatacgaaggacttttctgcaaataaatttaaaaggaatttagtatacccaaaactccatctctgaactgactatctcttcatttaagaatctgcagttgagattaataggttggatggaggtttgatcaacttacaagaacttgcaacatgcttcgtcggatgcgaaagagtgaccgagaaggtgtctatgaggatgtaacgttctatttaaaggaacactacgtgttatgattacattgtgctaatcccgttaattggagtctaataaagtaagtgaataaaaacaatttaacttaaataacaaaacaatttgtaataataataacaatctttaatttaaaataaaataatataatcacaataaaattctttttcaaaaaatacaagttgtttacatgtaagccaacctaagcagcaaaatgagatttctttacaatctcccatataggactcaaaccttgtagtctagcttggccgaaacatgtacaattcatcttcaaaatcctccaactcatcgctgacccgatactgctttacccttgcttgcaaaatagatcacccatgagtgaaagtccaacaagaaagcataatcaaacgcaaatataacatatagcatacatatcaaacttaatatgccactgcatagattattgtgtcaccgcactaatataacacgccaccgcacttacaatgataccaccacatcctaagtctatattgtatagacactacatgttacactcacacatctattcactatacgaggccttattagggtttttctaagttttgttaccaagtctaacctagttacgccatggtcgcataactcttaacacataatcaattagttatgccttacttgcttaaccttttacataaactcaattaattcatatattgcatgcatagctgtagaaactttagggtaataatcctaacccacatttctaactaagtattcacataacatacaagtgtaccaccactatactctatgtacaaggttcactttcttatctaaattttaaagtatgaggagaatttctaatccacagatgattccgagcaagtgccagtattcctagtcacaaatcccaaatttaaaacaaaatagggttaatccccaatctcataacataattattcacattaaggactctaactctggaccaaataatagagcttgtcacgagctttgcaacgatataaagaacatccaaaacggagtttcgagtcaaaagttatggtcaaaacaagtttacgaaaattcaagattaaaaggaaattagcaccgcgagggcgccgcggcacgcccttacagagaagatcccttgttgttttaggcccatgggcaccgcagcacccaagaacaaggtcgcaacacctgggcttaaaaccccaaaaacctagagtattcagttaaaatctcaccctacacatctcaaaaaatagtgaaatttcacgaagacgaagccaaggccgttgggcatcacttttctattggacacgttgagagaaaaagtaactttcatgcactaacaatcaatttaatcgaaatagtgaaaatctcacatttctgatactggtacccctttgtgaaatgtggcccggaccaatctcggaatattttttgcc

SEQ ID NO: 297857 - DNA, 1653 bp, Cannabis indica
tatgtcttatttatgaattttcactaagcaatggctgaattgtgatgaaaaggggttttagagtttatttgttaattaagagaccaaatatggtctaattaataaataaaataaatgataattttatttaaaattaattttaaattattaaataatagttttggcatttatagaattgaaattgaaaaatatgatattattaaaagaacaattagtagttgagataaagtggcaaaattgtaactagtgaggctcattagtggccggccacttagtgcaatttttgcccattattctattcttttttaatccatataattcaaacctaaatcctagttgaaatactataaaaggaacatgatgctctcaatctcatccaacaactcactattcaaccaacctaaacctagtttttattttctgacaactagtagatgcgagacaccttctatagtgatttcgacacctcctttattatttttcaccaattcgcccatagtgatagagtgtcatgcctatacatagcaagttaagtactcaatcatagtgcgaaagacggtggtaaccaacccgaaggagagaaagagatccaagctcagatcttgttattattccatgacagaaaggaacaagggttagagatctgagcagaagaagtcatattattccgctgccatcaatgtaaggtttctaaactcttatgtgtttaatttcatcgtattagagaattcatatttaggatgttaatgaaacatacttgttaataaatctaaatactggtaaaataaatcccaacaaatatcacagtccagactagttcatcttattttgagttctgggttttagttttgactctcaaaaattataagtgtaaagacatgaaaattcaaagtaaaagaaaaaatgatgaaaagtggcattcagaggtatttatagtcgcaaagcacactcataatgaattccgaatctatggataaaataaaccttccaaaaagacaaaatagatctaacggttgaaagagccttctatccagcatttaatgcatcacttagaacaatgcaaaaatgcacggtgttatgctcctcgaagcttgtgtataagtaaacagctatcaaaatgcttgggttgccatgcacgcctcaataattgaatgcatacctcacaaaccaatgaagcaatgccatgtcagatactaaaaacaaaatatatataacctatcttagatacttaatttcgtttagaaaactgtaaaattttcacctttagtctctatttgtccgcttatacatattgaaacaagcttccacaatccacaacattctggaagcttgggggcaaatacaagggacacgtggattccgggtcagcatccaaaacccactagtgggcccacagaagagaacttggaccaagccaggttcaacaagaacttctgggaaggtatcttcgttccttgctcaaacgagcttctaccaaggacaacctgtacttggaagcaatctcaatactacatttctggaaggccagacaacgtgttcctaaaagcctagtatagtttatgtttttatcaaattgcatagaataaggaagttgcctgttggaaatcttttaccaggatctagatttactaccatgtatgtttcattaacatc

SEQ ID NO: 297858 - DNA, 1390 bp, Cannabis indica
ggtgttatatatatatatatatatatatatatatatatagaaatgaatatatagagaccttggcaagtaatgcttgggctccagcaaacttgttgtcccagctgaattcagaaacagcttggctccaccctttgttggttgaaacatagttcaagtacttgctgttcccagtggccttgtataaccaagttgccccccataacaactcatcctttcattaagtccaaaattacaagttagaatctatatatagttgtccaattttttttccataaaaattgcaaaatatataatatttttccttgagtttgagggactaatacatattttaacatatatttataaaagtgtcaaattaggattactatgttataaatgatggtgcacattaataactatatctacatatattattgatacttttataaatttggtaattgtagccaagtataatttagtagtgtatatatatatggatgactattatagttatatcaataattattatattttttatgacttgttataacattggtaaaaaatttgtttataaactcaaaattaattataattaataatttatttaaaattattttcttaattaaaatatttataataagacttttttaacaattaatatttatatttttttatttttatttgataaagaaataaaataaaagtaggctactattaagttacatataattttttacttattttttaattaatcacaattatttaataaatatcaaacgactaaaactaatcataattacactgaattatatattaacatgcataacaagtatttataattataaatggttaggtatgattaagagcttggccttacctgatagccagagtatgagcaatagaaagggcaagaaccttggtaagatcctctatatttgtctgcaaattcaaacaactgtaacacaaaacttctttgttaactatataattaattagaataaggaaactttattagtggtgaaaattaataaccatgtcattttctgtgatcttactgttagaattattattgtggactaatataatcatgagcttaataccataaacacaatcattaactatgtgtctaatatttactcactaccataatgggatggtcaataattaataaatgtattagaggcacatgagagcaccctaaaattataattggcccattaaattataatccaccactaattatactcattagcccaataagcctaagccccttaaggttaggtgttggatatatataaggggttaatatgtgttagtataaataggagagtgtgtgtggtgatgagaataagggttttgctttcataggctcctcttctactatcttaggatacattgaagaatttggtgt

SEQ ID NO: 297859 - DNA, 5373 bp, Cannabis indica
aatgaaattcatctttatttaaacttgaacttcagctaccaacatcggtagcaagacagttgggacatcccccaaactgaaagtacaatcaggataagaactagaagctcttgcaaaagcatgagcaactgaattcgctgatcgtttaacaaaataaacagaaacattacacatagtagcaagcaaattcttacaatccttaatgactaagccaaaaagggaaatcatatccgttgagctgcgtaaagcttgcaccaccacaaggctgtcggtttccaaggtgacattttgccaacgagaagattttatccagctgagagcttctcttactcccatagcttcagcaagggacggctccacatgtccttgacggctgacagtttttccaagaataagaataccacagcagtcccgagccaccataccgaacccaaagctgtgagtaccttcaaatattgcagcgtctacattgaccttaacactattagtagtaggtgttgtccaatgctctgctccatccccaggtatagtgccgaaggatggtgactctattaaagagttttgagcattaatccattggttaaggtaagctgtagcagacgcaataatactagagatactgacaggtttgttgttccaaacaacaccattcctggcaccccaaatagcccagcaaatggctgcaatctcagcctttttctcgctgttctggtgccgaaaaacctccttgcaccagtccaaaaaaccagacccctcctccacgttagttccaataccaactctgtgccataccattttgatcacatcacaagttaccagactatgaagagctgtttcattctcatgatgacataaggggcacaaagcactcacctccactcttttaattcggagttgatccattgttggtaagttgttggaaccggccctccataaatgagttttaatctttggaggcagccttaacttccacatattcttccagaattcagaaaccacatcctcgctccaacggccgttggcttgctgcaataagttgtaggccgatttgactgtgtataggcctgaattgtcttccttccagatcagatggtcctcacaatcggtcacttggagaggaatttgttgaatgagccgagagtccctttcctcaaacatgtcgttaatcagttccaagtcccaaattcttgaatccgagaccagtaagttacaaactttcgtgtttagaagaccaggatggactgatgttatgtaaggattgtttggatctggtagccacggctccccaagcacattgatgttttttccatctcccacacaccatttaatacccttcgccaccaagtgttgagcctcccaaatgcttctccacacaaagctaggattgttacccaacgaagcattaagaaaagaaccactcgggtagtaccgggcttttaaaaccttggcgaccaaagaatcacctcttgttagaagccgccaaccttgcttaccaagaagcgccaagttaaagtcccttagattcctaaatcccaagcctcccacatctttgtgcttgctaagcttgtcccaagacatccaatggataccaccattgctctgtttagaggatttccaccagaatttggacataagttgctcaatatccctactaatttccaacggtagtaggaaaacgctcatagcgtaacttgggagggtttgagccacagttttgatcaagacttcctttcccgctcgtgagagaaattttccttcccaaccttgaagccttttgcgcacccggtctttcaaataacccaggaccgccgttttattcctccccatggtactaggaaggcccaaataggtgttgttctccgtggcctgtctcatctgaagaaccatattcagctgtactcgagtagcttccacagtgtttgagctataaaagatagaggatttattgagattcactttttgaccagaagcactttcaaatttggctagaagttcgcgtactcttactgcttcctgagtcgttgctttgcaataaaggtaactatcgtccgcgaagagcatatgtgtgattctcggggcgccgttcgcaactttacagccatggatccaaccgtggttctcatacttcctgatcaaagcagataatccttcagcgcacaaaatgaataagtaaggcgatagaggacaaccttgtcttatacctcttgaagggataatcggacccatttcgcgaccaccatgaacgatattgtacttagccgaagtgacacaacccataattaagtgaacccagcttctgtcaaaccccaacttcaataatatcgattcaaggaagccccattcgatgcggtcgtaagccttactcatgtccagtttcaacgccatgtaaccttccttgccttgtttcttccttttgagataatgcagcacttcaaatgagacaagaatgttatccgagatcagacgacccggaatgaaagcgctctgggtagccgacacaaccttatccatccaaggtttcatacgattagccataaccttggtgatgattttgtataggacattgcacaatgcaatcggcctcaggtctgtaacgtgttcggggttcttctttttgggaattaaaacaacatttgcactacttaaattcccctcaaaactaccagtttggaagtaagtttggaccacccgaacgacgtccaaacgcactatgttccaacatttctgataaaatcccggggtcataccatctggccccgggctcttcgaaggatgcatctgaaaaagagccttacgaacctcctcttccgagaccggcgaggtaagatcttgattaatcatatctgaaatagtaccattaattccatcaaccacttccacacaagaagtaccagaactagtgaacaaattggagtaataatcttctataagatgagataaaccgttatcccaatgaacccaacttccactatcattcttgagcttctcaatgttgttattcccctttctagtagttgctgccatgtggaaatatttgctattcctatctccctccttgagccaaaattgtttggctctttgcttccaaaaggtctcacgttgatccaaaatttgggagagtttcaactttacttccccaaaacgttgcactgaaatgggatctcttctacctcttagatcagcaagttcttgtttacacctcttaattctcagcttgaaatttctagtgatgttcttcccccaatccgaaaggcgctcagcacataacaggagtttcttgtcaatgggcgcacctggcgaagcatcccaactgtcacgaactaattcatagcagaagggctctttgagccacgcattttcgaaacggaatttgcgaaatagaatgtgagaagaaacactttcaggaacaagaaatataggagagtgatcagaaggagaagtctcgagattacttaacttagcttgaggaaaaatacgaaaccagtctgctgagatgagagcacggtcaagccgaatttcaacccaattcgtggtgcctctgccccgttcccaagtaaagggatagcccaagagttccatatcggtcaaatcgcaatcacacaaagcttgctgaaatccttgaagcagagcacgaggataaggaagcccccctctcttatcttgctgggagatcacgttgttgaggtcgccgattatacaccaaggcaggttcgagttttgcttcaaagtacgaaggtgattccaggttaggtgtcgatgactcctgcgcggctcgccatagactccagttagcctccaatctggttttcccactactttgacaataaaatcgatatgatactgagaataacccaccacatgtccatcctcacttgacttccataaaagagcaagcccaccacttctcccttgggcctcaacattgaaaaccccttcaaagcccaaatgtctactaacccattccactctctccttggcacatttagtttcacacaaaaacacaaagttgggtttcttttgagaaatagtctctttaaggaattgaaccgtccatgggttcccaagcccacggcaattccaacttaggacattcataatgcttggcgggcttgagaaccaagacccgccccattcaagttttttgagccaacttcattattatggaacatagggatatccccaccatcttcaatactcatatgagatgagctttcaatcacctcatccagcccatgagagtccatcactattagattcggcccattgctaggttccccaggcccattcgagatatcacaagtcaatctcttccttttagtatccagtgaggacacataattctttggaaataattgggttgaccccacaaaatcaccattctgattctttccttttccatctgatatagtcgttattggaaataaattcccagctgacacaataacattcctttggattaatgattgacttccttgattcatgggattaccaatcttcacccccgaattccctccagtcgctccagatggctgttcacactctggaactggatttccaactgtctccgatgaacgttggaactgatcaggcctaccacacgactcatccctggtagggtcgccattgttgatcgaagaggcaccagatcgcagccaacgagatccaatattatgatttttccttctaggcgctgccttcatttccaacccatacggtttagttagtaaatgagatggagtatcaaacagcttctcacaaaacctttctgaatgcccaatgattccacaaataaagcagaaagttggtaggccttcatacttgaaaatagcccaacatataggtttcccgactttctccaatttcattttacgctttaaaggttgatcaacttgtattattacacgaatccgaaggtaatctcgccaaatgcccagaaagttattaggatctgattccacaaacgttccaatatagttaccaatgtctcgcaccaccctttgtgacatgaaatccgtcgacattccatgcaactgaacccagaaatcgagcttattaaggatcacagaccgaggattttcgcccttgcgcagtcgttggaaaacaaattgcatcctatcaaaagtccatggacttccctctatgacccttccaatatcaacttcatgatagaattggaacaaatatagattcggttccaactctttgacataaacacctcgccccggacgccacaaagaggccattttatgttgcatagcaagaaaatcgatctctctatcagttataaatcgccccaccaagcaccaacgatcatcaatctccgagagtccctcatcctcatcaccataacgcagactgttgggttttatgccc

SEQ ID NO: 297860 - DNA, 1597 bp, Cannabis indica
ggaactgagtactgttgtttttttttggggggttcactgtactctactaccactactgttacttctgccctgctttaatgccagccaagaactttctgttatattttctttccttttcctggaaaatatgttgggattgtttcttcaatcaaaggaatgagtcaattgggaaaaaaaagaggagttgttgtacagatgaatatgaatgaataactcttacaagtgtacgaatgagagagtgagagaaagcgatagagagagtttgtgagttttgagagagaaaaaaagttcagtgttgtgttgcgaaatgctgtaaattgcatttttataggatacccaacagcccaaaataaataaataaataaataaataaatataaagtaaagtatttattaatattgttatcaattaattaattaattaatacccatttcctatttcccattttaatcaaaaaaggaaacaaaattaatagagcggtcatatcaaagggccggtcggcgtcggtccgaagatcccggtcacaaccgtggcaattaaaatacgttccgccgcatcccgatgatgctttaagatctcgacacgtggacttctggggtccacgataactttggcccaattagagaacaccgcaccaggatgaatgcttttacgatctcgccacgtggacaatttaaggtccacgaagactttatgctttaagatctcgccacgtggaatatgtggggtccactatggctttggcccaattagagaacatcataatgtactgagtcagcatttaaatttttttatcttgaaatctgtgttgggtgtcacgtgagggccaagatacccggctatgctgttaatttagtcggtcaaattatttgaccgttcgaattaaaaatgtgtcaagggagagttaattgctctgctttgttcccttaattcgcccactaattagactacaaaaccaaaagtaataatcttatcactatgagggcattttcgtcttttcattgctaaattaccatacatacaccgagtgtgtaacaattcattctgtgctgtctttgttggcattatagttatttattactttattatctctttcattcatctgagatttttcaagtttgatattttgtttttgtttttattttaatctttttttttttacaattacagctataaaaataaaagtaacgtggcaagcaacctagaattcgccgccatttataattcggttttgtacgtctctgggttttttgtgtactcggtgttacttctaccgagatatgctaatagcttattgtattttattttaaagaaaatgagtgatttattatttacttaccataacaaatttgagtagttactaaaaaaaattggaatttgggaaatgttattgggtggaagagaaactcgagatttgttcccaatcacgtaaaatcaataaatagagttttaattcccacaaaaaactaaatagaatttatttttattttcttatatgagattttatcacaatatttttctgaataactccataacttaatagaggaaattacactctatactctttttatgttgtcctcttttatttttaccttct

SEQ ID NO: 297861 - DNA, 2107 bp, Cannabis indica
agattcactgattcatagaggtaatttatttctcttttcacaaagtaagtataaaatccgtgaaattataaagttcatgaaaaggaaccattaataacaagctatagacaaatcttttatttggcataaaatggtcaagattctgtttattttagtcacggttttaatgaacgaagctatcatttttggtaaactaatggtataaatatatacaggttacgttgatcaaaatagcaaaacattcatatcgatgatatcgacgaggataaggacgagttggaagaagatggaaaatgaaacttcaatagtaatgtcttccgcttaaagtaaaaataataacgttagtacattctagtcttgatatttatttttgacaacatggtatttttaatagaacttgactagagaaagtgatttttaatgagcttgttcttttgtgcttttgtttctttggccaaattcatttattgatttgtctaggaaaaacaaattggttacacgttaactaactttgtagtttgtctgacttaacagatgggactaaaccaagcattgaaggcgagctaaacacctacttaaacaaggttgcaccacattacagaagttgcatgtgtcaacaagtaacatggtatggcattatgggaaaagtaaagggatcaggcatggtcatgatggccacttagtgggattagcccattaatggtatggtatagcgaggagcctcattcttgaaagtttagctcaccttctctgctcatgttgacttatcctaagtcattaaagagaattctttttttctttttttttgtgtttacaactggtcaaactgaccttgctgacacaaattgaacaaactttaaataattagctttaatagttttttttttttttgaaagaaatctgtatccattaatataaagcaaagagaacctggaaacaaattacaattataaagatgaattcttccacgaagcctcctggtctaggcctaaagctttcttagctagaaaatggacagcttcatttgcccctcttgggatgtaggtaagaatagctctaggaaagtaagactgctagcttttaatttcagtgacaaatttgctaagatgtaggtgatgtgtatcattattacaaatataatctactaaaactttacaatccgaaacaatggcatctggataaatagaatggttgtgacaccaagaaagggcaaagtataaggcatgtgcttctattagtaaagggggttgagttccatgccaaggcataactaaattcaagagtacttctccctggtttgtgtggatagccataccgaagcccattttatttaatcttgcatcctgggcagcatcaactaaaagccggagattatagctttgaatggtgggctcagtttccttggacagcaaaggaacactctgtgtgtgactagtagaagaagccttcatattacaactttgatattggtctaagaattctgcaaccgaaagcagcagctgggcaggtgttgtagctaaacttgtatgtaaccatttattcctgcaattccaaatcttccacaacaaagagacaaaataatgatagttcccagcagtaaaagtgttagcagcaagatgtaatgagtcccaacttattgttttgtattgtatgaccattgatgtgtaatcatttattcatgaagaattgatgtgttattctatgaccattgttttgtaatgtttttctactgtaaaggaagaaacaagagacaaaaaagatgaatagctgaatttgtctttaactagaaaagataggatctttttttattgtacggtcgtgtgtgtacatccttttaatgttatggaacaaaagtcccaacttattattactatcttattctcttcttattttgtatcattatatctccttctccttgctgtggggacttctcttttgggttgtactcaacttcttgtcgagttgagtttattgcttttcatgttttattcattcttccttcttaaaatttcaggaactaggtgtgttcataaaataactgatccaatcaaatttgcacgatccaatccaatccgcaaagtgcggatatccgcacttgtgcggattg

SEQ ID NO: 297862 - DNA, 4923 bp, Cannabis indica
ctataatttttattaaaagtaaaataagtttctcggtgtactaggcagtaaacaccataagtaccctttaacatctctcttaccataattatacccttgtcgaattcacgtaaatccttttaccaaatgcgggccaaaaatgcttataatttacattaccaatcatagttgattatttcttaacaagttactcatgcctttcaaagtatgctaattaatgtgaggaatttgcgaacgcaagacggtgccctaaacacaaagtgttaaattttcttgtgaatgaaaagtttagagtataatatcaaaataataactcaaatttcactgctgctagactccaagccgcataagaattgtggtataatcatcttgaaatggaacatcaaattccaatgtggtcaaactcaactaagaaccaagataaataaaccagctcaagaagaagacctctaagctctaagaacccacctcctactccgacaatgtatcgacctccacagaaggtggatccaatggatccacctctgtcgtagaatgtggaaccaacaaaagatccctaagctgctggggatccacctccgaaggtgcacgagtgagagcacattgagcagttgtcgtctttgggaaggctataacatccctgatggaattagcaccagccaacaacatcactagtctatccaatccataagctatgccccctgtaccagaacattgtacaattactataccatatttgctgtgatcatcagccaatgaccagagaaagagagagagagagagagagtgagaggtttccataccatgaggaggagcacccatgtccaatgcttcaagaagatagccaaatttagcttcagcctgtagataaaacagcatattaccacccccaataattattttttgtttagaagaacataaaattttatgccttaagagtcaaaagatgcaagtacttgtatagagtaagataactaaaagaaacttttaagccaaacgctagtagtgtcaaggcctaaccatatttacctcttcagcagatatgccaataatttccaaaactttttgctgaacctcccgtttgtaaattcttaaacttcctccaccaatctaacaaatatcaatcattgtgaggaatgatgacattgcgcttctgagctaaagtttaataaaatttacacagctaaaatggggtcaagatcaaataataatataactcacttacctctactccattgtaaaccatgtcataagctaaagcacgagcagatgaaagatcttccatgtcttcggggtttggggctgtgaagggatgatgcaaagcctgcaaatgaccattttaggcatataggtagagctttagccaccacaaaaaggaacaaccaggctgttgtaaaagtgaatgcaaaactaaatcaagaagacagacctcaagcctttgctccgagtcattccactcaaacattggaaaatcagtcacccatagaatcgaatgcttggactaaatgtcagcgccgaaagcaacagatggtgacagtcaaatttcaggaaactaggagtacaatatgtaactgacacttaaacaaatggttgcagaacttacactgtcaatcaaatcaaggtcatgtgctacgaacaacctaagtcgatcaagagttctgtttacagaagcctgctgaccgattgcaaataggataagatcatgtggtttggtagacaaacgcatcatgaactgatttatacatgttggatccatacaagataataatgcaggatttccctccatggatcctgcaaattttgaaaccatcaactgtgaaatacatgaaggaaccactccccttcaaataaaaaaaagatgaaacaagcatacaaacaattaatttttattaccatcatccttcaccttcaagaaagtaaagttctcggcaccagatgcaattgcttcattgtaaatataacctttccggagaacattatttgaatattttttagcagccgagggaatacaaagaactttgataatcccccctttattcaaggcatgtgaaaaaggtctgaatggggtatctgaaaatatatcagatacctacaacagaagaaacacgctttctaataagcattaaatagttacataattcccctaaaagactaaacgatgtgattataacataaaagaaggctagaagtttaaaagaaacatatgcaactatgcaagaataaaaagaaatgcataaattgaatgttaacattagtgaaggaagaaccaagggagagatatttacatccttcagttcaagatcaaatctaagatcaggcctgtctgaaccatatctactcatggcctcagcatatgtaagcctagggaagggattcggtagatgaacacctttaatctctaaaaaaacctgcaacacacaaagctttcagatcactcccaagaatgaaagtcagagagcaaaccttaataattcatttaccaaaggaaagcagtaggaccccctctagctactcaaaatttttagttattcatccacaaacattatcaatccaacatagctcaaaatccagtacagtttacatcaattaagctacttcattatatactgacctttcttatcaaatcttcattaagcctcagcatttcttccaaaggagtgaaagcaagttccatatcaagttgtgtgaattcgggttgtctgtctgctctcagatcttcatcgcgaaagcatcttcacataaaaaaagaaacaaattcataccgcaccaagcaatgagtttaacagtaacaaaagcagaaagctcgagcataagcaaatcaagtgaatcaaacataacctcaaactacaagataaagcaaaacttacttggctacttgatagtatttatcaaaaccagaaaccattagcatttgcttgaatagttgtgggctttgaggcaaagcataaaatgtccctggcttcaaacacagaaggtaaaatcagttctgaaagcaagaaggaggcaaatagcccgcagaagattgtaagattaaaaacatatttgccatgtacctgattgaataataatgttcaattatcagaaagtaatacctatattcatttcatcacgtttaaatatatcaaagaatgaaccaaagtttcaaaatttgaagcagaactagaggcatggctccccttgttgacacatttagaaaataattctacaactaagtaagagcaaagtagtaagaatttgtttataacaaaacaaagtaaagaaatcgcatcttaaaaacatagcacggaaaggattactcagcattttaacttaaattttcctgaattatctatagcaattaataggtacacaagtaaatgaacaaaaaatttataacttaatggctgctgaattgatattgtacctgaacccttgagggaaccaaataatctcgtgcaccttctggagtagatctagagagtattggagtctcaatctaccttataaccatgagcgggaatcagaatcaaagtgctaaatgaaccctctttcttttctattcaattatgggacataattcagaagatggtacctccacaaagccatgcacatcttcaaggtatcttcgaataagtttcatgacattgtggcgcagtaaaatgttggaattcatttgttggcgacgcagatcaaggcaccgatatctatgaaaacaaatctgagtacatttaacattaaatagtcccaacaaataccatatgtgtaaagacagtttttgaatcctatatgaaccacattttgtcgtgggaaaactatattgaactacattatgtcccacccaagtgattcacagaatcaaataccttaaccgaatttcctccttcacagaatcttttgcctcatccccagtagtatgaatcgaaaagggcagcttcaattttacatcgtttagtaattgaacatgctctgctgcaacctaacatacatagacaatacaaaactaagctacataaataaaaaagtgactacattaacaaatagaatatgaacaagacaagcaagtcaatagtagtttttacttctatatagccagttttcattttctcgttgattgaagcgcttggccgatgcctaacaataccttctactgcaattacatactcaattctcaagtccttaataatagaatgcacatcaggaaaatcatccttaggtgttgtgacctataacaaaaaaaagaaaaaatcaaattaaatttaaatacttgccggaaaacttttcaacaaaaggaactgaagacatcaaagaaagagccaaaactcgtacctgtacaacaccagtatggtctctaaggattaagaaagtctgcttggcatgaaaacgacgaagcgagacccacccgcataaccggacccgtttgcctacgtcgtccaccgaaagctcaccacaaagtccggtccgactaacccaatcgagggtttccttgactggaatcaaaggagattttggagtctcggtaagagcatcgttaggaggagttgagaaagcggaaacagagcaaaaggttcttctgtttccacaaagtgttttgggaattaaggatctgagaataatggtgtggaataagagagtgaatcgaggcttgacgctaaccgatatgagagggtacgctttgagaagtacggacatggcggataactttcaaagaagaagaaaattaaaagctttgggtttctctgaaatctgaactagtgaactctgaagatgagcttcgaagagggttttaggattttagtgataactagcttttgaacatgcgttgcacgtgtaacatatattattcgtattcagctctgatttatattttttttttactaaatgtagacatgaaatattaaattttttttatttaaaagaatacgttcaaataatttgattaatgca

SEQ ID NO: 297863 - DNA, 4165 bp, Cannabis indica
tacaaaatttaatatgtcatttagtgtttacttaataatttattaaataaatataaaatgataataataacgtaaagataaatataaaatttaataataatagaaaattgctaaaagtgtgtctagcaccctttttggtgtcataccgttattgatgtaattaagtatcgagttccatataacttaagaaaatagtttttagaaaatatcactaaccaatcttgaaacgccacctatagtaggtgttgggcaccactagtgtccaataacaatattcataataataatacaaatcatttaatgcaaaagaatatgttaactaaaatttaataataaaatattaaaaatagcataatggtaaatataaaagtataacatttattgtgatgcaaattttacatcatgttatattctgatccaaatttggatcactttttgttatgtgacatatttgcatcacaattttaacaaagtgagctatattttacatttacattacttatttgcatctctatttttccaagtctcgctccctattttagttaaaaaaaaatgtgtttagagagtatagttggatatgctctaaagaaaaatctatactacaattaccaaaatttttagtagaccttctatctagtttagtatttttttttaaaaaaaaaataatctaattttttatataattatgtacgatataattatttaaggtcacctgtaaaatttaagaatatttcaaataatttatagagctaaaaaataatactcaaatattttattacaagtgtgaatattttttcttatacgcgtggtaaataattgtttgaactttattttcaacattataaagaatttaaaattttctaaaaatttaaaggtagtcctaaacaattaagacataaattatcatataaaaaatattaagctaaaaactaatctaaatagtaatatagataggattctaccgaattacctcaataagaaatcatacttaaaacttttcaacaactacaatacaaaagattgcgctcaacccatagttttttccactttttttttttccactcccttatgcaattattttactagctgaatatacaatttgcttcgtctttgaaagctagaaatcatgttgatgacaattcagatttttgcaaaaaattatagcaacttaaggttctcccaaagatgaaagatcttatttgacgagcaacttcacaatatttacttactaagatgaattttcgtggtaagaaaattcatattaacaccacttctctattttgtggtgtttacaataaacaacgtttcattgtttggtgtcttgtgaggttttatggagttattagatcagaatggggttggatgtggtaggtcatgagtttcattctttctttgtttggctaggtgcggtgatgagtggggcagacaataagctgtggagagttgcgatgctttgttgggccatttagaaatctcgtaatgagacagtgtggaatcaaaaaagatggcgagaggaggatgtggtgtcattttcttcattaattcttgaccaatggagtggtgctcaaggtgtagaaaatatccattcacttaacatgttactagctacgatggggcagagagttggactaaacatgtgatgaatacaattaagattaatgtagacgtgtctatttttgaggaagatagatgatttggctctgcttttgtggtttagaatttgagggggaaacgtttggcaagggggtgtctccttctttagcagaagcgatgggaattaatgaggttcttaattggttgaaatctcaaagatattctagagtggagattgaattagatagtcttgttattattcaagctattcgtagttttttagaatgttttttgattttggtttagtggttgaatattgtaaatgtttattgtgatctttaaataatgctattttatgttttgttaaacagcctattaatcgagctgtatatttttttgcgagacaatctcaatgttatgttggtcacatatttagggagggagatactcttctaaactttatgatatccttttgaacgatggtcgattagctctaggttaatgaatataaatttcatttaaaaaaataggaagagaaaaataaaaataaaaataaaatttaaatgataaaattatctactgtaaaattatcaccataaaaactacattaataataaaatttagctttagatattatataatgagaggttgtgatttaattatgtaagaagcaaaagaaaaaaaaaaagtttaaccgctatccacttaaaatattatgaagtatgtgagaataaattggattttcttttcaactcaactattatttgcatagttgaggtagggtccttcttttaaaaggattaatttggaaggtgggagatggtaaatccattaaaatctcaagcccaaattggattccagggttcaaatttgttccctttaaaaataataatatccctcctgaggacactgtttcctattttatcaaaaatcatagtcattgggatataccgaaacttgacacttactttgacaaggacattgttgattttatcctcaaaatctcaactaatccttttatttaggactgtctcatttggggacatagtccttcgagttcccttaccgttaaatctgcttatcatatagccaattctcacaaccctaacccaagctcttcaaaccctaatgtcttcaaccagtggtggaaaaccgtttggtccttaaaaatccctcccaaaataaaacattttatttggagagcctttcatcactttctcccttctaacctcaacctttatttcagaaaaatccttgataaccctttttgctccctgtgttcgaactgacttaattctaattcgcactccttgttagagtgttccaaggctcgaaaatgttggataagtactagttttccaactttttacattaagaataaaaattgtgacattaaaaaattcttttaagagggctagacacttttcaaaaagagaaattggcagtattttttggtattacttggagcatttggaacaatcacaacaaatctctgtttgctaatgaggaggctgtatatataaatacaaaaccctatattttatcctttttgcaggaatacatctcagcccaagacaacttctccttcgagccaacttaccaagcacaagatctggaggaaactcagttaagatcttcacctttattacctgctacaagaacttacaagcttagtgatgcggcagttagaagtcaagacaacaagcatgggtatggagcaattgtgcaagactctcacggtcgaataatagcaggttttcattcttctgcttccacgggtctttcccctatttttgcgaaggcggaggctcttaaccgagctttgatatggtgtaaagctgtccattttataataaacttggtggtctcagattgcttggatttagtcccaagaattctcaaaaggaaaaaagattattcaactctatcagatttggtttggatagttatcgactctttgtcctacttttcctaatgtttcaatccatcgcagcccaagaactcacaatcaactggctcataatctcgcttaagctgcattagaaacagatgaagagtatatttgaaacaatttgtgtttcaaatcttgcttagatcctataacttggtctctattgtttcttctttgtgttacaaatctggtcttttaagaaaaaaaaaaaaaaaactattattcgcattttgtaaactttttttttcttcctgcaaaaatcctcgtcattcttgaagttgtaaaaattatcataaatatttttctttagtgacattaaaaaaaataattatgagtgacaagtataattgtatacggatagtgcaatttttagccaattttttagacaacaccgcatatacagtttgagcaattttctaaattatattcacaccgcataaaccttaaaattgcacaaaccacatcataaaaatgcagtgtgggccaggagcagagccaacataaaatattagggggggcaactaattatgggattatttcaaatatacacaaaaataataaaaaaaaaaatacaaaaatacagttgtatggaattttaaatatttttacgatttttacgat

SEQ ID NO: 297864 - DNA, 1126 bp, Cannabis indica
atatagaagtctagctcaagtggtatctgagataacttggctgcattaattcattgttttctgaactccatgttcaattatctcgagcacctacaatttggtgtgacaatatgagcacaattttactcactaccaattatgttttacacgctcgcactaagcatattgaacttgacctatactttgttcgtgagaaactacaagagagaaaattgttcaagttcatcatgttcctactgcagctcaaattgctgatggccttacaaaggccatttccagttcaaggttcactcaattcagtaccaaacttggcattgttggtagcaccaatttcaagtttgagggggactatgaagacagttaacagttaactaattgtttttctgttacaaatatttgttttgtgttgtatggttgttaggagttagttggattgattgttagcttctttgctcgattttgcttgtatataatcttgttattgtgctcattactgaataagatttaagtcttctcatctttctcttttttttctctttcttctctcttctctcttctctcttttctctttactctgtttctcttcttcttttttactctgttacttttgagctcgacaaaaatggtgggagggaatgagaacttcaacaagtataaatgtttacaattgttgtttttgatttttacctttggcaaaaaagaaagaaagaaaagtaagtgtcccccttatagaaacttctcaaatggattaataatatttgatttaagtttcaaagtccacaggatcatttctagaagaaggtatatatatatagcctaatctttttctaacatttcactcataatttgtcatatatgtagagcagtagtcatacatatatacatgccaagtgctaagtctatttaaggccaatgcaatttagtaataattgacttttacattataagaattgaaagtaaagaaattgactattaagttaaacagaattgatctaggaggaacttgaggataaaggcacccccttctaattaagatgaaattttatagggaaatttacaaaaatactggaattcgggttaacttttacaaaaatactgtcacacggaaattttttcaaaaatactg

SEQ ID NO: 297865 - DNA, 3575 bp, Cannabis indica
cacaacaccacaccaaaaaaacacagttatattagaatgacattcttcaaaataaaattaattgttaggtatgtaaagaataaagcttttcaatggaccatcacacatgttatctgttgtaaaatcggtagagaagcaagaattcagctcactagcaatcaccaatagtctccacaagaacatgatccatctttaaaatggtggaatctgtttgtatctctcacaattatctcccttgaaactattttgcaaatgaacttgagtgcagtatggcaatccacacaaactcttagattcttcttcaccctaatgggagctccaggaggagtggcaattaacccgaaagccactgcaagcttctcactatgatgcaacagaagctcttctttttcatttctatctacatcatgaaggtccatctccaccataggaacatacccagctttcctcatgagatcgcgcagctcatcaagctttgcatagatctccttgcttctcgaatgacttatatcgtgtactataaaagtatgtactttgtctttaacctcaatccaactgattccaggttccttctttaccttgttatatttcataactcttctcacgtctgctacattttcccacagaccagctgaagcataaatattagcaagaagaactagggtaccggatttttcaggctcgagaactaagagcatttcagcagcgcgttcaccaagctcaacatgtttatgaagtcttgctgcacctaaaagcgatccccaaaccgacccatttggttgaaatggcattgtattcacaagctccattgcctcatctaacttccctgctcggccaagtagatcaatcatgcaagcataatgttcttgcattggttcaataccgaacatctctttcattgattcgaaataatttctggcttcagttaccaagcctgcatgattgcaagcacagagtacactaactaaagttatatgattgggttgaacaccatctttaagcatctcatcgaacattctcaaggcttcctccccatgtccgtgttgagcaagtcctcctatcattgcagaccatgagactattcctctctctgctatctctgagaaagaacgacttgcatcgtcaatgcttccacattttgcatacatgttaactagagaattcccagcaaatacgtcggacatgaacccaaacttaagaatgtgaacgtggatttgtttcccttgttcaaatgctgataaatttgcacaagcattcagaagagaactgcagacaaacggatcaggttggattcccttctcctgcatttctgaataaagctttaaggattcttcaccttgaccatattgagcataagctgcaatcatggatgtgaaagccactaaatctccaactttacattcttcgaaaattcttgctgcatcttttacttggctacattttgcatacgtatcaagaaagctatttataacataaatgtcagattggtaaccagttttcatagaaattgcatgaatttgttggcaaaccttaatagcttgtagtgtagctgttgattttaggactgtagataatgtaacacggttaaaaccgatcttctgcttgaacacctcaacgaaaagccataaagcttcaaaatcctctccattctgcgaatgcccagttattatagcattccaagcaatcaaattcttctttggcatcaaggagtgaaccatctttgcatctttcatcattttacactttgaatacatatcaataagtccaacatctacaaacacatcagactttgtatccatcttaaccaagctagaatgcagctgccggcccaattctttgaggcctaatccagcacacgctttaagagcacttgacagcgtgaacatattcaggcgcagtcctaatcttttcatgtccattatcaatctaagtgcccatttatgatcctcatgatgaacacaaccagctatgatagcattccaggatactatatcaggttgtgcaatttcattaaaagccgaaattgcttcatcaagacctcctactttcgcatacatgtcaaccaatgcatttgcagagaatgaatctgattcataaccaagctttaccaaatatccatgaattttctttccttgagtaccatccccaagacttgcacaagcatttattatactagatagtgtaaactcatttggtctaattccactctcaatcatttccatgaacaatttaactgcctctctacaataatcatgctgcatataactaaaaaaaagagcattccacgaaacaacatctcgaaccacaatctcattgaaaagtcttctcgaatccccgaattccccacattttgcatacatacaaaccaaagtattcgccacgaacacatctgattcaaaccctgtaacaaaccccaccccatgaacctgcttccccaagttcaaatcctttgtaatggaacaagccttaagaacactaggaaaggtaaactcattagacttgatgccgaacgagtgcatatcataaaatgccagtagggcttcagcactaagcccattctgaacatacctagatatcaaagcagaccaagaaactaaacccggttgagtactttcatcaaacagtttctgggcatacccaaaacactgagacttggagttgaaattaagtaaatggtttctccaagcatggatttcttccacgcctcctgctacctccttcacagcaaagtcaaatggaaccacctgagaatatactccattaaaaaaaatatgttccagaatccaaatttgttaatatgacgaatacaaagacaaattgtcatacaaaatgaaagagggaaagagagaaagggaataagtaccttgttgcgacatatgggagaagagaatgagaatgagcggagaaagagaaggtttctgaatttgagcaaacacagagaagaagaagagagaatccggtgcggtggtgacattcaattactagcgtagacccgcaacatcaccagtagtgactatgggcgttggtattgagtttttgattgaaagaggcagaaaaggctgaaactttagtgcacccattaatggagtttcctcttggtcttaccaaatttcaatggggatgaaattggttagtgtataagttgttaaaggcatcatcttgatcttgtgtcttataatgtaagaattactagtattgaaattgaatataaaattgccaagcttgaagaagagctaatttaagcctttgaaataatctttagtttactaattagagcctattgttacaaattattaccccattcattcatacaaagaaatgaagaatcaacctcatacaaagaagattgtataaaaatcaaaatatatgattaaatttggtgcttattgtgttgtgcagtggttgattgagagagttcttaaaaaataatatttaataataatcaaacatccaaccaaacaagacctttggaaaaatattgttattattatattctatatatctttatatattaaaagtgtctatttaacggcatttcttggtttaacagaatatacttaaaaataaaagaatat

SEQ ID NO: 297866 - DNA, 4144 bp, Cannabis indica
tttttttttgaaagaactacttgttcattagttaagaaaattgatgggaatcacagggggatttccttccccttgatacaaaacagccaattcactagaagatctagtggttttagctacaccatccgcaaaggaattaaaaatacgacttataaagaaaaggcgaacaaacgaaaggtctttcattacattaaaaatactgtaaaataaacttgatagcttccaatcagggatcttcttggtatcagttagggagtcaactgcaatctttgaatcggatagtaaaacaacttctttccagtcactttccacagcccaactcagacctaaattgatagctctaagttcagcatcaagggctgagatagcctgaattttctgtgctttgacaaaccagcaacccgaaagcctattaactgctattgctgcaattccagcagacccgttcacccaggcagcatctgtaaaaatcacaaagatcacctgatcgacactgggaaaggagagaggagcagcaactagaccaccttgagactcaggggaattctggatatcagaaatggtggggagattcttgaattgaaaatcctgaacacacttagcaatttcgactagagcagacataggattgacaggagtatcacaaagaagcaaggcattcctttggcgccatatttcagagaataagcagccaatgtacgaaagcacctcaatcctgcttgcttcagaagacaataagggtaaaacattttccaaacaacagaacaaattacttcctggaatctcctcaattctgatagggaactttccaccaaaccagagggattttgcatagctacacttacagaaaagatgtaatccggtttcctcttcagcatcacagattaaacaacttttgtcaggtaagaaatgaagtctattctttgtaggaatagcctcactcagggctcgccatagcatgattgaaactcttgggtgaataccagcatcccaaatccatttccaaaggtccttagtagggccaaacttccacagattctccacaagataggctgacttgactgaaaactttccatgtctagcattcttccaaaaaatctggtctttgaaaggaagaggaatccttggaatactgaggattcggatacccaactcactaccaaatatctgtaaaatgatctccccattccagcaatgatcaatggaaacatctgccaaggttttgatggtgtaccctctccctccaaggctagccataagatcagagaattgattgtaatcaagccagggaatccacggttgtttccagaaattaatggaatcacccgaagcagcaagagagaccgatcctttgaggatcgtaattcttgattgaagaatgcttttccattgatacgaatcattacttttctgcttcacacaccagaaatcttcaaacttacaatatttcttcagtaagcaggaaacccagaacttctccttaatagctctgcacacttttgaagatcgatgagaatgtttgccacatatgataatgtattatgcattactacactattgttatgtaaaattccattagattcaaaatttaaattaaatacgcacacaaatatatatagctctactccatggtgggagattttggtcccgctagcatattatgagctatatatatatatatatacattagtagtataattaggttgttttgatattagtcatggtagtatgaaattaaaagagaaatgctaaagggctaattgtgtctaatactttcttacgtatcaatatcattattggtacaattaagtattgggtcctatatagtttaatataataatttttatagatcattgttaattaatcgcaagacaacacgtctaacaatgatgaaattaaaagcatattacagtagagagaagttttgaacattaatttgttagtatggagctgaaataaaaagatcatgggaagaaaacacaataaaggaataaagggatacggtgaaaaatattatgaaagggttgtaatttgagtattttcctgggatatcgagagcagtggaaagcttgtaattaataaacttataattggatatggtgagagatgtcctggttgtgattatataaattatttacttaattgtgaactacaagtctacaacttatattctctgataataacttcactattcctcttttggtttttggtattgctgaggatcgtctttggtatatatcttggtgggttgtaatccaatccttttagtcttgtaactttaagtttatattgctaggtcttctaatggctaagcagatgtcatttgctaagtggtccgtaggtccaaaactgttgcttttaattttggggagctgccccccaatgtgctagtatatactatctacaataacaacatagagtaagtctgcctaggtttttgcaaaacaattttgtacatatatataggttttgaatgtagatgtgtggttgtcaaaaatgaagtatttgctcaagctagtataatatatattacaagtttagtttttacaaataaccaacttatatacactaatttttatgttttacaatgtgaaaatgcagtttagaaagtaaaattggagtgaaatttattaaatattagagtccattcaaaaaatttaatcatgtgtggagtccgtaatttttaatttttataattaattgaattttcacttgcttattctaagaattagcccagaaaagagaaaacaaaaactatatggattaaatggctggctttgggggttcttattgggttggtatggtggtttttatcttggcgctttcgaggggtcaccatgattacctattatcgtatttaaatttggaaaattcacctttacatagttgtaattcctattggtctcatgttttgtggtttgatattttaggatcgtcctttatatggttagttatgttctttctttttatttttgtttaaataataaggtagttattgcccactaatttttgggagatctttggctgatagctattaataggtttgaaatatagtattcttcactcttttgacatgaagcttcaaagttggtggcttagtgatcctttcgttggagatgctagtggctttcttttcttattattattgtaaatggcttggttagcctattattgttactctactttaacataattatcatgtaatggattttgtctaatttactattttaatgaatgtttccatttttttttaccaaaaaaaaattatgaactcttgtgtatgtgtaatatttttgtgattgtgggtatttaattaataatcttgttataagatattcaatttatccatcaatacaaattaaaaagggaattcatatttgctcaattactatttaataatattgaatataattttcaacatatgacatattcatataatttttttacacacaattatgctaatattaaatatatatcaatcaattaaattaattatatgcttaaatgtataatgtcttattagtattatgcagtttcatagtattttttgtatttttgaaagggtgacacatgatatttctaaaagtgtgattgatttgaaatgtcctggattaaagcccatccgtgagggaaggccaatccatacgaaagatgggctcgagcccatctgaagcccagaaggctcgtctccaaagacaagactcattcagaaatgaaattctccagatgaatgttggaatacatccagagacgatattcttagaggcgcctccaaaagctcttagtagggcgacatggctaccctttgatgattggtcctattatgtcatatctcatccccttagaacatgatagtgtgcgcaccatcgaagggaaaacatcccctttgtccaacaactcccatcttacacctccacatactgcatgctcttggaaatggttaggtccatgcatagctattcaactctacctacgtccttctggggaatatgctattaagatggcaactgacatttttaaatgttgttccatataaatcaatccctaagacacctttagagttacggaatggtcgtataccagtatacgccattatagagtctgggggtgccctcctcatatcttaggaaagaaagatggaaaa

SEQ ID NO: 297867 - DNA, 3145 bp, Cannabis indica
aaaaaaaaaacctaaggtacacgtggatacttacacgtgcaaatggagagctctggatggttaataattttcataatgactgcacgtgatcttgtgtgctaatagggccacgtcatcaattcaataaaaaaatattgaaaggggattttctttttttttttgggtaagggaaaggggatttctagcatgcttaagtttaatcactgcagtaatatgataatttaaattattaactattttttaaaaatatttagatgaaaaaaataaaaataaaaacatatgatattatgttgtaagttgaaaaatatgatattaaaccatgccttttttttgggtcatatttacatatcttatttttaactgcttggtaagtgtgacataaataaatacatgaaagattcatgaatatatttatttaaaaaatgttatgtttatatataattactaaaaaagcatacaagattgaaaaattattaagaaaaacatatttaaaatatcaacaccttaaaagaactaattagtgaattttaaagaaactaagtaaactaaattcactttatggaatagaatattactaaggaacacaaatgatatttaacaccacatgtaattatattagtgtaatttagtatttatattttaatttaagatataatatgtaaaatttgctactaaattataccaataaatataagatgggtttgggtatgtgaacgtgatcaacaaaaataaaatcgagaaaaagacaaagaatataggaataggaaaatttaattaaaaaaaagaaagaggacaagaaaaaaaggaaaaatatcttttaaataaacattttataattttaatttattattttattttttttcatctttgaaggtgattttttttatatattttttaaataaatttttaagttgaattgtacacatgtcatatctcagtaacaaataatttggggattcagatcaaatatatatatatgggggaattttaaaccaaaaaaaatcaaaaaatatcaaatatgatataaaaatggtaacatttatgggagaaattctattttctttaggaaaacctgatattatatgttttccaatatgccatattttattcccaaaatcaactttaataattatcacaaaaagatgtccttccaactaattttattaccatttttgcccctcacacaatttctcctctttattttcttcgttatcttaattttttatagataactaataaaaggttaaaacgacaaaggtaaaaagtaaaagattttctttatctaaaaaaattaattgtacttttataagtgcatgcagagatactttaaaaaaaaattggacaataaaattttaatatatatatatataaaaaaaatttaataaatatcatcatacataattctatgatgtatacgctaaaatttatcaatacttatcttcattgttaaaaatgtcttcaatacatctaatattttctttacatcatactaaccttacaaaattgaaactaaccatattgttcttacaaaattaaaattgaagataaaattggccaacctagccaaaatataaatacatataataacctaaaataaatatttccatacaaaataagcttgataccataaatgtctcatcaccattgtagaaccatatccatcaccattgaagcactctcacacaaagtttctttttattctaatgttgtaaaggttccaaatgaatcatttctgaaatttaaacccacaacaatattcaaataacacactcattcatagatttcaaacacttatgtaatattaaaattttgtttgcactatttgttttagatctatacttagaaaattacaagttttttattaaaatcaatgcaattgcaatgtgtaagaacacttttgtgatgatgcgaaaaacatttttttgtcaaaaaccgatatttgacgatgcaaatataatggtgcataaaaaccgtttatttatttaaaaatgatgctttaatgatgtatttgcaattgtaccataaaaacttattttatgcaaaaatattattaaatgtgtatttgtgatgcattaacgatgcatttacaatagtttacgatgatctgcgataaaatttaataaaaaaaatagttatgcataaattttcactcgatgttagtttgcggtatcatttttagtattccgaatttgaatgcgtagaaatccaattttgaactgtatttttaattattttagtctcaaacatcattatatgtggttttatttattttaaatagttaaacttgtgtattcttacactccaaaatttgacttctacatattctaaacctaattactggaaaggaaaaaaccaaaaacaaaaaacaaacaaactgacattcaagtgaaatcttatgcatcaccataatttttatcaaatttataatatatgatcgcaaactatcttaaatatcatttttgcgtcaaaactcgagattttatggtaccattacaaatgcatcgttaagtatcactattgtatcaaaattagatttccattgcacggtatttttttcaaaaaatacaataataagtaaaattttaatcactgaacagtaatttagttataatccaaaaatgtataaactaatgggtatttttgtttcagtgagaaaaaaacaaacttgagagagagaagagaaaattatatataaatggaataaatggcaaaactttgttgaaaggtacatgttagaaatcacagtactattttggctgcaaaataaaaattatagtatcaaattttcctatgtttatcttattgttattgacatacatttttgaaaaaagaaattaataataataatttcatatgtgtaaaaaatggataggttgagcgttgagggaaaaaaaatcgtacaatttgaacttttgagacactggtgagtgggtaggtattggtattcggaatcgttgagcactgatttcattttacccgttttcgaattcagcatttttaggcaaaggaaaattaaaaagaatctattcaacaaaaaaaaataataaaaaatttgatcatggttcacttgacatctattcggctatttagcatttctgaaaaaatatatatatttttttctatgaatcatatgtattcttttttt

SEQ ID NO: 297868 - DNA, 8127 bp, Cannabis indica
aacgaccttaaaagttcaggggacatgatttagtacatgcaaaagtttagggagcaaaaatcttaattggcctaatatatatgttgtattccaattttgcagttcaaatggtagcattccaattttgttggactttaaagtacatgaataagtaaccgataaaaaaaaagtacatgagtaagtgaattggagaaaaaaatcttcattgtcatgatgtgaaagaatatttggccaaactagacaatacccaactagcagaggtttgaaagtcgtcttcctttttcgttctattcctattaagagagaaaatttaattagtattttaagataatatagtattagtgaagtgaatgaccacaattatttttatgacatatcttatgcactatatttattatgatttctgaatttgtataaattttaataattttacatcttactttaaaaataatcgcatattacataatgtcaataaccctatttgataaactagatgtaaaacgtattttcaataaagatagtttatccaagttgataaatatgggtttttactcaatcaaataactcaaaagtgagtcattttcctaataagccccttgagaatgcaatttatcaaataccttaacaacaatgagaatgtattgtacaggcaccactcattgaaaacttggcacattctggagggaaaatgcgcctgtcgaaaatggcacctggttttcgggaaaatgagagagaagcctttcatggaaataaatcctgaagatcaaggatatcagcaaggacaccagttgcagtagtgtcattcccagctccagcgccttgaataaccaatggttgttcgggatagcagcggctgtatacctccaactgttttatagttacataacagaatcaatcaagctctatatgcaatcaatgaaagagttgcaatcttataggcagttagaataagaacaatgctatttaggtccttaatcctttcatagaaattctcagatgattttagggacagtacaacaagttatcaccaaacatctcatttcacaacagcattcaaatgaatccatttgctgggaaaactctacatagtggcgtttttagatatttactatcaagtcctcccattaaaccctacaatcattagggtagggaggaaagaaatataataaattcctaggtaggacttcatgatgaatctaaactccagtcctcatgaataataggaagatattactgaccctacccaattgtgttcttgacattaagccaaagtcactcactgatgccagtctacacagacaaatcaataactattagcaatgtagcctagccaagttgcacttgtgctcgtcgttatcgggtaattattttgacttgaaagatcagtaaggaaagatttggcaattgaaaaattggattacattacaataacagaaatgacaatgtcattcattttagtcttaagaagtattccgtatatttaatggaaatataaggtctcttaccagcctaagttcaactttattgggaattttctaaggaatactgtggaaacatctcttgctagtcaggtcatttggactttcattctcaagtaactttagaatttattttttaataaaataaaaataaaactaacttagtcattttgttactggaattgttccctccatatctcacacattaataagctaccaagccataaatccagcatagaagtgaattacttagtgcagggtgccccaaaattcacactaaaatgaaaggatataaagaaaagatataacagcataccacattgtcacttcctttaagtcttcccaaagcagaatcctttggaagctcttgaatgccaacttcacatctaaaaggacaaagaaagggaaaaagtaaaatgaaagaacgaagagacgaagattagttagtactttaaataagaatcataatatattatagataagatgagttggtatatgttgaggatatcagtttcacttttaattgaggctaagagccttaataccaagagatcccagattcaaaccttggtctaaccccatttctcaaccccacctcatcagttttaacatttaagtcaactgtaccctgtttttctcctttttaaacacaacaaagaaaaaacatcgtgattttgactcgacatgcatgaatatacgaatatacaagcttgaatcgaaacatacaaaaaaaattaccttgagccctcaatcacacagacataacgcagcacatttcctttcgatgaagccttgtgtactctttcttgaaaatctttatctagcaatgaaaccccactgcccagaaattcttcaacggacatcacaccaggccccatttcctctgggtacaagctctcaatctagaagatcaaaatcagtatttgtttaaatagcttatagttatactgggtatgctacaacaagataattagaaatctagctttacatcagaataactcatttaataaaactaaatccaaagaaaagattctaacctttatactatccaagttcagacgttggccaagaagtctagcaagaattaaagcctgttttaagaaagttttgataaatttagcttttctcattaaaaccatatgaaacaacatttctctaatcaacagcaatatttaccatgcacaggaatcttataagactgttaattgaccaattcattacttctaagtatgtttgtggttgatatagaaaaccaaaaatcacttttcaaaagcttcgtgtgaaatatggggtactgacgcggcaaaccaaaatattttaccttaataattaatccaatcctctatcaatcctatgcttttagatcattaaaccgaaatattttaacgtaataattaaatttataactgggtgggaaaggaaaggataaaggaaaggagaaaagatgacaattctaacttctaaatcagttgaaaggtttagttgaggattaaaatgtagattaatttgattaattgcaagacacaagcaaagttactctaaataagtacataaaccaataaaccttaatagcatatgaagtgaaccaaaatcaaacctttcttgccacatccatcccactaaggtcatcgcgcggatctgaatgatgacaccagttaaaagatcaaacaacataaccttgataacaaaattttaagatctaattctttcaaaaaaatgagtgacaaatagtgaagctaaataaccaccttgatcctaaactgtaaaattccaaatcgataatcatataaacaagtaaactttaatttctaattcaaattgatgtaaagaattaaaatctttttttccatcattgaggtgatgaaagcatgtgtgagtatttcttgcacacaaagaaacctcgcataactctttatctctctatttttgctaaccagaaaatgaaaacttgataattaaataataaagttggcaccttgaattatttgattttctacagtcaaagcaaaataaaataaaattctaacgcataatattgaaagattaagcatcaagtaacagaaacattgaaaagaaaccttatcctatgttacgaaccagaaattatgtattgtagaaagattaagcatcaagtaacagaaagactatagacacagaattaaaagtttatgctaaaatggagctaaggtacaaaacctggttcagtgtagcccaggcttttagcagatttaacaacctggctaaagggctttccatcttcaacttcggacatgacatatcccagtgtgcctatggtatgagacagttaatctttacagtcagcattctaaatccaaatgtaaaattgatgatatgaagataaatcaagaaaatctcataagcaatcatctaacatcaatagtttaaaaaacaactgaaaagacctagtaccactcaaactcccaataatacggtgcactggatcgccagatgaaagtaagcgatttaaggtcgctatgacaggaaggccagcaccaacctaccattgaaaataaatttatacaagtgtctactgattgcaacagaaaaaaatacagtaatagaaaaataagcactgcataagtgcatagcatagcataacaaactcaataaaagcaaaacatatatggtgttcgacgaagagggtgaaaggtcctcaaaaagttcccttttgaaaccaaaagggaggaagtcagcaaatgaaatggtgacaattcaaactaaaccatgtttcaattcttctcttgtgctacagtgttccctttgcataatatatcaagttgaaagtgattttagtaagtcgtacttgtatatttcaactcttcgtattataggttttttttctcttttctttttatacggtcaacaccacaatcatcattaaaaggagacaaaagaaaattttcaaataggtttttgcaaattgatattacaaaatgactaatactcttaaaattccttaatctttccttcacaattgagctcagaatatttgatattcagacgaattagcacttgatagcattaagcataatgccttttctagactatgtaaaagctgaaagaacttaaaccttaatgatgattatgtgatcaaaaaaatgagtgtgacagttgattttgaggattttagcttagtttcagcctttggaaatgtgcaggaaaggaatatcagggtctgcctccaattagagtaattttcatgtgaaaatagataaaaataactatatttagggatcaggaaactatagcaattgctatgtaggtactcaggagggatgagctaaaaacatatagttgacatagatagcatatctagttcgaatgcgtaaagcttagttttaaaaattccccaagatacatcctatatctacctcttctttttctatcatttctcctccatctacttttctactatcctttttcaatcctctacattatatttcatataataatcctaatttgggaccttagcatactttacctgaatattgtaatcatatttcaagaatgaagtccaaaagctgaacctcaattactgaatcagctccctctttctcatcaataattatttctttaataaaaatataatattcaatgtcttcccaaactcatatctgattgctgtgttgtctgttctaaacactaccagatcagagaaggaaaaaaagaaagaaatataagctgttactactgagagaaaattctacaatcattaagaattgaatctctattctccagttggtacaaacctaaaatttcataactccaaacattttgaactagcctgtaattcaatgctctaaccaagtagcccaaaacttaaatgtcagaagcttgtgagtgtaatggtcgaaataatatgctatggttcataaacagattgttcccttgaataaagggttgtaggcattaaatcttctagcaatatcatcttagtaattaccaaataaaagacactaattttatctttaatgctttctcccctatagatatacttgcatgtgtctagcaaacaaaaagctctctactgttgagaaagaaaacctctaattcattgagaaacaatcccatataaatgaatgttggaaaattttaaccgttattccttcttttcaaaatatcacttacagttgactcgtgccgaatgaaacgaggatgtgaaacaagcttgtcgtaatcctcctgtaggccagagaaagaaagttattcaagacatttcatgtgctattcttacagaatggggaagaatatactaaagttcaatgacaaacaaattcctgcaaataatgaaaaaaggaagagcctttacttgaccacataattacatttcaacttctttcttgatctgatgtgttccatgtgtggtaaattaagacacaagtgagtacacatatgtttcttgcatcacattcaataacaatactttcatccatttaccaatagcataacagcctaaatcaaatccctaccattttacaagtaagaggcttcttatttgctaagacagcacaacatccaatatctaccactcgatttagcactccaatagtctctgaactggcagagcaatcaacaagagccaaacctatagcaagaagtaacaaaaaattgtcaacattcgaaatgacaacaagaaagactaaaccatgccactctaaatatataatacaacaccatatagatgccacaaacctgttgatttacccaagagagctgcaatgtcaataattttcttggtcaattcgggattcgaatatacctggcattcacctttgttgacgaagtaatcaacatcagtttcagtttacaaaagagagcacaaaaattgctacttaatctcatcaaaataataaccaataataattaaaacaagaaaagtaccagaaccattaagagtcaacagagaagaagaagaatccaacttgacccggcaaacctccaacaaaagattatcacttaactccatgctgaaaacatcaggagcaacaactaaagatttactatcacaaactcctacaactctcaaccggattccctgccacccacacaatgcttcccagtatgagaaacaagtttcaaatacatcaactgtatgcttaaaggagatgatatattactatgaatcatatagaaccagaagcataagtagagtatagtacaataactgcccacaaaacagaaaacccacaattataaaagtcaaatttttacgaagatattcaagtttcggatgttagcaaactcagacccacacagttactttatggtataacactatgtgtacaagaaaacccagataacagaaatgaaagaaatggatatgatgaagagaaagacctggctggcgtgaagggatcggcatgttacaatgtgttggaggagttggcggccaactcctccacaacccatcagaaccacggggatgtacttcattttctcactgtcagtgcttttactgcttaactctgatccttcctccctcgagcactaccgagtcttgttccgcagttgttattcttaccctcggctttactccaactagtgtgtttttaaggtttgttttttagttttttaaatcaaaaatgaaaatagaatttttattttgagttatgtaactaattttgttttttaattttaaaaatataaaatataagtatgttctttaaatgtttattttttttgtttaagtgaaaaatgagaaaccaaggtgagagaaagtggacagaggactgggaatcaaggacaagggtcaagtccaagtctggatttgggtttggggtttgaggtttaggttcgaggtttgggttggaagtcatgaggctggggttaaggtctagggtaggggtggggtccgaggttaggttcgagttcgaggtctaggtcaggttcgagttcgaggtctaggtcaggtcggattcgggtgtggatatgggtgtaggtatgggtccaagtttgggggtcatcaccaagttcgggtttggccggggtccaaaggttagcactgaatccaggattcggggttagggctagttcccctctagatttgaggttcatgtctgaggtcaagtggtcgagtctagggtccagtgtttagtgtttgggtctgagatccaggggctaggttcaaggtccgagatttgggtttgatgtctgggggtcaggtccagattccaacgtctgatgttcagagtttgagggtgaatgataacttcaagtcctagtccaagtctaggggtcaatttcgggccaaaccaggggtgggttgcaacatctgagagccgaggtccaaggtcagggtcagagaccacccacatgaggattcgatgccgtggcggcatccttggcagtctactctttcatcacatgttgctctgcctcttcagctatcaaggctaattcaaccactttcttgtataaagtgccgtgagcgatgataattttcaagtcccgactgattgtggcattcagtcctgtcacatacttttgtttctgggtgaagtctgttggtaccatatcaccaccaaactttaatagccgatctaattccaaagtatactcggctatagtcattttccccggagtcagcttcacaaagtcttccatatacaaagtgttggaaattatttta

SEQ ID NO: 297869 - DNA, 2788 bp, Cannabis indica
ccatcaactgaagaagaatctagtttcatggagaagattccttacactagcatagttagaagcatcatgtatcttatggtttgtacaaaaccagacctatgctatagtgtaagtagagtaagcaaattcatgggaaaacatggtctagaacattggaatgctacaaaatggatacttaggtatctcagaggtactatagatgttggtctaatctataacaaaggtaaagaacacaccaatgtggttggatttgtagactcggattatgctggtgatatggacataaggaggtctcaaatagggtatgtatttcagctaaatcaacacacaatcagttggaaatcaaatctccaagcagttgttgcattatccacaataaaggctaaatatatagcctgtacaaaaacagtcaaataggccctatggctcaaaggaatcccctgggaaatgggaatagatcaaatgagtatataggtccattgtgacagccagagtgctttgcacttaagcaaaaaccaggtattccatgaaaggaccaaacatatcgatgtaagattacactccattagagacatccttgctagtgacagtgaatttgatcaaggtttcgacagatgacaatgctgcagacatgttgacaaaatcacaacctgcaacaaagtttgatcattgtctctacctactgaatatggacagtagattgggggcctaagtcttgtaatttcaaagacaaggtggagaattgttgtatgtttatgcctttgtaatttagcatgagtttgtcactttctatttatgtcatcggacaattagttaactaactgtgttagttaattcgattgtgtcctaatgtaatgtacctaggggtattctacctataaatacctctaatcatttctcattcaagtagtgtaataatgtactaaaaattctcgagtaaataatgtcacaattttagatgtattctctctcgagctactgttcttatttgtgtgtatgaattctttgatttcgagcttggattgaatatgatcaacttgcacttatctccaacattaatatctactaaaattttgaacaagacaaatgaaattgttataggtgagaatttaagacttctctaatttttaagagaataaaatatggtatcatttcaaatagtatttttcttttgcgtgactcccatgatgaaacccttgagcacatatggtttagatgttggtttagtgaccattttttcgctagaaataaagattgattgggctagaacactaaagcttataatatgtttcaacttatgagatgggtgactagaaacaaatgtcaaagttcaagaaagttgtttactccattgcttttattggtacagtatatgaggtttggagaactagaaattacttttgggagcatgaagtcattagaggagaaatcattatagacaatgtaattgtatacttaataaaatgaatccattcataccttccaaaactaaaactgtggttttggtcattgtttaactgtttggagagcatgttttatgagctttttggttacccatttcgctttgctttggaatgttggtggaggtttttccccaattaattgtgtagtttggtattaataaaattcttacttaactaagagagagagagagagagagagaggaaagaagaagatatgttggtggtgatggtggtgatctttttgtgttgttatgttaaactacggctatggatgaggaaagtcggtggtgcaaagttaggacaaagcaagacaatacatttctaagttgtacacgtttctacttttctaagctgtgaagtaccaaaggaaggactataaaagtcatacaattctcttgttagatttacatcacattggtttggtctctttggatcattaaaacaccctttgacccaaaaattcaatcaatcaaatcctatcgtattttatcctttcatttaaactttctttcaaattattatgtgtaaatgccccttggatcaaactttctttaaagcaagtccatttccttgaaaacttttataaaagaaataattcgatcataaccaaacatagattacaatttagaaattctattcataaatcaaaatgaaagaatcatcatttaattacgtgattatacaatatttttataaaagtgtaggtactctactattttttatatgtatatatatttgagtattacctataaaagagtattattagaaaaatttgagtttttatgtttaatttttctttaattaaaaagttttttcgtacttactatgagctaaggtacgtttttccatcggctgaaaaaaataagaatttctttttcgacaaataaaaaaagtttgagtttgactttggaccaattaggtgaggaccaattcattagataacgatcattcgtacgagtggggaacattttgtgatgtcaagttttgtgcgcagctagccatgttggatttgtcccaatggatcttttgtcttcttggccaaacattattttccaaaccaaagtggttttgcctcgtgcgtctgtaagcttgaattatatccaaatccaaagtcgtagcctaactccgcttgtgggttggtttattaacttgattggtcttcaaaatggtctcatcttggctaatattgggccttggaagtgcacatgtcattaatctggaaacgcagataacatgtagtattacgaaaatttgagtttgcctgcttaatttttctatttaattagaaaaatctcttatttttacattatatggctcgggttttt

SEQ ID NO: 297870 - DNA, 1042 bp, Cannabis indica
gaatttgatcacgaacaaaatgttaatcaatcttgatatacttgcatcgagcatagaagaaagggttggcggctaaggcaccaactccttggttatggacccagattataagaacattagcaagggtaatttgaagttcagtaagcaaggagcgtaagcacatgattacagaaacattgtttgctaaggatcgaaattttgatttagtgagcaacaatttgtttcttcttatcaaaccagaaaataagatttggaacaaaaaatatagcatagccactagttgaatgcctatcatcaagacacctagcccaattggcattcaaataagcttcaagtgacattcaagaaactagcttgagaagaagaccttcagatattatatatacactgcaagtatcgcagcaagcgtttaaatgcttctcaatgaacagatgtatgtacatgaataaactgataatgaaaacaacatctggcttggtgagggtcaaatattgtagggcacctaaggtactttgatacaaagttgtcttcaaaacgagagccttttgtgagtgaaagcttttgaacactgctggtaggactagaacaacttttagcaccttccaaatgaactttgacaagcaaaacagcgatgtatttgctttgggaaagatacatgccactcgagtccttatgaatttccacaccaaagaaataatgtacctgccccaagtctttcaatgcagaagagttgttcaaatcattaataagcttgaaaatttggttcggttatgagaacgtcatctacatacactagtagaatgaccatcattctagcagttttaaaaacaaacaaagaagtgtcagccttaaaagctatgaaaccccaacccaacattcaaatttgaattacataaccatttcatgaaacgtgaaaattgatcacgtttcatttaaccacgtgtggataacaactgataactgcataactgcttattattcttatctttacaaacggttgatgctgatttggacaacgatatctcgctttgcctatagatga

SEQ ID NO: 297871 - DNA, 5895 bp, Cannabis indica
acttcttctaggttttgttattcaatgtttctttgttcttaatcctcattatacttaactgatatttatatttctacagatcgtggagaagcttctgattgcagctgttgcagatgctgatgttactgttcgtcattcaatcttttctgctttgcatgggaatagaagttttgatgattttttggcacaagctgacagcctaagtgcagtttttgctgctttgaatgacgaggtttgtttcaaattagttttgatttgtgttcactttgaaatatacattgtggaaaaggagactagaatatttgatctctactgatttattgactgcagtatacatgcttatttataggcaaatttacaactcagttcagtagagagaaaatagtaactaactctagaaataaggaacctatctaaccgttttagaataaggaaattcaaatttaaatagtaagtaataggatatttatgagtatttatatattaatgaaatacttgtattctaacacctccactcaaactggtgcattaaagttctacatgcctagcttgcaaatcatttgttctaaatagttattggacaagcctttaggttatatttggtaggaagagtggagacttggatggatggagatgatgatgtcttttccttatgttgttggtattgagagaagagtgggaaggatggatgaaatttataaatataaaagtactaaaccatctattataaactatatatttaaattatttaaagggcatttatgtgattttcccttatatttttgctctcccatatttggagggatttatatttgaggattaggagggagacctcatcatccctatagtgctccttccttataagcttccctctgtaacctaacaattgatttttgctctcccctcacccttcttcctcctattccttttatccttccgaaaatccttcatgtagtgagaagatttgcaattttctggttgcttggtacatgacaaaagaacttctctaattcatattttttccttatgaaatgatgatctacttctgcgtgcgttttatcatgatgaaccggtttttgagctatgataataattgataattattgtagtatatcacttgatccaaataagctcacacatgccccttaagctagagctctaagctttgcctttccatttcttctttctagctaccgcaacctatttcttctccaagttactagattaccccaaacctttgtacagtagccagtagttgatgttctatcttcgattgagccaacccagtttgcatcagtgaatgcttatatacgtagatcttcattcttcttaaaggagagtttattcccaaatattttcttttaaacactaattccttatgttgcctccaatggttggtgcatatattgactcaccaaacttccaatgtcatactcatgtatgtgagaaagataagcttgtattcgaactagatgctctacttttatttattggcccatttttgctagcttgaacactgacagagaagaacttattcttaagccaagtatagagttaagcattttcctagtcaaccttttatcatttgcactcgcatcatgtagttttgtagctatctatttctctacatttatcctttttgagtcgttaggtcttgttacagagagttgatattgttcatactttcttagttttgagtaatttgctttgattaatttacaaagaggataaatgaatgcaatgctctgagtgtttttttcttcttaaaaagaaatctcctctggaatactctctcatctcgtctctttttgatagatccaaactatgcatgctaggggcttccatggccctcccagtcatggaaggtctcattgacaccgtgactgcactggttttggacaaggatttttttttgtttttgattcctcttaaggccatgcttccttaacagaagacaatgactcgatcaaagtttgtgaaagaacaagattgactagttatgagattatcgtaactattgatgcaattgtccgattacttgaagcaatgggagacttacataagataagggtgcaacacaagcaaagttttaggaaatcattcttgagtaattctatcaactttgtttttgaaaagcttccacaatataaagggagtttttttctcaaagtttcacttctgaaaaacatcattacgaagaacgaaaaaagatgggataggttcaaggaaaaaagctggctcaagaagaatagctggctagaaagggaggtagtagtcactaattgtgggctaatgtgttgctggctgagtttattttctttgattattcttttctgttttaccatggtatcttcgccataagtgaggtttttattatatatcgggggaggccagtctaagtcaagtggtctttttctccttttttttttttagaaaaaaaaagatggtaaagccagaagaagaaaagttggatggacacaaggtaacaaaccagataagaagaaacagagggtagaaaataacacttgccaacaaggctttaagaaccactttaagataggaagatgtgagtttttaccactcaagattcaaagccaagaaccaacatctggaaggcagaatgaagcaatctaaatttttgaaatacactctaaagtttggagaatggcactaatagtgatgaaggataacattaatattccatggagtgcaatctttaaaacttgtcgagaaaattgagaagaagattggagattagctgattgtttgatgataggatagtaatgtggtgtaacgaggaagaaaaggaaagcttgatcaaagtagacaagatggatatcccaattctgacttttttctctctcctctaattatgctctcttctctctcctctttctgagaagtgtgcccatgcatacgagggggatccatggcccttctggtcatggtcgtcaccaaaaccccactggttttgggaagaaacatggccactaccctactggtcttggctggaaaaattttcctggtccttctggggccaaaaaattccaaaaatattggagttttcaaactaagcataaagtgtttatggttacactgtcgtacgatgggggagcagttcgtatttgcgaaagaacaagattgtttggatacgaagttaccgtaaccattgacgcagcagattggattattgacactttggaggagattcaacagaaatcaggggcacaaagagtcaatcttaaacgatcattccgtaatagtgttgcaagctgcctcatggaatgctatgccaataacaaaggttctttcctgaaaatctctgtgctgaaggaaaacaaacttaagatgattattgtgcctgaagaagagggtgcgaagggctggttagagctaaagaattgtctcagtggggttgtaaagaggcaggtgacagtatcaaacgaccggagtagcagtctcagagaagagcagaaggcgtgggagcctacaatcattcaatcttggactcagcagaaagcagagacaaacaatggaagaacattgaatcagcgatcgtgggcgaatgtagtgaaggagccgtggaaaacaacgaccaaacagaactttcaagtggagaatgctaaggcaaaaaagtttgtatctgctaaagaggttggccgcaggaaaggagatattgagtggagggaattattcccagccatcaatcctagctttaaaccaaaaaatccttatccagagaagagatttcaccaaccaaagttttatgaatacatgagatcgagggcgcaaatcagaaattgggagctggccacaatccttttccgagacaacagccatgcatcctggagtgtcatattctataacctctctagggagttagggagaaaattggtggttagtcaattatttgatgacagatgtatagtttggtgtaaggacaagatggatagagatgaattaatcaaaactcaaaatatgagagtgccaggggcacaaactgtagtgtcttttcatccatggagttgggagtcacaaaaggaaaatattaaagtggagtgtagggattcctggattggaatacaaggtttgcctctgaacctttggcatatgaaaattttcagaaagattggtgattgttgtggtggtctcttggatgtggataaagacacggctgaagctagcatgctctcgcatatgagacttcagttgaggggtgatgatactggttttgtaccagaatatgtggtcctagagcacgatggtaaacgggtggaattgaaaatgttcaagcttaatgatttaaattataggtttcatggatattttggtacttgttggtaccaagattttgatcacaacaaggtgtttggggagggtaatgagcctgcggtagagggaaaaaatggagtaaatggagtggaggtagttgaaaaggttggagatggtagggatgaagaagaaatagtggcagcggctggtagtgttgagattcatggtggagccgagcctgatgttcaccaagaggctgagatctgggtcgtaaatgaagacgagagcaagagagaatctgcaacaattttttcagaaaaaataggggagtcggaatcggagaactcagtagctttggggatcatggtggccggagctcattcagggaagcttttaatgggcagagacgattttgagactatcgagactgattttcatgcgcagaataatggtgtggaggcggttggtattttcaaaaagaaatcacaagaatctaggggaatgataactattcatagtatttttaggaggttggtgagggatctagaagggccacgtgtcaggctgtccacacctagcacttttattaatttaaagtacatgtggcagctatatgaagatgatatctttattaaattgggccagaatagtattgtaactgaggtgggccgaatcaatgctagggagaggcccaagattaattatttggagggggtagggccaaaggaaggattcggacagcttgttagtgggccggttggtgtggctgctcctttattgggtttggaggtgttgaacagtgacatgggtcaccttaattacagacatttgggcccatatacaatatttctggaaaaaaggacagttcgggtgcccttagcagatcaatcaaaggctgtcttgaatgagttaaatgcgatttttgaaggcattctcaagaaagtaagaccgaagagaagggaggattttaaaaatgcaactattaatttatgggaagatttcatggctacaggaagacttacttcaaattcagtattacaagaatcagaaaaagttttacttggggaggaaattattagcaaaaaaatgctgaaagtatacattagaaaacgaaaattcatttctcctggcagcgttgatgtaatggagcagataggtggggaagatcactttgaggagttggacaaggatgaagaactaagtgtggaagcaatcaacaaaatcagctcagaagatgacaattcggaagaggaagatggttcttgtactgaagaggaagacgaagaagaagatgtagaagaagatgaagaagtagcagaagaaaatgaagatattttatgtcatatcaaggagctttggcaagaggaggatggagttaaaggtgattcagcgcctcatgaactagttacagagcaagctagattggaagtggccgatacagacaagagagataatgtgttgttttctgaatcggagctagttgaatccatggcagaattgggcatgaatctaatacttaaagagaaggaagagaatcaaaagaatcagtgtcccaaaggtggaaggaagagcaatagagagcttaaaaattgaccttaacataaattatgagaaaggtcagaa

SEQ ID NO: 297872 - DNA, 3680 bp, Cannabis indica
catcactgagaaccaaaacgagatcactttctacgactgtgtggattctgtgagctattgtgactactgttcgatctttaaattctttactgatgattctttgtattattccatcagttgcagaatccacagatgctgttgcttcatctagtacgagaatggtacttttcttgagcaatgctcttccaagacaaaacaattgtctttgccccatgctccaattttctccattttcgaccactatcatagatgccaatttgcatcatttgttagagcagttcttagtggagaagatataatttgagtgtaataaagcctattaagttttttttttttttttttttctaatcaataagttaattaagcgataagatataatttgagtatagttcttagtagcaataaagcaagttaattaaccttacctatggcatccaacttcttctctttttcccgctactattgaagctagttggcacttttctagagtattcatacgattacgaatcacattaatttattcaagtgtatacattaaatgaaaaagtaattctccatctttttattcttagctaagtaattcttcatctagttacataattatttatcacgagtcatttaaaagatataagagcccaaccataggaaatttattgtaatacctcccatgcttcagagtcagtgtattgcccaagtggatcaagatttcccctaacagttccttgaaacattgtcggatcttgtggaatgatgctaagcctagatcttaagtgatgaagacctatcttgcatatatcgacatcatcaattatgatgcttccttctcttggttcaacaattctgaatatggcttgtataagagtcgatttcccacttcctgttcttcctacaactccaatcttcatcttcccaggaaatgtgcaattaatgttgtttaggacagaggggagatgttcagcataacgaatctacaatgcaataaattaattgcatgaacattaaatatccatcaaaatatgatgataataaccaatggatttttttatttaattttctcgaaaagattttatctattagttagtatcattgttagtatagtagaattgtaaaataagaaagctagtagttttcaatcatcttttactcttgaaattattgtaggcacagaaagtatacctccaaatttctaaagcaaattgttccatcttgtggccaattgtttggtagcttgcaatcttcaattaataaaggtgcttcactttgaatgtttgaatattgaataatcctttcaactgaaatcattttattttctgcattgcatatgttccaaataacagaagcttgcaaaacattcaaatttattccatatgtcacagccaatcctgctatgcctgcaaaaaaaaaatcaatctcactaatatccaagcttgtgaattatatactaaaaatcatttagaaatacatattatgtagaaagtcaagtaattaaggagaagaataagtgttgttcaaaaaaaaaaggaaaagaataagtggggcaaccaaagaatggtggtatcattttaaaagtgttttacctcctattttactgaattttaattagtgataacatgattgaaacatacttggattgataactccttctggtagtgtgactaataaaaccaacgagaaggcaaaaacaaagtttgatagcatatttagtctgaaagagagccattccatcgctgccacattgtgaaaccacggtgttgagtgattgtcaataagacaaagattcagttgaataaagcgatcttcttgttgaaaagcacgaattgttgcagagcctgatagtgattcagcaaagtgatgaaggattggagtcctttgtattccttccaaccttgccaattctctagctgttggtatgtagtatcgctgaaagtaatgatcattgtctcattacatatctagctaatttttgtgaaaagaacccaatagtgcaatcaaaatgacttcatggtgttctttctcataacatctctcgttatgtgagaaaccacatgtttcttattgaaaactttctctttctctaataacatgttaaccattttaattttttgtattactcagtattttggattctaatgtatcaactaagatgcataagtttatgtgaattgaaaacaataatgtttattaataacaaaaacacttacttgataccatatgcaaactgcagttacaggaataaagattacaaacacctcccatgccacttgtgacattacggcaatggttcctagtagttgtattattgaaaaggcacaccaacctaatctttgtggcatttccaaatccaacacactttgatcagtagatgcctacaaaatagaataatgaaaccatagataactattaccttatcatattatatttttcaaccatgataacatatttggaatacatttataaattaataataatgttacccggctcaatgttctgcctgttggtgttgaatcgaaaaaagacattggtgctcggaacacactacgtagcatgttaatgaaaagcttttgggctgtccaaagtcctgcaattcctactaacatggctcgcaacaacacacaaagtgaacctccaacagcaagcaatacataaactaataagatgaagtttatttccattttgggttgacttccagtagtaggaggacaagaccatgccatccaatagttactagctatttgtagtacttgaaatgatgattgtgccaaaattataaagggaacaagcaatccaccatttacagttgtcaaatagttccaataaacttcttttccaatgcttcctttctctcgttcttcatcctgtaccagctttgcccctttcttctctgttgctatgtcaagagagatatcatggtctgattcatgccgtgcgggtaaaacttcagaattagttgtggaacttgctgctgtggattcaatctccgatattttctgttctttactagtattctcaaaagttagcatcgattcaagagccttgctatgagcaccaactagaatttcaaatccaatactttcattcatgagtttttcaaatgttccagcttgtgctattttcccattttgcattacctattttaacttaagtttagttttaatacaaaaagtataaaatatgaataaattgatataaacttcaagcttattcattgtattgtaaacatgtaattctagaataagaattccaaaaacagaacttacagcaagtcttaccaaaatatggtcagctgctggaagaaactcaacttggtgagtaacaaaaagtacagtcttttctctgagcattcccatgagacaatcctagaaagaggatataatattatatagtcaacataaaacataaacttcccttgttcataatttttatcatatatatagtgttagagtattagttatatactagttgtaaaaattagagtaaattgcatttaatagtttcctatttgtgtttagtagttttctattttagtcttctagttttgtatataaatatatactattctatgaaatacaatagacaattcaatcaccatattttaaatggtatcagagcaagattttgaaattgagaatttgaaattagagtttatcacaaatttgggtttttcaattagggttcttttt

SEQ ID NO: 297873 - DNA, 1957 bp, Cannabis indica
tcttgtctcgagtttctaggtgagagaaatctcactataacagttggacacttcccgtaacccctcgattgcagagggttgtctctctattgggggtgatgagttgagtaattgctataacttctttttgcaccttagtgatgaggtgtaacattttcaggcacttaattgatctccctggatttcacttattttccccgtacatggaaacttgattacttgttgataggaggatgttattgccttcatagcatggatccacggtcggtccaaaatcgcgttctaggctgacgggcaatctactacgagaaacttcactgacttgtttactctattggcatagataggtaattggatgtaactttgagctacaacactttacccaaagaatcctgggccttcaagtcttcagtttccatttccttcagaacatcagcgaacaacatgtttgtggagcttcatgtatcaacaagcattcgcttcatttggacgtgggccacatctagggttatgattagggcatcatcatgagagtaggcaaactcagcggcttcgttttggccaaacatgattctaatgttaagtccttcattgtctattactgctatcggtttaactgatcaaatcccgcgagcaggagctactgatgcccgaacggagattccactcaaatttgatcttctagaaattacattcatggttttcttgatgtacaagggggagagtggtcttgggttttatctcgcctctgctggacgtgcaatgttgaatctgctgccaaataatctcgaaaaaacccttcttcgaccaacgtattcactttaaccatcatctatctatattcgtaggttgcaagcccatgctcatcgtggaaggcacaataccaacttttatctcttttttaggatcagtagtcatttttatggccatcttatttttttcattcctcttagacgtcgcattaattcggtcagaatgatagtcatccgaggtagtccctctccactttgttggttcctaaactgcgtgacttgtgccatgttagttattacggatcctcttgtgctcttgtcattgaactgttaggttttagttctacgttgcaggcgtgctattaggactcgctcctttgcttcaaagaggaaagaatcttccatggctgaagtctctcttgatacgtcctctgcatgtcttctttccttgacttctaatgccacatatactcgtgccatggtgaaggctctcgttagggtgagtcctagttctactgttattggttttttcagttctgacccatgcagtaatccttgcattaatgccttggttgcaaccgagtcggtgcactttagaatgctcacatactccccgctaaatctatggatgaatttttccagaggttcatcgagttcctggtgtatcatcatcaagtccgtgtctactttcgcggttccaacacttattgagaaatttgtttgaaatcttacaatcaaatcttggtacgcatttaaaccatcgtaaagtggggctcttagtctttgtgtaaaggtcttgcacttaatggcctctaaatcttccaaagggactgacactggaagcattttttgttcaaactagcgcatgttccatcatactctggtaactttggggctacgtaccgatgtggtgtttccacgcgtagaatatgattcccaaacggggagtgcgtggacccttccattcttgcccactcactgtgtattcacatatgactttttgcttctagggccagcaagttattccacatcgtttcctgcagcttttctgtttccttactcatcgttggggagttctttgtggctgttggagcggtggtgcgtttcttaggagctgtactgaaaagactcggtttgaccgagccaaatgtagttttatatatatatataaaataataataaaataatatacatatgtatgtaaa

SEQ ID NO: 297874 - DNA, 1362 bp, Cannabis indica
cgatcgatgaggcccacagtgatcccctcttgaattttgacttatatatacgcgcgtacattttagtcggtcatggttaccattttatttctctcttttaattaattttgttaattgattctgatggcgtaccatccaccgcacatgacctatagtttagggcattttatgtacatttacagtacttccttttcaatataaatttttgtatttacatacattttttttggtacattttttaaatatatttcttttaaccttcatctcagcgaacaaactttttagctctgtcattgcccgctaaggtttattttgatgatgttatatataacttaataattatccacaatattctgcatatatatatattcccaaatcccatgccttaataatcggttgaaaagaatgaagacccactattctcaatttaatgaagctcgtcaaccccaaataaatctcttttcttattaatttccatgcatatatgatatattatatcgtttctgtctcgtctctgtctgtcatttaaaaatattaatataatttaagcatatataattaattgtataatatattatatatgttttcgtgtgtaaaatactatagaatgtaaacttggtggtggtgggtgggtaaactgttactgaagcagataagtattatatattaggataagatatatatatagagaaaaataaggtcttcacaaagaaagtcaatatgtgctcgtatttcgttgtcatcaacaaatacataaagttgagttgaccatataaatataaaaaaaatatagatgaataaatacaatgagtttttaaggtttgcaatttattttggctgaatgaaatatatataatcctgaaactatggatgaatataacatggactacagctggaaatgaaaactacgttaaggaatctaaccatagcgcacacaattggtcttcggccggttgttaatgaacaagttgacccatattgtctaaatttaattaagctaattaatcgatcgttttaagttatatatatttaggctaggctccattaattaatttttcttgtgtcaattaataaatacaataaaatataataaatgtatatatataatacgtacgtaatccaatgaatatattggaaatcattttcgccgttaaaagtatccgtttggaagtgtatgccagttccagtataagtccaaagatcatgcattgcgttttgaaatgaattaattattgcattaatttatatatgatattattttagtgtacaagtctccagttcatgtatgtaacatccccgcttcaagcctccattggatccttacacccacggaataaatggctcttatacacgagtacgtca

SEQ ID NO: 297875 - DNA, 9398 bp, Cannabis indica
ttctttgctctattttagaaacacataaatactagctggactatttttgggtttcttgttgaatgaatttgcaatagtttgtattgggagatttaacctgtctcgaagaggaccttattgctatcaattggtgctttcattgatcttcatccaatgaggaacgatgagatggctactctgttcaaagatatgaaggcaagcttcaaagaattttctgatgctcatttggggagatatgctcaaatgttgcatgatcatgaagccaaaaataaagagaagttcgctcaggctatgttcacgcatatggcgaattctcattcaaccgaagcaggtgcgagtttagtgatggctcaacctcgtccgaccttctattgtgctcctacggatagagacgctggagatctcaatggaattttaaaaactcttcgggtcaaggttgctagattcaatggattcgatgttgaagattggatttacaagatcaatcgattcttcgatcttcatcagattgatgattccatccatttgacagtggctccatttcacttggatggggtgccgtcaaagtggtttcagtggatggagaagagtgactcatttgtggattggaatgcttttctccaagccttacgtatgcgttttggagattcggtgtatgacgatcccctgggtcgtatttcgaagctcacacaaacaggtcgtgttgctcaattttgatttaaatttgaggacctgatgacgaaattgataggtatctctgagcatttgttcttgaatttctttgtgtggggccttaagatggaaatacagagagaattattgctagctaaacccgtggatttagctgatgccatggctaaggctcaattatttgaggatagaaatgacgagttggttgggcgctcaaagagcgaagggtctcgttcgggttggtcccctcgtccttctacttacttgcctccaacggtccaaaatattggaggttcatcttcgtatggttccacaccaacctcaactacaggactgaaatcctttaaaactggtgccactccgctaccagtgaagaaggttacccctgctgaaaaacgtgacaagcgtgagaagggactttgtttcacttgtgatgagaagtatagctacggccatcgatgtaagaaccagattttggttttatgtggcatagaagaggaggatgattccgatacattacctgcaactgatccggacaatggcaaatcagatgactcgctggtgatgaggtaagtctcaatactttatttaattcggtgaatccgtgaatcttttgattgagtgctaagcatggtaatgagacattggaagttcttattgatacgagcaacaataataattttatccaagaaacattagctaatcgtttgggtttgaaatgtgaagataccaaatgcttcaaggtttatatgggcaatgacaactctttattgtgttcaaaaatttgctgtggagttgatttatggctgcatggacatgaatttaatgttgatttgtatgtgctaccgatttggggtcttgacattgtgttagggatgcaatggctacaaactcttggtccgtgtttacatgaccatgagactttgacgatggagtttcagtggcaggggaaggctgttaagctggctagttcagctgattcgggagtacaacaactcacatttcaccagtttcattcattgcttaatgaaggggaagtaagagaagtgtatcgattaactgcagtgataaaagaggaaggcctaagtcagcttgaaagtaacagttggtaggaaaatttaccaccaatgggcagacaattaatctctggattttgcgaggtctttcaagagccaaaacaactactgccgcatcgaagtatggatcatcaaatctttctaacctggttcagcccctgtaaatgtgaagccttattgatatccccactttcaaaaggatgtcattgaaaaaaatggtgcacgatcttctgtcatggggttttgccaaagtcagtacaagcccgtactcttctccagttttattggtcaaataaaaagacaggacatggcatttttgtgtcgattatagagccttgaataatatcactgttaaagatcattttcccatacccactattgatgagttactagatgaattggggggtgcagaagtattctcgaagttggatttacgtgcgggttaccaccaaatccgaatggacccccgagatacacacaagactgcttttcggacacacgagggccattatgaatttatagtgatgccatttggtttgaccaatgctccttccacatttcaggcagtgatgaactgtctattccaactgggcctacgacatcatgccatagtattttttgatgacattttggtttacaacaaatcatgggaagatcacttgatacacttgcaacaggtcctacaattgctccaacagaatcaattctttgctaagggtagcaaatgtcatttttttcagacttctatagaatatttgggtcactttgtctccgttaaaggtgtgaaggtcgatcctaaaaaagtggcagcaatggtcgattggccacaactacaaaacctcaaacaactccgaggtaaccttggtctcacgggttattataggcattttgtagctcactatgcgtccattgtagcacctctagcagatcttttgaagaaagataacttctgtgggccggtcttcccaagccactgcaacatttgagacactaaaaaaagcaatgaccaacactccggttcttgctttacccaatttttctaaggtatttgtgatagaaacggatgcttccaatgctagaattagtggagttcttatgcaagatggtcatcctattgcttttttcagccgcaagttgggcattgatttgtaggtacctcgacttatatgagggaattgcgtgtgattgtgaaagtggtgacaaaatggcgacaatacctcttgggacgtccctttgtgattcgaaatgatcacaagagccttaaggaacttcttacttaggttattcaaaccccggaccaacaataatttcttcagaagttattgggatttcaattttgcgcttgcttcacgatcaattttagcatcaaaacaataccttaccacactacaactcgcgtgatggattgctgtattttaagaacagaatcatccttagtaagcattccaacctcaaacatattttcatgtgtgagttccatgactcacccatcggaggtcatgcgagaattgaccgctcttttcttcacctaagtgccaatttcttttggaaaagggatgcgccaggatgtgggcaaatatgtagaatcttgtctagtgtgccaaactgttaaggcatctatgcaagctctgtagggattattatagtccctgcaaactcctgaacgggtttgggagaatttggctatggattttattgttggattatcgagttcgtatgggctcactaatattcttgtggtcattgacaggttcaccaaaatgcccaatttggagcattgccgaactagtatacaaccaccaaagtcgctgaattattcactaacatggtgatccgacttcatgggatgccacacactattgtgtcagatcgagaccccattttcacaagtgcattctggaaaaagttgtttgagcttatgggcactactttacagatgagttcagcttatcatcctcaattcgacgaccaaatggaggttactaatagctatgtggagcagtaccttcgtgcatttacggtcgacaatctgaaataatggagaaaattcctttcttgggctaagtatcactacaacaccaaccatcattcaattattggaatgactccatttcaagcagtttatggcaaggtaccaccatcaattccagcctacagctttggtaccacctccatacaggccattgaagaagacctcttgtcccgtgatgctattctctaacagctcaaagaaaacttgcaccaaagctaaaatcgaatgcgacaacatgctaataagaagaaaagaaaccacgagtttcgggtaggtgatttggtattagtaaagctccagctgtatcgccaatctacggtggccaaacgtcttaatacaaaactttatcagcgatgttttggccctttttcagtcatagctcgtcggggtacaatagcttacactttggatttaccaaccgagagtcgtattcatcccacatttcatatttctcttctcaaaccatttcatggttgcgctccattcaggtactacctattactcaagctcaacatcgtcaataaacctcttatggtcccccttgctattttggccactcgtactaaaatgatcaatgccaaaccagtccaacaagcactagtgcagtgatctttgagctctcccaaagatgcaacatgggaagattttcttcctttaaagcattgtatgatctttcccaccttaaggacaaggtggttttcaaggaggggagtaatgctagcaaattccaagatcaagacccaatatcaattgacccaaagctaatggaccaaaagataagaaaatgggcagagcatgctaaccaacaccaggagttggagccttcggctttagctgtcaacaaaggggaagaagctgctgaaggtgagcatgaagttccagcacatgggaaaaggagccgagtgagacccaaatggctaagagactttgtgatggctgaaaggagttgagaaactagctggatgagcatttttacttttccttgagatgtaatttctttttctttgctctattttagaaacatataaatactggctggactacttttaggtttcttgttgaatgaatttgcaatagtttgcattgagagatttatcctatctcgaagatgaccttattgctatcagataataccgaaaataattgtatcttaagaattatcccatagaatgccttcttcgcatgaaattttttaaattctaaatttattgttctgtcaataaattttcagtgccttataattttattaaagttgtaggtataaataatatattatttatcacagttgtttcccgttgaggcaaatatattttggttgaagactaagtttcccgtttatcgttacgttttgccaactaactctttctatcaatcaaaatgaatataaatatccttaattctcataaatactatctcaagtagcttttcacaccacttttcagtctcagctaattactcactaattgcgaaaagaggggtgttacaacttattacaacaatggtcatatatacatatttaaataaagcatttgatagttaggaaaaattagacctcactgaatatatattcactaatattgaagacacaccatttagtcacattatgggaacaaagttataaagtctagaaatcttagaaaaattagaacggaaacacaaacacagtgaccatatatatatactacacatataaaatatgatctgtactgaactatacagatgacagttgaaacaaaataagattataattaaaattattatttcatttgtaataagttaaaataaaaaggaagaaatattattttatattttatatatagtactacattagaacagtacctctttttctatatacaaaaacaatatttcaatttgctctatatatatacataaaataaaagttttttacatttataactgaggtgttagcccctgagttttatacacacaacacataattatcagctagcccttacagcctcataaccataacacacatattgttgatactgagatcatgtccggcgtatggttgttcggcaaaaacggcgtcacgcggcttataagctacccaacgagggaatcattcgagcaaaaagagccaccttttccaccagggacagccaccgctcccggcgctcggccacgtgtcctggtctaccttccagccaaccaagtaatccgctcctacgccgaactggaggttcgactcggagaactcggttggactcgttaccacaactcaaacagaccggacctcctccaattccaccgctcccacgcctctgctcacctcatatctttgcctagcgatttcgccaagctcaagcctcttcacatgtatgatatcgtcgtcaaaaataggtctttctttcaagttcgggactcaccaccggccacttcatcataagatcatcatctttattcgtcgtcgttgttgtcatacattttaagttaacttaattagcactttacgttgaatttaattattaatggtttagttaaacgaagtctgatatttatatatagtatatttattacatattttgcactttgttgtgcactaactattatgactcggatctccaaaagaagaaagtgttagatcctcagctttagggggctataatattatatgcttgttttttttagtaatttaattatgaccatttcatgcaagaccgctcttttttaattatatatatttatctaagaatataaaacaactcctccagatggggagcattctattattaacaagaattgtctgcattatataatatgatttttaattaacttagtatttcaatatatactatatgcagattatatgtatagattgacttgagaattttctgggtatcatttatagataggacacctaaatcctaattggcaataattaattaataatcaggtaagccatttaaatgatgaagaatgaatatatataatgattatatattgaatttggttttttactttgtgggtttgtattgtgtacgtagtctttatctgatcactcaaagcatgcttgtgtatggatcagatatctagctaggcttgcttacgtgactcttttcacatgcacgatacatgatgagtttgactgtgtttagttcatgaatatatatttttttatatgtatatatgaatcatgcaaatattactggtcacacattagcttattttactttaagaaagtttatttcataaaaataagaaagtagttatgtggctattgatcagcaattctctatgctatttaataaattaaaatctgttgactcaattcaattgcaccaataatatcagcttagcttttgtgtggtaccttaaggtaataatatttcaagaaatgctaaaaagcactaatagtgtcaagcactttcttacgtgtcattatcgctattggtctaatttagtatcgggtcttatataatttaatataataaattatcattagccaatagtaaggcgacacgtcttgaggatggtaggcaccactggtatccaatagcaatgctctaatatttcacatatgatggaggataatgagacgtgacacttcttatatatacactatttttattaagatcaagacaatgatcaaaactatatatagcatgaaattacactaattaacactcgaatattgtaatcgcgcagtgctattagtattcaaaattacagtccaagcaaatataaatctacaaaattagaataagtaccattgattgagacgaacttaaactataggcatttagtccttaattaatgattaatatttaataaacatttactatatatgaataataaatgtgtactaattaatgtatctcttaacattacttagtatatatactttgtttggagatgtacataatttgtaatagtgaaacaatgtgacattagagtttgtcagcccgagaaccggctgctcacaaagttgagttaattaaatgtattatatgtatgtatcatgcataaagctggccagcagtttatgaatttatatttattttgtatactatattaattgttagtcgcttggccttgcagtgaatataaactttttgtcataaattatagaagaaattaaaaatataatattaaataagtgataggaaatgtttccctatttccctctttttattttgatttctgctatatatatatatatatggaatgagctggaatctatgcacatatgcatatgaatcatgatgatatgacatgatatatattatgatacttgattagaccaatcacggctagtatgatgatatagtgtaaagaatttgacatatattacttagtcaaagatttgacctatactacttctctcatctcccatgccatgccctggcccctggctccactgatcatcacagaacagtactgctactacgtacgtttgttcacatgacaatttaaacccctttaatttgttgctttaactgcaaatatcaattaaaatagaactcggatccttgtcaatttttccacttatatttctcgtccatctaaccaaatgatatgattttttggaagaaatgatgacataataattaatgactatagtaggttcatatggatcaaacaataagaagcatatgcatgttcaaatttgtagtaatgatttatgccacttaataagctgattattggctaagctggattacttgacagtgattattgtttttcgttttcttttattgttaacatgttagtgttagttagttgttctctataaatagaaacatattccaactttttaggtaattgtagcagtgagagtaacatgtaattagctgtacaattttacatcacttaataaaggttaagtgtaataattcaaaaaaatgtacaagtatgagattacaaagttttgaagagagttaaataaattgatatattctacctatatatgacaataagatgcaataaagatctcagaaagaaaagtgagataagagaagtcttgagagttttggaagattgtaataatgaagaattgtgtatttgatatggtgagataatttagtaaattaaacttgtttgatctcaattttgaagggtgattgtatagctttctttctaattaataaagctcacaagtcattggtttggccattctacccttgaattaggtagaaaattactcaaactatctactgcaccaaataatatatctctgtgttttggttttaatttttcttacaattcattctttgtttactcttttttggttgtttgttattgattagtgcaggttgtgtacacaacacaagtggcatcagagtcgtggtgttctttggatcaagaactcaatcttataatgccctcgatctagtttaaagttgactagttcaatggacaaaatgatatttacctttggagaattaaaatgaaagaattgttggttaatatcaatggcttgcatattgatgaaacaaactttgagcaagactattgatgtcaaacacaaatagaaaaacaattcaagtataaaggcccagagtgtcatcctattgagtataggttgataaaaattttagtagataaattcaaaaatgtggaaaaactgcattaggtct

SEQ ID NO: 297876 - DNA, 1336 bp, Cannabis indica
aaactttgataaatttaacacagcatgagacaacaatttttaacagaaaatcttaattccacctaaataaacttcttgcatttagttggaggtaaaataatttttattttacttttgcttgattttattttaaaactattaaaatatcattcatattctaactatgttgttattctttccaaccaaacatcatctaatagagtattgttatatgagtttaaattaaaaaaaaattaaaagaaatataaaacccgaatcttaaaaaaaaattaatattactccaattttaatttaaaaaataaaaccatttataaacacaaacatgttaatcatcaaaatttaatttaaatttgatattttttattcccatctaaacatcataccaaacatctcactatagttttactaaaactctacgcaatcacaattaaaatacctcctttcttttcttacgatggtcatttagtcaataattacctgctcactatgtccaaggaccagcctatattttatttgcactgctgcttttaccacctgttgaaatcttctgcaccacgtgtttttcacaaatgcgtggaaatttttgcattacaaaatcaacagatagggaaaaagagaagtaaatgggtcaatttcttccatgattaataatggtttcaccatgccaagaaaattgtaacactacagtgaccatctagagtagcagagtaaggagacgcatgcctgtgtttgtttgttttctgctgtcactcattcatgtgacaaaattgcaatcatgtggggcaaaccagagccaccaacttgaaatttgaaagtatataatgttcctttttcgaataaataaagagcatataatatacttaatttctttcattccgtactccatactgataagaaaatttgcatgtcaaacctgaagatgtgtacttggccaaaaaaaaaaaaaactgaagatgtgttggcatgaatagcccagatacatacaagtacttctactagaatacaagacaatgattttcattataacatctctatcagtaaatgatgatttaatccatgagtaataacagtagatgagatgaaaacaggaattttaagtcttgaaacaagggggcgaatggtctggaaacaatttatcgagaatattgaagtattaagtcttgagtctataatcggtccaacaaaccaaggatctattagtattgactactcaggccatgttaagaaacctataagtgcaaaagtgccagaacagtctcagacataatagtaaattcatatttgcaggtctatgattcatatagttttcctggaaacaaataagctattatattat

SEQ ID NO: 297877 - DNA, 6672 bp, Cannabis indica
tagagggagtctaaatttgtttaagtcaattgcttttataatatttgatactttactaattgatttcattctttgggcgtgactccatggactagtagtgtttgaaagaatactgataccacatacaattctcttgtgttaagtttttaaattctacactatttatttctagttctgtattgattctacaaatctatgttttgcagtgccatgattgtagtctgttgttgcagactgttacagttgtgtttttactgaaatttagcataattattggcatttgtaaaaatacgattttttattttctattcatgctttacatttatagaatactattcattgctctaaacatatcttattatttgtttgggttttaataattatttagtgatatattatagaagaagatgatgtatgatgcatgaaaaagtgatgttgtaaaatagagaaagtataattataattttagtgatgtattttaaagaatagagtagagaagttgttgtgaatactctaatattttataaatgtaaagcataaataatgtattttaaaaaaactttaaaatgaagaagaattttaatacaccagaaaaaaacagagcaaatttgactcggcacaacctaacaattcatcctaccaatgatctgtgcctagaaggcgtttctagatctctgctctagaaagctatataggcaacaacaaacacggtttgacccggggcttccctttcattacttctttcacgacaagggaaccgcgttcgcatcagtcgaagtggtggaacaccctcctaagtcaaagagagagcttccacacctctctccaagaaatacgattcgatatctaaatcgactgaaagagagtgaagaggcagctactctcccaggctccagcccacgggaaaacctcttctttctggtttacatcaagtgcattgaattccccacaatcagaataaaagaagacgggtcaaagagagattcgggacaaaaccagtgtagatctaccgcaagcatgcttttttagtatgatttttcaaattttgtaaaacttctctattttagagaagctcctacaagtgtttccacaaattgagagaataaataaataaataaataaagggaaaagaaaagttttattttatttttaattaatgagaaaagaaaagttgttacatgtgaattgtgattgttgataccgttaaacagtttccaataaaatctttgaataaaaaacatatttcaatcaaaatactgaaatacaaacacaactccttacacaaaccacttcaccatctctttctgtctttcaattcaaagttcaaattaaaatgaaaaagacaatttagtcctccaattaataactcgtctttatctatttttttcaccctaaacaaaaaccaaactaacataccgaacaaaaactctaaaaacacttcacaatttccaagtaaaaacattttaaaattaaattaaaaaaaaagaaagaaagagaaaatctgtgatgagagagtgatgatgagtttcttcgtccctacaaaagaaaaaaaaaaacaagaaaacaatcataaaacagaaaagcatcttctctcgaaaaaaccaaccaatgtgtctcttactcttagctcactctttctctttcccttcttctttttctctctctagatcctccgtcacctccttaccctgacctgactcagctcttctactcaccccccacttctctacaatggaagagtcctccttccgccggaaacccagttcccgtcgggacccgcttgttcgagggagatcatggtgttgttctttcgctgttccgccttctagccccgatagtatcgccgtctttcactccaaagcggttcgtcatagcaagaccgaactggcggcctccaaaccgaccagtagctcggtccctaactcaccccaaagcgccaaatccggactagggttggtgggtcggatcgaccctcgtcggatcttgtctccgggaagggtttccccgatcgactctgatcctactgtagattcgatccaagaaatcgctagtactgacccatctgcggccgtcgattctgttcctcctgtgcgaacacagagttttcgtgctccgagccagaggttccggccggtccaatcggtccaaccggagagttcttccgtgggttccagtagcaatgtgtttgatgtgaggttgaatttgaggggaaagaaaggtgggttcttggttctggagctgaactcgggggttctgtgtgcaaattcagaggttttcgctggtttaatcgacgattataagaagggaatggtatcgaacagttcaccttctgagtcgaaaatttgcagaatagaggtgccggatgttgagaacttggccatgtttagagagacagtagaactcatgtttgaagatgatatcacaaaacgactgttgaggatcggagtatatcgagctattgatgtacttgaggtcagtgcttcatttgttattttcattttagttctttgattagttatctcaactttcttctctgttttgtttttgggaatttctctgcaactgtcctttggaaagcttgagcttgagtcttttcatcttgtttttctaaattgattgagcttcatttgtgtagttattaattacagagcttttaatcagatttttgatgagctaatttggggaatggagattatggtattttaattaatatatttctttgacagatttttgagttttctggtatgtatttgtaatagtataaatgtatgttatattacaccaaagaggatatatatggaagttagtgaaagtgtgagaaggttcaaattgggtagttttggctgaacaattttgacctaaccattcattgacttttgttttctcctaataaaaccaactgcatggcttacttagctatctctctttctatcactctctttttcgtcgttttcttttcccgaatgaagtcattaacggtaggtactgagggatttaatccttataatttggaaagaagacaataccaaatcctccataatgtgggagaactaattaataaggatattattacttgattaatttagtctggtcccaaagaaaggcaaattggtcaatgaaattaaagactgcaaatttgttattgtatttaaaagctgttttcagtccagtatgggcgaggcatttgattgagctgtgctagtgttaggataggagtatgtctactcctttttatatttaatattggcaataactgttatgactttcttggctgtttctttcacagttggaacctctactttatatgttaccttttcattaatgtttgctcagaagttttaacttgatttgaaggtggatgaatagtaattcttatgcacttgacacaggtattattatttggtgacatcaacatcacttaggaacacatgctttcatttttaagttgatattcctcttgatttctttctacattttatatccatattgggtcggatcaagtgaattttgtgtgtgtgtgtgtgctgttctttcatttagttttagtgactcattcaagcttttccctcatgccacttgttactattttatttgctgaccccatcagctaaaatcaagtcttgtcatcaacctcccaaaaagaagtttgaaaattgaatgaataacggtgaactcccctagctttaaaccactactgtttaattttatatagttgtggattgatttgcataaactgcataagggatctacggattatcatcaaaatatagatttccatgttgaaatgaagtgtcactattcagataaattctttttccatttcttttatggagtcaaacatagttacgtagttttgagcttgctttgagcttatggagtcaaacatagttacatagtttttctttagctcttcttcccaatgctagagtgtttggtgttagataaaatgtgaagtgaaaatagctttaaagattgaagaatatgatagataaagctcaataaaatgcagaaatgaataacattagaagtagaataagatggatgaatagtcagtggtattgatttagccaagatttcgagagcttagttctccacaccagaaaatactctctactcactatttattcttacattaatcctcaccacaagagctgcaccctaggtacacaaacacccaacccaaataactaactcactgctgcacttttccctcagctgagtcagctgttgatgtggctttcttgtttccctttcttgcttatacatacgtgagatgaggcttatcagaatacacatatcttcataaagaatttcacctatatagatatgtactacacaacatttacacttcttgtatttcttgatgtgtgtgtagtgtttacatatacgtatatatgctttgtttctatgattccaatatcttgaaatgaagtcaccaagaagaatgttgctcttcttatacacaattttcggttacttggtacaaatctacaagtttttgttggggggtggagatagtttattgcttaggactgattttattgtcacttataacactttttaatcaagtctttgttatcattcctcaacttacgcttctgtacaccctataacatagtaatatagctcatattacttaaaatatgatgaccctagtcgatgaagtttttaaaaccattgatttatttccgataatgaaatgttagatatttatagagcatcctctatatttggagtgatgcagttagtttacaccttccccaaatatcttatattaacttgatctgttcctctaacttagatgttttcttattcttttaataggtttctgcaggtattatgttcaataaaggtgttttatctgcttaaagtatctcgaggctgttccttggactgaggaagaagaggagaaactaagggatctctttacaaggtttaagtttgatgatgttacaaccaaggacatattggctagattgtatctacttgactcggcagattcacaacaaaatttatcaagacaattggtttggtctatcacctctagtacggaagctagtgcaaggaatgagatgaagacattagttaagggtcttctttgcaaaagttcagtctatgagaaggaatatcctgacctcaataaggaggatatatatgctatttgccagtcatgtctcgactcacttgtcagtctgtttaaggagacctctgaaactgtatcttctaagaaattgatgaaggatgcagggaagcctttaattgaacgaatatccagacaggttgataacataaactggttactggaaatcttgcttgatcgacaaatggctgaggagtttgtggatatgtgggcaaatcagggggagctactcagactgcatgagaatgcatctccaatggtcaggtatgagcttagtcgggtttcagcaatattattcattgctatggggacccgaaaacttcattgccggacagaatcaagatcagggcttctccaagcatggtttggcccaatgttgttggactttggttggctgcagcgatgtagaaagggacttagcatgaaggtattggaagaagctatgggtcaagcactccttacccttcccttgaaacagcaatatgtgttgtttatggattggttccgagatttctccaagcatggtacggagtgtcctaatctcagcaaagctttccaaatttggtggcgccgatcatttctaagaggttctgaaacatatgccgtggaatccaggtaacacagtacaatatatttctgcttgcacagtatgttagttgtggaggtgaagagttctgaaatatccgtagaagtgaatagtgtagatcaattatgtaggatagttgtaacagttgtgaaatggcagcatcttttctgtgattatcttctttgccttcatcgtcagtcgtcagcaattctacaggaaattaaagaggccacaaatgtgtagttagttggagaagactctacttgcagttttctctcattggcttcttcaaacaccgtgaagctgtcccgggcattttggctccattccaaagccggaaaactaatgtaccaatgaaacttagttgctaagttcatatcagagaagattttaacgacttttatcttccttagtaataattgtcattttttgttataaagataaagggatcatgtttatggcatggcatggcatgtatgatgtatgtgcacattatctgaaatcgttgtgcttgtagtattaatgaaattaaaagtatataattacttcttaacaacttgacgaagtgtcacttatgataaaaaaaacacttctgctcataatttttcataaaaattgctttagaaccttcttgtactctggactctagcaatactattttggtgaattggaagacttattttgtaccctagcaattcttaacatgaataggtttcactgtttcagtaagccattaattgggcataaggttttttatgtaatttattcaaaacttattattgagaactaaacaaacgggactaacactctaggttgacacacgtgctttattgtctactcgcatggtcttctctccttcagccaactttcttgaagaattaagtattgcatagaagaataaatataagaaatttttacacaaaaatacaaaatacatattttatta

SEQ ID NO: 297878 - DNA, 1983 bp, Cannabis indica
tgacaacatgtaattaaatactacgttttagtcacaagtaacattttattgtgactaaaagtcacatttagtcataaaaaaattatattctaactaaaaacttgtcactaaaagtagtagtgagagcataactaaaaatttatgcccaaactatttaaaccaatataaattatacaagcttttctttctaaaatgagaaagcctagaataaatcttcctcgtaattccattcattatacacttgcctattatataaagaattatttctaacctcccaaatattatgaccattgcattcaaaacatcaatataaacttctctcttgtatttcgtccttctggattttcgcatccatttcaggcactactccaagtcattttgttgagcatatcccaaatgaaagaaaacaatttcttcctctctttgtcccttggccaaagcttggaacacataattaagcaaaaatgctaaagttcatagatgtgaacttaatcaaagtcattttgcttcgaatcaagtctttggtcataacacaattttctttcaataccagctagagttttgtggaattttatacttccaccaatcatgatctttgagatagattgagtgaatctaccgcaccaaaagattgttttttttggtagcaatatcccacacatacttacttacagcccctacattccagtgctctatatctttaaatccaaggccaccatcacttttggattgacaaataaacttccaagcaatctaacctggactagaggaattgaagtcacatttccataagaaggcattgcaaatactattaattatcccaagaatatacttaggtagaatcatgagttgaccccaatatatgtatgaatggccaacagaacaaagttaatcaaaatgcatctattaatataagagacatgccttaagctccacattttgatcctagctactattttctcaataataagtcacaattagccttagatattttggaagctgaaatacacaagtatctaaaaggaagactactttgagaaaaccaaaactatcaataataaactgaacatcattatgagacatacccgaacaaaaaaaaatgattatttgcttgcattagattgctagccctgaggtatcaaaaaattatttaaaggcctgttaacgtaaattttcgttaactaaaaataataaactttttcgtaataaatatcatacataaataattacaaacaatgcataaataactcgggatatttttacgtagttttacagttaaatttacatactccacgttagctattttattaaagatttttctgaattccagatacaatacatgatggatcgtatctctttttctctcccaaatttttcgtccctttttctgtgggatctgcccctatttataggaagatagattggcagttaactgcttgttattcttatcctttcgatggttaatgctgatttagacaatagcatctcgcttgacttatcgatggtcaatgttgattttgacatttgtatcttatgtattttcaagttgttatccttgtctgttataatgtcaatcaaatgctaagtgttagcagatgattcgttttaccaagttcctttaaaatagcaaggtggatgtcacgctatatgtaacccgcggttgctttgggtattcaccttttttccttcgaataaacaaattatttctttgggcctgtgtgccccaagacaagtatatgtctcgtcgatataggttttaatagttttctatccttgtctcgcttaagactacatagtcagcgagttatatatattttctattaatcctttatttaacgagttattctttttcttcgcattaaataatataacttcattataccaagtggttcatattccactatatgtgtaacgtccccgcttcaagcctccattgggtccttacacccacggaaataatggctcttatacacgagtacgtca

SEQ ID NO: 297879 - DNA, 3986 bp, Cannabis indica
tttttacttttcctaaaaataaaattaaaacaaataaattattaaataataatgtgtaggactatcataataaatatgaaatacgattactaatgaaatatttgtaaataaaaatgtaaaaaataatataatatataatattatattgtagatcaaccattggtgatgctcccattcaaaaatttaatgaaatactgacatatagtcaatctttgttacttttgtttctactgtcactacttttaacattcacttgatggaatattttgacaattatcataaaaaagaaaaaaaaacattcaatggaatattttgactaaatactaaattacatattcagtcagagtcacctaataacagtatttccaataaaaaggtaagtttttttaaaaaaatactgtacagctaatgtaactttgagagaggggtaaaaaatactgcacagctaatgtatgtgaaaggtaaaatagtaaattcaaaccatggttctcacaattaagacatgaaatagtaaaaagcatgtatgtaaaaggtgaaatagtaaatccaaaccatgcttctcactcttaggcatatgaaaagtaaatctaaataactttgtttatcttatcaaagatatagatagatttgctctattgatgagttttgtcacctaaagaaatgtcagtagtagtactcatccaaaaatgcactgccttggctggacagtgtaattccacatcaacatggtagtagagaagatcactcatatgagatttggatcatcttagatgtcaatctcaaagtcagcaaaaatgagttaatatatgtggaccattccacattaatgtaagtaaccatctctttgttattattattttaaatattatgtagtttggcttaaaagtaaaataaaatattatactataatggaagaagtggaacaaaattggtgtggtgattatgggtaagacagattttaagctgatcagcatgcatgggacatgatgacttgagtggcccataccatacatacaacaattcatcctttaaaaaaaaaaaaaccctccatgattgacataaaggtaaggtttttgggtgggggcctcacctaaaggaaccattatttgaatccaaaaccttattggccagctacaaccttacatgccaaataatacacttaatcatgacttgcaggcagtatctgtattacttttaaaagaaaaacaaatacttttttctctctctcaatcaaaagctaaagctccattcaataaaggctagactatagaagatgctttatacaaatctttttaaagaatagaaaattcaacatgacaagaggatgatatacttggactccttcctagtaaacctaagctttacacttggagattcagtaaccatttcatttgatattatatactataatataaaaacaaggttgatgaagatcattattggtaacttcctaggtaactatcaaatggggttgtaaataaattttgtgtgagagaacagagaattgtagatgaattttcatactagttggtcaaaaaaaggagtggactttttaatacttggtacttgtacagcctctctctctctctctctccctctctctatacgtgtgtaagtaaaaaattttatagaaagaattcaactcacaagtatttttatttttatatttcaacagcatcaactgggagagaaactgctctgtgaagtgagtgaggaagtaagaagccattgttgaaactcttggctgctgcagtgaccatatccttagcgtttgttggagacttcatcacctcgcaatttcgggccctttgggattccgaactggggctgctcttattgatattgtcattattgtaactggaacaaaattggtcatcataagcagaagaccggaagacgagtcctttgttttcttctagtgtgtttaatactaccagagacgacaaaaacccattgtctaagctgtgctctgtgcttccactgtttgaagagtctgatacaattcttaactgatgatctttgaactccctcatttccatctgatgctttgctttcagccatcttaattcctgcaccatttccttctcatgattgtctgagatcatctcatgatgggttgaagagattgaggataaagaatgagaacctgataagtctccgaatgaaatttttgaacttgatcgagttttgttgttgctcttcatattgctctccttctcatcatcatttcttgtgaatattgactgctcctcaatcttctcatactcttcatcagaatggctctgtccggaccctacagaactcagttctcggctttcatgctgaccccatatttctcggtagttaggcgtactgtctgtattgtgatgctcagactcgtcggcttggtacgtgacctcctcgaaacgaccgtgcattgaagtacattcaagcctacaacattgaacaactggcaagctcatggaactagaggtgttgttacttgccagaaacttcatgaaagagccacttgaggtgttattattattattctctgaggaagcacaattttggcatatgttttggttattaaaacggggtgtttccactaatcctggaccaggttcccattcaggtactaaggaagcaatttcaccatcgatcatgtctgctattcttgtaacatcttgatcagtaatgtcaagctctgcaaccatttccgtcgctacgctcaatgccgtatccatttcaatgtcaaatgggaaatagatatttcgaattcggcctgcaaatgataggattacaatcgattagttaacaacattcaaatttacatcaactcatcaagaaaagtacaacagacattcagaccttctttatctgaaattctaagtcttagaaagatgtcaccatcttctctcattttccctttgatgcttattccagcatcttcataatgttcatcgtcatggtgctcgaaaagctcaattccactcgcttctagctcagctggatgactaccccattcatttagctcttgactagaataaccattcaagaatccattgctaaaggagctactactgtgatgtaactcaagtaaaggctgccttatgagaggtccaaactcatcaaaatctcgtccacaatctaatggttttaaatcatattcacaatcctcaatttggagaaaagggtcatttaaaagctctcttgctgagagcctaagggatacagttgccaagcacttctctacaaattgtctcacttcaggatcctttactttgtacaaagcatctggttttttaccctaaacaaatattaataaattgtcaatgaaatgaaatctagttcttcccttttactgggtctaaatgaaaaggttaagtgataaagagttcactgttctttcttaccgaaataacttttttgtagatctgagcaggatgagtgcattcactgtatggataatcaaaagtaaccatttccaaaatgcacatcccaaatgaatatatatcaactaactcattatatgcctcttcatacacttctggagccatgaactccggagtccctatcaagggcaatagtaaaaagataaaaataaataaacaaaaacccaataactctttttaaaaaaacatcccactaacccagaatttgaaatttataattatagatgtgatgtaaaaagtagttttatgggtatttttcttttgttattttatttattaaggcaaaaaaaaacacaaaaatcagttgttaccaacacagtgagcagcttgagattttctcaggattgcagccaaaccaagatcaccaatcttcacttctccttggttcccattaacgaaaatattatcacacttgagatctctatggatcacaggagggtcatggctatggagatagagaagcccattcaagatctgtctacaccagtgtttcactgctcttatgttaactctcttgtgttttaacctgtacctatacaagataggtaagat

SEQ ID NO: 297880 - DNA, 2205 bp, Cannabis indica
gatggaatacttaccttcaagtttgttctgaccaagaccaaaaacactataagactgactacaaaaaatccaaagctcactaggaagtcggtccctgatattttgattagaatcaatctgtaactgcatgagatttagagcattggaaagtgaagatgggattgaaccagagatgttattactactaagcataagctcttcaagattagagagtttcccaaaagactgaggtatacttcctgagaaagaattcaatgaaagatcaattgaaatcaagcttctgcaattcccaatttcctcaggaatagtcccaccaaaactgttttgccataacaacatcttctcaagcttttgaagctttcccaactcaggtggtaaagaaccagaaagatcattctcataaagaaacaagtcaatgagttctgaacagttaccaatatcaggtggaatttccccagacagcatagtagtgtaaactgataaagtttgaagctttattagttttcccaatgatttaggaatagagccagagattttagtatcagcaagacccaaaaccttcaaattctgacaatcaccaatctcttctgggatttccccttcaatgtctttattaccaccagctctaataacttccaacttcaacaattttcccaactcaacaggaagattcccactcaaaaagttatcaaaaacaagaagattcctcaagttaatacagtcacccaactcctttggaatctgcccagtgagttgattagagttaaaaatcaaatcttggagatttttaagcttgccaacaccagaaggaatataacccacaagactatttgaactaacatcaataacagtcacttcagaccaatactgaatatcagaggaaataatcccagtaaggttggaattactaacaatgaacttctcaagaaaatgaagtgaagaaaaattggtaggaaaaggtagagccaactcaatagactgaatattaatttgagtgacaaagttttgtgaagaacagttgatataagaccaactacatggatttgtgtctgaagggttccaatcagaaaaagatgatgaaaatgaaggagaagtatgaagccatgaataaagtgtaagaacttcattatttgcagaaacaacattagtagtagtaatagtgattaagaagaggagatgagtgtaaatggtaaagggtttgattaacattgggttgaagagtttgttatggttatggatatggatgatcgaggtggtaagcatcggcattgtcaataatcacctcaaaaccttaaccagtttcacttggttttgcattgggtctctctctgtctcttttgattcttttcttaaactctactatactaattcttagtatatgacttatactaactatataacatataatgcttttgagtcaagcaacaaaagtaaagaaagaataataaataaactatacagattttcgagccacacataagacctaatacaattatataatatatacaaagtaatttataatttaaataattaagtttaatttttaatagtagtaatgcttaagttatatttttaaaatttttataagtacctcattaagtgtcaagtcattatctagttgtcatttttttattcaaattaaactattcacttgaaacttaatgattagatacttaggaaaattctaaaaaatataattaagtattattattgttaaaaatttaaatatttatttacaacctaatatgaatgactagtcactagtaagcattagcaataccacctccttctcctcggggttgtgttttcttagctctaatttaatataaaccatttgatttgaacaagtttatgttagattactaagaagaaaaaaaaagcatgtgtgcttgcattgttttcctcaaatatagtctgtaattatgggttggttgttttcgattttgatgatcgaggaggtcagtcactttcctttggattcttttttatataaatatatattaagtgcaattttttttttagtttaattatttctcaaatttcaaagtattctaaagggttacacgcaataaaaccaataattatattgtactatgtattaattttctcaaatttgttaatggaggtgtacaatattttttgtttctgaaattttcaaattacaaaaataaaaatataatttttattgtttttgaaaaaaaaaaa

SEQ ID NO: 297881 - DNA, 3611 bp, Cannabis indica
aatatatatttattagaaaaataatcaaatctatgtagaaaactctaaaaaaaattcatcacccgatttcttctataaaaaaaatacacacataaagaaatatttttaaaataattgttattccagtatctcatttgtagttacttgtacacttaaaattgatgtcattaatgtatcacttgtaatcatcattaatatctttctctgtaagattactctttatataaaataaatcaaacaatgagcggtaagtattcatttttatacataagtaaatcattttgttataaattaattaattaagtgaattattagttattatatacaattatatatgtttttttttaatttaattaattaatatgttgatgtgatttttcgtcaatggatttgagaaaatcgtaaacgagtaagataaacaatgacaaacacaatattttatagtgattcactctctttcaacggtaataggctaatctacttgtagttttattgatctcaatatttaagaatagttttctggagttgtattctccaagaattcaattcacaagtgagtcttgtttaagataaaagagtgtgagtccttttacaattgactttatgacttttttataagtttacatcacatggtttagagttaaaataacattctaaaataaaatatcttcaaaaaatgataatttattgtagatgtccatggagtagcgttgttggcacgtatctaacacgaaagtgcatcttgcctagagttaagtccacaattgtacgtagtgaagcaccaagggaggtgttgaggatggagggtcgaccctccaaatgaaccttgaaggccagccctcctgattgaccttaagggtcggccctcctaatggaccctgggggtccggccctcctgacccgttttggtactcgaagaacattagtcatgaggatctactggaaattggtcatgaggacatatgaaacattgaggacctgtgggacgttggttatgaggacccgcaagacgtttttacgttgaccacatctcttagcgacctcttgatatcttgaacaaaatccatacgtatttatattggattttttaagaataatatttatcctccaagtttatcataatgttataacattattttgaacttgaaaaaaaaaaccttaaaataattctcaagtttttgaacttcatatcatttttatgattacatacctattttcctcatttgaagcatagaaattataggctttcacttgttcttcaaactttcttaggaaatcctctctttccatacttgatttttgctaaaattgtagagattggttgataatctttgaaattcctgcttgaatcttgacaatgtaggctatgggtaatctaaatccactctctatttaggaaatggttgagaattacatatttaatctcgttagggtagcttttgagaaaatatgatggacatgataaatatggtgaaagatttttgaatccttagttttgatctaaaatttctaaaattggaattggaagaggtgtttgtggggttttgattgagaaaaccctaaacttagtgagtcaaaaactggttgctcttttttttagacccaattactcgggtcctactgatggtagcgtcgacggctcaggtctctatggatggagcggaccattaataccctggggagcccttaggtgcacgatgcatgggcctcagtcggtaccccatggagctccttacacagtggagtgtgggcctcattcaagcctcctgggtgccctaggcgcatggtgtgtgtgaaacttggtctggcctcctaggtgccccaagtgcatggtgtgtggagcgagatccttgggccttaaatggctaggttgggcttcccaagatgccccagtcgcgcagttcatcctgaagacatccacttcgagctcttgagaccttgatatctcagtccaaggccatcataccagtgggcctcatagcccttagtcacataacctccttagcttaccaaaagtaactcactccataacctttgaacctttaattctttattcataaataattttaattttgaaatttattcactcaaaaaaaaaatccaataaataatagaaaataaaatattttcttaaattaatttagctaattaattaaactagatatttccattaatatgtgaatcggataaagtccattacatgatgaaattgttcatggagcataatcaaacaaaaataggcaaaccatgccatttacaataaaattatgaaaaaaattcaaatagcaccttcaactaaaagaccaataaaccaccagcagtaaagcatcaaaaaagtgcaaagaacgcaagatttccaattcaaatgaacgtgtgaaaagttacacctatcaatgactataaaccaaagacccttcaataaaaactaggtattcatattagaataaaacaaaatagcaagaagaccaaccatattttgaaacgtgctagtaaaagaatgatccaaaaaatatggggtcaataaaattctggagatcccccagattggaataataaaagatatagccatgtcgtaaaaatattttgagccattcgaggacacactaatgatccaaacagaaacaaagctattaatcatctccatacacattacaattcctattacaataacaatagtaggatggtggtagaacaccattattgaaaataaaaacaaaataaacgataaaacatcacaaataaaaacaacctacaaataagagaaacgagttgaaacatgtgtgtaacttttttcttccatggcgaagaagaaacgtgttgttcgaaagctaggaattcgagtgattgatacaaatcccccttcaatccacaaaagtgaggatgttgagattttttatgaacgtatgattgattgacttgacctagctgaagctattcaagttggggatttaatcaactcacaggagaagaagtcgattcttaaagatgcacctaaactggttgggaacagtaattggacttgggcagaggaagttgaaaaagatgactttcaggccaatagcaacaatggaaacaattcacaactaataagatttcatatcgtaaggctaaactctcttatatggaatctttaattcaagatggaaacaagattgctaaagttgatatagaggaagtgaaatctcaattagctaattagaattctacttttatttgtatggttcttggagccaaccccccttttgtgaattttgaaggttttatcaagagagtttagggtaaattgggaattgttcagattgtgaggatgaatgcggggtttaccatagtgaaattcaacgatgatgctactagggatcttgttcttaatgaaggggttctccaatttgataggaaatctatcatagtaagatcgtggtctactaatttggatactctgaagttggttaaatcagttttgctttgggttcgattacatgatttagggctacaatattgagggaataaatatttgagtgctctttttagtacgatatcaaaaccgattatggtagataaagttacaaaggagaggtatatggtgagtttgctcgagttttggtggaaatgga

SEQ ID NO: 297882 - DNA, 3032 bp, Cannabis indica
acattgtgaaggatctgtttgcccctgagattgctgctattatccttggcattcccttaaatcaatctggtggagtcgactcttattggattgcagaaaagaatgggttttattcagtccgaagtgcgtacaatttgcttcaaaagcttaaacatcattcggatgactcagaggtcattgtattctggaagaaattatggtctctcaaagtgcctcccaaggccaaggatctcgtgtggagggcggcttcaaactgtctcgccaccaaaaggaacttgtgcataaataaggttttgtctgatagtacttgtcctatgtgtggtgtttttgctgaatcggaatggcacatcttggtgtcttgcaattttgcttggtcatgcttcggttatgctggtcttgctgctgttgagagagactcgttctcttctttgctggtgtggttggaagctactgctaaccgggttagcagtgttgagttaggcaaagtggtgatgctatggtgggccatttgggctgcgagaaacgatttttgtgttgcagcagcgtgcgagaagtgtgagtgctgtggtggcttttgctacatcgagtcttgatcaatggtcgaatgctcaaggaaagggtaatattcccttgatgtctcctctcaaagttgaagatggtttagagcggtgggttaaaccgatttcaagaatcaaacccaatgtagatgctaccctttttgcttctcttcataaacacggctatggatgtgtggttaggaactctgttggtgacctggtgtcagtttttgcgggggttaagtccggttctgtggctcccgaattggctgaaataatggacattcgggaagccttgagttggctcaagaacaacccgtattcaaaggccactattgagacggatagtcttgtgtgtgcagcagctattagaagtgcagaaacctttgcttctgctttcggcttggtggtggatgagtgcaaaaatagttttaaaagtttgtccaatgtttctattgtgtttgttaaacgttttgtgaatcgtgtcgcgcactttgttgcccggcactctatttctctagctgaacatatatttcctattaacagtgttccttcggacttattgtctattcttgtgagcgattgctcggtttaataataaagaacacttattacaaaaaaaaaaaagggtactcatttaattagattaccaagccttagaaacatttggctagggatgacatacattagacatacatgatatagctacttcaaacactaaaaggaaagtttttttttgccagtagttgttaataaatctcaattaaaggtggaataacctctgtcaaagtgtcaagatacataaaatgagaggaactgaagatttagttagagccaaatcatgatctaaaataccactatttgacaagtaaaataattttaatgttggaattgaataggttcatgagaagcacacatagttatgctgctcactttttcttcatcgacctgttaacaatgaaatcatcatcggaagtgtcatctgagcttccgtttccaatcttccgcttctttgtttgcttcggaggagctttaggttctgtttccttcttcttaatggaagagattggggtctttttagtcacattaccagcagcagatccagtattcttagtaggttttgtttgggagctagtcttttggtgctgagttttgttttgcttcttctcaaaagctttcttagcctcctcttttgaaagcaagccagactccatcatcctacaattaaattaaatatatacattgtttcaagaatgaaaaaataaaaaagaaaaagaattcgtgaataaagtgcaaattagaaaactgaccaaagatttctattgcttggcactaaaacaaaaagatagtaatctacattgcacaatacatgactgacactgaaaactgaccaaagatttcttagcatatacaatttgaaaaccccaaatgttaaatctgtataacatcagaaattattagctacaagaataaaaagaaaaactttacacatttttatctcaacacccggaagaaccgaattcaaggtataagtaaatttgcaggagttaaccaaataagctgaaaggttttcgaacaaaacaagctatctcatatcaactaaccagaacagtgccatttcgctattaggattttgtttgaacagagtttcataaaaaatcctcaacgggtccctctgaaagagaaaataaaaaggtccaaaattcaaagcagaattagtcaaactacaaaatttaattatgtatacaagcattggcagaagaaagaaagagaaatactatacctcctcaggagggtctcgcttctgaccaggcaaatcataaaccttcttcactttcttcttcaggtccgtattatccactgtcactttcttcttctggtccgtattagccatcgtcaccttcttcttcttcttcttcaaatccttcattacacaaagaaatgaccatataccgttactctcattgttcatacaaatgaaatctattcagcatttctatataaaaaaagggtgagagaaaccttatcaggcttattggtggagaccctcctgagaggcttctcttcatcgtcatagtcgtcgtcgtcgtcgtcgtcgtcctcgtccttctcctcgacattcttttccttagtcactttagctccctttataaccctattcaaacaaagctcgccatcgccatcgtcctcctccttctcctccacattctctttctttgtaaccctaattgatttatcagaaccataagagtggggaacatctttcttcactttatcttggggtttgacagcacaagttccattgttactgctaacgggttttctctttttgaagcccatcgagctcaagcatatttcgtcgtcatcgtcttctttgcattccatttcctctttcttcattacggtcttcgaatcctcagagggcatacttccgattaccaacaaaagaaaaaaagaaaaaaaaactcaatcttt

SEQ ID NO: 297883 - DNA, 4422 bp, Cannabis indica
ttttcatgaaacttagccacaacatgatgttaaaatgagcatcatttaaaaaaataataaataaataaaagaaacgtggtgtaaaataaaaataaaatccagtggcctaagtaataatttgaaatgtttgtatttttcaaaaacagtcttaaaggtgatatatcttgaaaatattggaggcttacaaatcaaccagaacttcgttttgggcttcattttgggcccgtgtaacaacaatactcttgtaaatatatgatttttttttaaaaaaaaaaaaaaaaaacttatcttattggaaaattttagaaaaaaaattaaaagatatattaaaaatagtagtagctgattacttctttagttaaaataaaaatagtagttcttatatttttttaactttttcttcaaattttttttataaaataacatttttgaaaaaataaaaccatattgcacaaaaatataaaatcccataaaatttataatttatatagtactctacatcctacattttacaaaataaaataaaatttatttataataaaatggtgtttctatatgaacatgcgtgatttaatttgattctaatgtaattttcacatatttatcgaaatttacacaagttattataacatacatagaagctccaataatatattaagtcccctttgaaaaatctaaaatctagtttgagtataatgtaaatattgttgtgaaaatagtcaacaaaaaatctagccaataaaaaaattaatttaattatttatggctagattttttttgtgtcaaatagattaccattgtattattcaaatgaagaaaaaatattattaggaaattaaaaagatagaataagaataatttttttatagacaaaaacatagtttttcaataaaaaatttcaatataagtttcacacaaaacaaacacacacaaaatgagtgtgtcaactcttacaatggtattggaatggttttcacaacactttttcttgaattacagaaattttgaagatgagtttcatcgattgtaccgaacccagatagctgaaccccaaagtcttccaacttatgaacatcccggggaagaggagattgccaaatgccgtcccaccacgcaggcggaagaaggggtgtaagagcacattggttaggttggtggtgacaacttaggagccctgcataacgattccagacatgtccccatccaatctgaaatcttaaaccttctctcaacaagttccgttggaagctacttaagaagtagaaactagagctagtagagttatcacctgaaaacaattgaagagatgttgagaaatcaaaagttagaattttttagatgaaagaatgaatcaaaatggtgggagagccacttaagtacctaaactgttagctgcagcaagtgcggcgattaactgagcataggtggtaccaacacgcctatgagccccagaaacgacagcatgttttgctcgggatgcaagaaagaaatccacaaaggcaacccatctgggtgccggtccccaatcttttactctaaaatcaggaccttgcaaacgatttacatgcatcgatacattccctctaaagttttcgtaattgaaatgaagaacctgataatggcacaaccaaacaactaactaaatactgaacaacacaaatggcatagattgttgtaacatatgatcaacgaatatatgaaataatttacctcagcaattttactgatatcgggtgtaatgcttttcacaagggaaggagtatctgaaactacaaccactctgggccttgatgtcgtgttaagattatgaatggctttcgtaatgcagttcagtgcagcctgtacagctcttacagacctgaaaatagagtatgcaacactctgcatcattaatccacaaagacactagtcgaaacagaaatttgaattagacaacatatggtttcgtgaaatacttgttcatgagcatccgcatatgcaacgaaatatcaggatcagctccacctccaataacccagtttacagcttcctcgatattctttgaaggagatatgagaactctcataagttctccaaatacattaggccgggattggagaacctccgactttccaaacaaatcaatagcagcaaacctcatatcgggatgtacattcttcaagaaaaactgaattgccacagcatctgttgtaccttgaaacctgaagtaaaagactaaaaggcttaacttttcggtaaccatgcttgtggacttaaaaatgaagttgaatacaaactattatcatcgtaccaaatgattggttgcttccatgtcctccaattgctacaaagaacatttgtttgcattggcttctcaaaattatcagttcttatagcaagacgtcttccgtattttttctcgcacttattgagtctccatagatgcttaatttccttcaaggtaaaggaaacattggaatacaaaatgtaatccccaaaaggaaatttttccctgaaatatggcagaaactgaaattagcaagagtgcaataacataaattactcaactcttatactgcattcaagatttggatattaaaacaaagaaagatgccaagaaatactcttttgggtttaaagccatgcaagaactagcatatgtacatgtttaaggacttcactatatattcaaacaagttttatctttataaaagcatcacataatctgtctataagatttcaagctgaaattcttacttcttccataagaagacaataataacaaaaaaagaaaaggaaagaaaggcttgagaaagaaccaatatgcctggtttgcccaataatcagggaccgatttaacattatactcaatgctgcagcacttaaaatcttgtacatttcattcccaagaccagcctctgatgccttggccaatacaaacccatgttggcagaacttctctggagaaagatttcggactctctgagcacctgaaattgtaaagattcaagtaacaattatactagtactcttagaggccatacgatagaatatttgaaaacttctaaaacaggttctatattagcctttaaagactgaaattttattggaaaattgataagctgaacaatatactagcatttaaagactataaaaacaggttctatattagcttttaaagactgaaattttattgggaaactgagattgtaaagaataaagtaacaattatactagtagttttagtgtccatacaatagaatctttttaagaacttcgaaaacaggttctaaattagccattaaagactaaaattaaatggaaaattgattagcttaacccctagaagggatcagacaaataactaaacaccaataatggattgaacttcacaaactatatcaatcatttgaaacaatgttgcatatgagatatgacatagtttcatatggcatcatctaaatctatttcaaaatgtatgccaaggtgatttgatcacatacaagttaaaagagtataaaaataagcatttaaagacagaaatttcattggaaattgataagctgaacccctagaatggattaaacttcacaaactacttcaattacttgaaaacaatgttgtatatgacatagttttatatggccatctgaatttaagaaggtttctaatttgaatatatacaagctataagagtctataaaaatcatgtataagctaaagttctaatttttattacaaacccttcttagctttacacaaccaagtttcaaaattttcttcctaaaatgaaatctctgtgtgtgtatgattatcaaccttatctattatctacaataacaacataccgttgagatcaaagtgttgatcgataattcttctaaccctaagactactcctccaaaacccatctctaaaatcctctcccatctcctccacggtcgcacacggcctcgttcccttcttggttgtctcatcgatttcaggaacaggaaaatcacgagttgctgcgagcttgacaagaaagttatgagtggtgggaggatcaatgggtctgagattaagcataaacaaacccattgcggcgaagattgcgcagaccaccacgaaggattgtatcgaaacccgtctccttctgaaaccaccaccatgcctcatttcccctgctgtgctgtgctgtgtttcaccggagaaagagtggcggaggttggttgttagatctcaaagatcttaggttcgtcgccggtgaaggagctgaaacccaaaactgagtcactgtaattagagactgctaatctgccatatatagaacatgcttataatatttaagacaacaatactaattagttattttcataaattaattatttttatatggctaattaagatttttgccccttaaactttgacatgtactaacttatgtcccttgaacttttaagg

SEQ ID NO: 297884 - DNA, 3267 bp, Cannabis indica
gggacttaaggggttttcccaccaaaaataagaaaggggttaagtgttaaacaaataaaacataatggggtttggccgcaaatttctcttttaaataaaatgtaattttttagtatatatgctctagttttgactagtatatgaaagttttaacgaaccatatgagacagaaatgtagtcatcgaaaacagacgtggcgagcccacaaccacacgaaagactattctaaattgagatcaactcttagtaaacctgtcattttgtctaaacattattatcactgaacatttcatgcacactcacctaaccaaaaaaaaaaaaaaaacatatatatatatataaaacatttgtagtttactcaataccagacaacaaattaatccaaaatgcaagttgaaatctgtgatactactttaatagtcccaccaaattcaccattctccgatgaccacatcgtcctctctctttcccacatcgacaacgaccccaatctccgactcaccttccgttacctccgggcctacgttaacagtaccaccaccaaccacccatcaaacccattccacgtcatctcttcagccctctcttccgcactagttccctactaccctctcaccggcaccctccgatctcttccggatcggcggctggagctggtatgttcaaaaggtcaaggcgtccccttggtacgggccaaagcgagctgtacacttgattctctgggttacctcgataacccggatacccattttgtcgaacagttggtgcccaccccaggtccggacgaagctctggctcacccttgtatgcttcagatcacgatttttgattgcggcgggttcactctcggtaccgcacttcaccactcgctcgctgacggactcggcgcaactcagttcttcaatgtaatggccaagttcgctcggggagagggatcgtcgattatgccggtatggaaccgggaaagtttgttgggtccccgtaatccgccacgtgtcgaggcgccgattcgggagttcttgagtttgaagagtgggttctctgcctacgaacaatcgattggtccggttgtgagggaatgctttgatgtgaaagacgagtgtctggatgggtttaagagccaattattaaagcattctggtttgaattttaccacgtttgaagctctcggagctttcatttggcgagcaaagtaagtttcttaaacgattgatcccaatctatactatttatattatattcctctgtttcatcactttaatctaacttaaaataaataattggtgtgggagaaatttagaccatagtattcatatcatatacatagtactatataatatttgtgttagtatgtaaataattgataaaaaaaaatatagaaaaatatagtggttatggatttctagcacggtttcttttattcagctctgaattgagaggggttcattttagtaaaacttaataattagaatttctattttgttaaatgataaaataaatcgtgtattttttaaaattgtacaaataggactctgaattgattttttatcaaaataaacttaataataatctgatctagagatgttatgacaaaactaattacatttatgtactaaaccatgctccccagactttgatatctaccaaatcatgcctcccaaattttaatatatactaaatcatgccctttgaacttccatctatttagaatttttttactaaaattagacaaaagtccttaaatttaacaatttcaatagttcgggggaatttttaacggtcaattaaattcaggggcacgatttagtacatgtgaaagttcgggagaaaaaattactaattaacctaaataataataaacctatttcaatgcaacggttataaaataaatgtaacgtttgaatttatgatgatttattctaaattttgtaggaattatatatttaaaagttcaaacacaactataatcataataatctgtgtttacagctgacataaaaatacaattttttttcgattagtttcaatgttgtttaattgtagagctcagtcttaattttgagcttttcattattggaaaaaacagagtgaaagcttccaagatcccaggagatgagatagtaaagtatgcatactcactcaacataagaaagatagtgatgcccccattaccaggggactattggggcaacggttgtgttccaatgtatgccaagatgagagccaatgatttagtggagaagcccatttgggaaacggcagaggtgatcaagatgagcaaaagaaacgccactgaggagtacgtacggtccttcatcgactttcagagcttacattatggtgaaggcattactgctgggaaagaggtgagtgggttcacggactggagacacttaggacactctaatgttgattttggttggggtggtcctgtcactgtattacccctctccacgcaccttcttggggggctcgaaccttgctattttttgccttactcttcggccagtgtagggaacaaggatggtttcaaggtttcggtgactttaagagagtttgctatgcctgcatttaaggtccagatggacaagtttagaagtggagattttgcccttgtcataaataaagattagtttaactttgtaagtttttcaattgaagcataataaaataaacagattcataaaaatccctaaactgctattgatttcaaattgtcacttgtggacataaataaagtatagatatagattcttataatttgtgatgatcataagttggtttctgtggaaatttggttttataatgtgtttatcatgccttgtaacagattttttttatcagattgtgttgtttggatatgttgtgtgactttttaatagtgtactatgtatgattctaataaaaagatgagttaattaatggcttcagtgtatgtatcttaattgtagttggcatactgtattggagaggttactatcaaaccttgaagccaaatcaagtggggcttactcttaatatattggctttatctaattaacaatttttatgctgtgtttgttagactatatatatagtgtatgtaatatagcatatacaaatgatatgaaatgcggaaaataaactgtaatcatatcaataatatatgcaatgaaaggatcgatgtacctccagccattgatctttgagcttcaatccctgcgatagcttcggtattggagttcgggcttcctcgctctctcaactctctttagatggaatttgctg

SEQ ID NO: 297885 - DNA, 1989 bp, Cannabis indica
aaagagtaaaatttcaatgttaatttttatgtatacctatatatatatatatatattttacttataactatataaaatctaattactcatttaaactatttgaaaaaactagttagttcgattagatgttaaatgtattaaatttatagatatttcatccaatatctcattcaattagatatttaatatttaaccgttaattataattaaatccgtcaattattattaaattagacacacctatttatacgtaaacgcactccacacaatttggtttaaggtgcgtacatatgatatgactcataagtcgtatatcactactgttttaaaagcaaaaatatatattgcggtgtattgtaccatatttgtaaattgaaatgtaacaacaataacaataataataataataataataatacgagcgtgatttctcttcacgttgacatgttagacacaccttgatactaacatgtcactcacacaacaaatcaaccaagctggcttagacccatcaccacaaggtggttcccttaagtgggtcacttgtgtttcagactatattcaacactattgcccaattttcctcctttctattctacaatacatgtgaccctaactcagttcgagctacatcataagcaaaataaaagtctttcaagttttgggttttcattagtgatagctgtaatgggccatatgccaatgccatcccaaatatatttaattcccattctcaaaagagataattacataaaatattaatttttgtaaaaattttacatttttacatttaaagattttttttttaatatttttatggttttgatagaaacaacataaaaacaataagaaaactatataaaagtaatagaaaaataacatcaaaacaacaacaaaaagtataacataaaaaactgtattttctgttaataaaatcataaaaataattaaaattccgtacaattatatttttataaatttttcaatatttttgtgcattcgtgaaataatcccttctcacaaaagaaaaagaagaactaaaaggttatggttttaaaaatgtgatcacagcattaaatagctccacaaaacaaatacgatttattttagtcagtttcgagattttctaaggatatgcgaagacagacatgtttgtaactagacacatcactctcaactcaatagacttggactaaaacaaaagcctgcgtctctgggctttatgtccattggtaacatggggtattaatcaaagtttgtaaaaaaaaaaagagcaaaaaaaaacaacataaatatttttgggtaaggatggtaaccctaacccatatcaatatcaaaactcttttgagttttgacacctcttttgtctcctttatttacccttattataatttattatcatgttttcaaccaaagcagttctcaatggaaactaatataaaagttacgaatttaggccaattctgccgttgacatgattatgtggtggtttagatttggggcattaaacaaacaaaaaaaactaaaattattttttcaaatttactttgtatgtatgctctttaattttttttttactttctgttaatttaaataattcttttatctcatttcttttaatattttttaataataattaaattttaatcccctgatacagtttaataatttgtttgatgtaattaaatctatatataaaagaaaaatgatctttaattttaatgggtaattatattttgtattctgtgttttacaaaagttactaattgaaatttctattttatcaaatgacaagatagaccatgtatttattaaaatagtacaaataggaacttgaactaattttttatcaaaataaaacttaataataatttgatccagaggtgttataataaaactagttatattttctgtatctgttcaagaatcgtcttcaaattaattatatgaaaaaaaaaattgttaaaaattgagcttagggtcctattt

SEQ ID NO: 297886 - DNA, 1444 bp, Cannabis indica
aggggtttcagacactttaccagttggtgagttggaaccttcaaggagcactgttgtggaagcaaagattttagttaacgctacaaaaattccctcgtctaaatgcccacccaaggctaggaaagtggcaaggactaaacaaacttataggaaattttcatctaagattctcatctagctcggctaatggcgttagttcatgctccgatgagggtttaaaagatgaaactattgaactgcatgtcggtgatactaaggtacaaagagtagaagattagggcaaggcccgtctagctcaagttaagagggaggaagtggtcactgctgctcctacaccatttgatgggttcggtggatacaatgagactacgtagcctactatcacgtggggagatctaatggtggaaaagatccattatgctactgaagagtacgaggaggctcacccgtcctttcatcaagaaaggcctaaatcaatgtggatttctcccccatccaccctcacactcaagaggttgatgaacttagacaagaaagggctcattggagatgtgacaacctttcttccttttgacggtcagctggccaatgaccccggggacagtctctgcacgtggtctagcccacacacccaataggggctattctaccccttcacccatacttccaaaaacttgcaaactactataagatcttgccaacacaatttacgctgaaggggatcaagtgcctagctgtgttgtacgtactatacttgtagcacggatgtgggatgccttcgcccacgatacgaattggttttttgagctgaattctaaccctaggcaaggctgttcgggctatttttattttttccaagtagaatgctattggctgatcaacaccacggacaaaaatgtctcaaagatatatggatacatccaggactactatatcatgcaagggatgaaggccaaccacccatctttccaaaaggtcaagacttatgaccaacctccatttacactcgggttgaggaccagggctcaagccattccacatatgtcgagccaagaacaaaacatttctttaccggctaccgagaagagcttcctttagtatggcctatactcgttcagtgtaaggtcgaagaagaagagttggtggctgaggtgcctgttcttgtgcaaccatcatctaagccgaagacgaagaacagggagaataggaaacaaactctagctaaagttcccattatcattagggaagctgtcaaagaggttattcgtcctttcgtgcaagctgtttccgggaagggcaaaaagattgtcgaaaaggatttgtgggcagactcttcttgtgacagtcagtagtcccgtgatccgtaagggaaaataccgggtaagctgtgcaatcccacaccgcctggggaaggtcaagtgggatgattctgagattgtgtagg

SEQ ID NO: 297887 - DNA, 1494 bp, Cannabis indica
gggcataaaacccaacaatttgatcccaaaattggtggtcaaaccaattaaaaagttaattagggaattccagcctacactgctacacctgaagttgttgatagcgaggctagcttggtttgtggacaatggtgctagtaaccatgtgactccatatgagaataacatggtgtagaagaatgagtatggtggtaagaaaattaaactcatcataggtgatggaaatagcttaaagatttctcatcttggttatggtaaattatagacaaataatgtgtttaaattcctgctactgaataatatgctactataaatattgcaaaaaaattctaagtgtatcaagtttgacatcacacaatggtgtatttgttgaatttaaccttgattattattttgtgaaggggaaactcacaaggaaggtgttgttggagggagagcttagagatggtctcttccaattcaccaacaaaattgttcctgggcaaattcactctcaatttttctctggtgtctcaagtgtttctagatcaaatgctgctcagatagctaattttaaattttcaaataaggatatgtggcataggcgtttaggccatccatccactacatttcttaaacttatttgtgattccgacaatataaaaattcctaaagatgaaatagaaaacttttgtaaagcctgccagtttggtaaatcacatacttttctctttaaattgtcttcttatagaacctctaaggtgcttgagttaattcatacagatctgccgggacctgccccaattgaatctaacataaacttctaattatacatgatgattttagcaaacatacatagttatacctttgaaaaacaaatcagatgcgctcaatgcttttatagaatttaaagtttttgttgaaaaccaatttgaaaatagaattaaaagcattaaatttgattggggtggagagtgccaagtgtttgaaaacttagtgaaaacaaatgatatttacttccaacactcatgtcctcacacttcggctcaaaatagaagagttgaaagaaaatacagacacattattgagatgggtctgaccttactggcataggcgagcatgcctcttaaatattgggttgatgcctttgaaacctctgtgtaccttattgataggcttccaactcccatccttcatgacaaaaccccttttaaaatacttttctataaaaaaactagattacaagcaaattaaaacttttagagttgcctgtttcccagcataaggccttatcaaaaccataagtttcagttttactctctaaagtgtgtgaatgtggggtacaataattcctacagaggctaggtggaatttatatctctcaaaatgtgttcttcaatgaaatagaatttccttttctaaactaatttcttaaacactcatgcacctgaaaaacatcttgatattcaaaatgaattgtaacaccctaactaatttaggcgtattacgtgattt

SEQ ID NO: 297888 - DNA, 4699 bp, Cannabis indica
taatggcagccatcatcactccgttactaaaatgaacggaacactacagaataccttaaattaagcattgtcaatagtttgaggggaatttttaaggtcaaaaatagttcagggggcacgatttagcaagtgtcatagttcggagggaaaaattgcaaattagccaaaatttaatgatttggttcaagttgaagttgggtggagaaattctaattaggtgtataaaaaggtgccactgcggagaacaccgaacaagtgtagcagaagaaggtcagggagtttggagttagactcaactcaacccaactgtttacatttcttcttctatttcattccctctaatggccgccgagaacaaacccaagtccgatttcaacaactcttccaagttcaagaagggaaggcaacggtatcttcctcacaacgtaacccttctctatctctctgcttattactcatatttttaatgacatattgggtttttagatttattgaggctatatctcgacttgcagaagccggtgaagaagaagggttcctacccattacggcccggagtccagggcttcttcattacctgtgatggtggcagggaacgccaagcctctcatgaggccattgacgtcattgactcggtatgttcttctatctttttattgctctcttttatttatttatttattattactgttaatataatatttctagattccaggttttcattttcaattttaagttttaagttcccatctgggtttttatttttggtgaattgctgtttaacttagaaaacatttcactcagtttccccccgtgtttgaaatttaaatggtattgttgcttgcggcagcattctatttgcacatatatttgtctgtaaattagataaaagttttcctcgaatacaattataccaaggaacggcatgagagtgaagcccaagtatgaaaagcagaagaattcagataaaaattgtgaagaattaggttaataagtttaggcgggtcttatatcgttaacttgtatttagagaaggattaatatgaatgacttaatttgagatcattcagatataaaaaaaagtttgaactttgtgagtattagttgtgtgtaaactttgttattggggtaattaataccaagaatttcatatcttttgacaattttgatgagctgaatggtgaatttcaatgatctgttatcggcttatatcactcttccttcagctatatatttaagtacctccacattccttgtgagtgttaatgttctatctacattagaatcacagggccagcaggttgattttaaattgttgactgatgaagaactgttgaatcatatcaacttctcatgtactgacactttctcatttggtgcttattatataatgaatcaagtgatttcttattagtagtttagttcaagcacaacttatccaaaaattagttggttatcgtttcttgcaaattgctagtgcatgaaacacttgtgcatgggatattgatattatttctaattttttgtttgtagttttttgaggaactagtcattgggaaggatcctggcatgcaggttggaggcttacatggtaaagcttcaaataagaaaattaagtttacatactctgattcttctagtggtgaaactggcgacgacgaggacggggaagaggaggagaagaaagagaataaatctgctacttctactgagggtgacaaaagcaatgataaggaaacaagtgagacactagatcataataaaactgattctgactcccctgataatggtaaggacggcgaacctaatgacaataaggaggttgatgaaagcaatggaacagatgcagctgaggctgaagaaccgccagcaaagaaacagtgtctggaaacagaagtctcaaaatctgcaatcccagacaaagtggaagtcaagtccatggacaagctaattgaagctgaacttaaagaacttggagacaaaagtaaggtgagcatatgaaaaccttctgaactgcatactacttgagtaattaattaatttttctgttgcagagttagtcaaatctgcaccttgttgctgacatcacatgttagtttataattgtaaaatactttggtaaacggttgttaccaaatggtagagaaccagggctctcgaactccctgggaacatatatcaatatcatagtatttcttctagtttctacctgttcttgtactttgctactgtattaaccaattgataggaataattcttatcatttaccttttgggttttatgcaaattcggatagttggcatccttggctatgttacatttctcctgtgcagttgtgcttatggtatattgttttacagaggcgtttttttcatcttgataccggatgtaatggtgtcgtttttgtgcaaatgaggaagagagaaggggatcctggccccaaagatattgtgcagaacattatgaccactgcagctgcaacaaagaaacacatgtccaggttcatgaatttcatgttaatttactttatattgggttcctttgtgacaatggagtatttgtttttgagctaacaaatagggatattttcatttgtaggtttatcttgagaattttacctgttgaattagcatgctatgcttcagaagaggagatttccagagctatagttcctcttgtggaaaaatattttcctgtggaaactgagactccacaaaaggtcatcatttatgtgctaaacataccaacgctatttttttttaattgtataacatactttatacacgcaagtatctagaatgtaagccatgcacattaaaaatattattctgcattgttggcagtcacaggcacccacactcattgctcttttttccctgctactgggcctggtctcagttcaaaaatggttctaaattacttaccttatccaaaaagatcaagttctacaaaatcatttgttgttatctccatttttcatttatttttccttgttatattatgggtttatggggatctaaaccctgaaccattctcacagaaactcacccactcagctcatggaacttccctttttaaagataatgctcaagtgccaaaatctaagcaattagttttcaatgttaagatgctgactttttaaattacgaatgcagtttgcagtgctatatggggcccgtgcaaatactggagttgagaggatgaaaataatcgatgccgttgcgaaatcagttcctaagccacatagagttgatcttaacaatccagatagggcctttgtagttgaaattgttaaggtgagagccttttctaaataaactgatacccttattttgttgatgtgtcaccggttgacacacacacgctctctcacacacacacacatccagattaaatgacacacatatcccaataaactgatacccaaattaacgtgttttgcaacaccctttggacatattttcagaaaaacagtttcctggaaacttgataatacacacacagagacacataatcccctttcgctttgtgagtacaaataatgtatcaaattcaaatttcatggtaaacctcaaattatttgcctgtgtgaatgcatgcgtgtgcctgatgaagaaagtagaacattatgaaaagttctcaacttatttttgttgtcttaagaataaggtctaatccaacctattttatttgtcagactgtatgcttgatcggcgttgttgagaagtacaaggagttggccaagtataacttaagacagctcacatcatcaaagccttagggcgttgaactcaaattaaagttatgtcatgcgagactcaaccatagaatcttgagcattttagctcaataccttattgtcatgtttgtttcccttgtagaaacgttgatgttctgaaccaaccaatgttaatctaagtttatgatgttcaatggaatattattattattaggctttatatggttagattattgttttatttttatttttataaatttagtatctttacgtcttatcttacattacttgtgtctttttttatatgttttgatcttgcaagtatgattaaaggagtatgattaaaggagtgcttcaagaagaaagaaacagtgcgaaggatgttaaaaggggaaacaatagaagcaagtagccaaagttggatggatataaaactattgtttacttatttttccttacttgcttaccttgttagaaaatgagatagcaactagtcacaggttactcttttatgctgatgtaattactaattagtgtttaattacttgattaggcaattattattagttaacttttctctcttttcgattatcattgccttgattaggcaatgattgtctaattgcggcaattagacaatcattgttagttaatttttctctctttttggttatgcgtgttagggaatatttctcttgttttatgggtcttccaccttttgggtgaggtgtcttttcttctcgaatgtaccacaaagtagttctagttgttatataaactgaaattctatattttaatatttccagtttattatctaatcaaatacttaattaaatgcggaataataaaattggtactgatacaatttttttgtagctacagaagtcaattttgtaattccagaagaaatcagaaaaacaaacagtgcagaaaagtaaaaaatatacaaggtttttgtac

SEQ ID NO: 297889 - DNA, 7541 bp, Cannabis indica
cacatttttctagataggacttttgagttggttctacatgtggctgctttcaggatatcagtcaatatcttctcggcacctctgatttttgctatatatttgtaaaagctgttttttgtgaattttaaattgctaagctgtgtgttattctccctcagagacattagggctttaaaaagtctttttgaatttactcatgggcattgtgctaatgaactttttgaatgattttccaacatgcatcattgatggttaacatgtacgttaagtttccatacgatttgttttaatagttctttatgcagattaatttggccttttaaatatgaacagctggagctacggccactaatggctcagccgtgacaaattccatcaataactctgctggaactaatggaactaagaactcccttcttgtcacgggtgctgctgaagcttcaatgggtggcaacagcagttttctacaatcacaaaagcaggctcaagaaaacctcacaccaaaaccatctccagtggtgtcactgggtctaacagcaaaacctcgattaccccttaaaaagcctgtactgaaatcttctccaagttcagatgccatggtaagagccactgccgtagctgctggggcacgcattgcttctccatcagatgctgcttcattgctcaaggctgctcaggcaaagaatgctgtacatattatgcccacaggcagtggctctattaaggccaccggtgccatctctgtcctctcagagagtcatcctaatgtacactatatccgtaccggcctagcatctgcaccactttccacgtactctgctgccacaccaattgcttcattgaacagttcagttaaatccattccaccagcagttcagcatactccagctagtaatgccccatcatcagatgtttcttctaagcagaaaaatgatgtgagcaacactccttcagcctccgaagttccatcaaaacaagctgttaagacagaagaaatatcagtttctgagttgaggcctgccactaaagatcaaatacaaggagatcgagcttgtatctcttctaattctctgggtgaagcagtcaaagaaaataaagtggcattaccagatcccaaggttgaggttaatggtaaatctgatgttaagagtttggttagtccgatgaatgtgactacatctgtaaatgatcaagttaccgtagacgtccaaccaaaaaatagggaaagtgaggatactgaaatgatgagttcagtagctggaacaggtgtgactggtgatgctgttaaggaagatgctgacaatcaaaacatagataagatggaggaagatccatcgagtgcgaaggcagccacttgcagtgagaaaccagagattgtatgcaaagaagctaacaccaagagttgaaatggagtagacggctcaaatttgcatttcgattctattgaatgtgttaggaattgtgtattgtagattagatgttaaaaaaactcttgtggaaattgaaggatggagcaaaatattagatcatgtaaatgttgttgtttgccttaaatttcccatttcataaattggtattcataatatgttagcacacaaacttgataactctgataaaacgaaaaaagggaagaggtaaaattgttctatcataagatattacaatattgtgtattgtgaaattgaaaatgggtacgaagtactgaatgaatgttatatgaattgaagaataatctccctattggttatcttcagagcagacacagagagagcgtatcacgttccttcgagtcttgttatgttaaagaaaggactctttttcttgctatgcgttatcgtttcagcttatcatcttaaattttctttctggtatttccctgtaagaaatgtcgtgtggttgaatttcaaaattgatgctacttctacagatagaaatatgttgtcaattacagatagaaattgatgctacttcaaatcctatttctcccttaacattttcttttcacccctctcttaatcattaatgccctttcaactatttcctgttccctcactttcacacatattccttatatttgcttcctccaagttttattgtcttgcacaatttccttacatagatttgagagtgtccaatttccaggctacattatgaggatggtgctttctgattgcaattgtagcatctagttactgtagaatcctggaaactcaggctgtatatctttcattattcctcttgttgaatcaatcaatgcagacaagtgtaattacatattgttgctgatgagctaagtagttcgggaattggtacgttgcaccgaggacaatcagacgtttttcgtgccttttaggacaaaaatatcaagaaactgcagaacttacattacttctcgaagttcaggtatttaagataattctttttctcttgaatttagtaaggacaaccctggtactgccttcttctaagtacattctgcagtttcctatgccatcatcagtcctattgtatcattcatgcttttgctattttctttaaacttagaagtcaatctgtattatacaagaagaggagaaagaaagctataatgtacacttttttctatctacaaaaaaaaaaaaaatacctttattagaaagagtagctgaaagtagacttagtaatgttctttaagaacattttgagttgagaaaaatattttatggtctagctctgttaaatgtcttaaatcaaatcaatgtgtaatgtataattcatttgaaattgtatcatttatattcgtatatgtatatatttacatgttttgctggtgtatcatttgcatttgataaatttatcttttcttgtttgttgctttacttgatttaagtgaattatatggaggaatattatgaggttctgaatgaatgttatatgaattgaagaataatccctctattggttagaaacaaactgaaagaacatgatttttctgcatttcctatctgcattacaatctacaactaacacaaatggaaagaaatgataaaaggtgatttagattggtggtggtccggctattgctagatcactatattgtttttgaagcggactcacacacgagaagatcgacgccttttgcctcttcaacttcacaccaaacaagaaagacctcaatggaatccttggcctattagctggatgtttggtggggctgcagtggacgttctttgcagttgaaatcccaagatcttcattgagtttccgaagagtcttctccacttcaactttgagtcccttcacacgattaagacccagtttcagttcatctgcaaccttgttgttctcctgcttcatgttgagaacttctccttgaaactttgcagcctggtatttgctaagcttagtcttttgaacttcagaatcaacacgggagatcctcgatatctcatcctggattttgcacaaggatgaaaacctgccctgcaattcgtcttgtagaacagcattgtgttctaaccagagtgccatctcagtttggatttccctcaagtgcctgtatattggcctggcatctgtttgtatgtagtgttgtttggagcctattatgccttctggcttcttgttatttttctcccttaattttgataaatccaactgtaaatcctctattgaagtctcaaacttctgtatctgatgaactgaagtgctgaacctcaaccagaactcgagattctcctccagcaatccatcaatatctgatcggaacttatcttcaacagacgaaacagaatggggtacaggagcctgattcttctccactgtctcttccaccacctcattttcattagaggttttcaagtcttctgttgctgacatgagtttttccaaggttttaacagtttgaacaccgagctcaccagaatccgattccaagtccaaatttagaaatggggtttgatttgcactctcacctgaagcatcttgacttgcttggtacttataatctgtgttgtaagtaaatggacttccatcaggagtcatctgtggtgggtagtcaaacttgtgtttcaagctcttgatctcatcatctttagaggctacatcactctttaattctcttatctgtattgccaaatcgaatatgctctcccggttcttgctctccatttcactcagcttcttcttcacttccttataatcttgaagaactgaagtatactcctgtagtaaaatattttctctgtcctctaaacctttcaagaacaacagcctccaattcgatctagcgctattaccagcctcatcactttccttctctacatccaatacatcacttggctcatcaaccaactctttctgctcttctccaacctcttgcttttcttcctctacttcaacactcacagtgtcagaactattgcttggattggtttgactttccgccgagtttccaagaactgaagaatcatcttctttttcttcttcattcttttctacctcaacttcttcaatgcttatcccttgtttatgctcatcaacctcctcgtcctgcttcacactcttcaacttctcagaaagatgatcaatattgcaactggcttctgtgaaatgagtttgaagattgctgttttgtagttttagacttctgtttagtgcttttattctcttcaattcttcctccaactctctaagcctcattctcatcttatttgatccttccttcaaattctcattttcattttctaagcttcttacattttcttgaagctgatcagtctctgaacctaacctctttaccaaagcagtttgtgaagtaacctcagtttcgagactaacaaccttgttgacaagctcatcaatcttctcagctagttcagtcacagtaagagtagcctttgaatccacattaagctttttcataatcatttccctcaacatcttcaaatcattttcatcttttcccatcccaacaatctcctcctcatcttctactttggtctctactttcccaagaaactttgctcttattctagaaaacttttcctgagcatccttgatcctttgctgctcaactaaagcctcttctgtcgacttttcttgcttctcttgcaacttaaccaaagtctcttgacacgatttcagagccgtggctgccattatagaccgagcttcgtcgtcttcaataacagtttggatatcaaactcatcttgtaaactactaacctttttctgcatttcagttatctcattctcaatctcccaaaacttttgataaccattttcatacatactctttacaaactccttctctgtttggaacctaagaatacccttttggagattatcaatttcctccaaagcctctgttctatttagccctgaacttggtaccactttcactgagctagatatccttccaagctgagtctcttttcttgaaattgccatagatggtctcctgaaatccttagccattggtatctttggaactttggggacacttggttcggattggtcagcttttgaagttgaagtttgagaaggcttttgttcctcatcaacatccatggccaactcatgagctctttcagggtagatagtggcaatggttcggttggcgctttggaggtctcgtgaaagaaggtcatatctctctgccaatgctcgataagctctgaatatttcttcaacaaagttgatcagttctggcttttttctgtagtacatttcagctctttgtgcaaaagagtctcctccagcgtctatgattttcagggtcattgttaccttttcttccatatctgtcaaaatcatgatgaaattatattatattcatatacatacatacatatacattggtgttcatcatcctcatcacaattgttattggtttggttaagaaggaatattaagtttcaacattgatttggattggggccataatagacaatataaattagagcatcacctcctaccctatggtgtccattataattatactagatagcatcttgcttgttttctagaaattttgaataatttatggtgttaaaaatatgattaaaacattcacatgttttcgtgtacacgtatgtaataaactattttaaattttattttcgagacatatttctcgaaaatagtcggtcggcctattataattataatatataaaaaaactagaatataatttcttatagtacaaaaaataggatacaatagaagtaaaagtgacgcttccacttaagaaactctctaatatatgagaaatgctaaatagaagtgatacctaacactacttaatctatcaaatcattattagtgcaatcaaatattgaatcacacataatatatatatataaatataaatttctgagataacttggtcttatataagtcattttgtagtgacttatattctgactttgtatatctttggctagacaattagcttgttgattggaagttttcctgcgtcgacgattgtcatagtgtgattcagatcattctttaaaaaaaaaatattgaattgcacataatatatataaatatataatacatacatgcagacataagtgtaggataggatatgaatatatatggaaattaataccttggaggttttcttctagccatttggattgttttgtcctcacgtggcttgcccaccaccatgaatatgcattgcttgctgctctctgcaacatttctctgtggagaatctaaaagaaaaacttttcaagaaaccattatctctaatctctatgtttctccagagatccccttaggccaaaagccaataagcaagaacatgcatgaattattgaaaattcagcatgtataggaataggcctattaaaaaaaaagaacgttgcatgttaattgtgcagagctagagaataacaaaacccataacagaccattacgtgatgagagtgattgatgaaacagcaacaacaaaaactcacaagactgtttttagttatttttggaaaatagctatgagcaatttgaaccacacgtattgagtataccttggctgagttttaggttgtcgtttccttatgaaatcattgaaataacacccttttattgacagaaatttaaggggaggttatttgagtgtcacttttgaaaggttgtggtttattattggaggtctttttaaatttaagggcaggtaattaatctctattgatgtgtccaaccagctaattagccaatatactattattattattttttgagggccaatatacatttgttaagcagctatgaaaaacatgtagaaaaactttgatctgaatttaggtctaattaattcatgagaatgaaacaataaatacctaaagattagcggaaacgtgccggagtccataaaataaattttagagtagtatgatcttccaattcttacatcaaaactttctctagaaccttagtctcttaacgatggagattcaagattaaagatagttacgatgcaaaaataggaccaatatgtgtttattaataacttaaaaataataattaattcttttttactatttccaatttgg

SEQ ID NO: 297890 - DNA, 5549 bp, Cannabis indica
tattttggtgagacgcgttgactaacgcaaatagcgccttttgtagtagtgctctctctctctctctacccacacaccaatttctctctctagagattggtgtgttttctctcatctcagttcatagtgtctcatgaattaagtaacattgtgatagaaaattcatccattgaattaatcttataagctcactcttattctgagtgttgaggattaatttggaagaccctagggtgaaatcttcatcaagttcatagcaactagattggatgatcgatattaaatacgaaaagaatttaggataccttgataggtattaagaggtaaaaaaatctcgtagtttagatttaatttatataatcatgttgagatccaggggcttatgattcaaatcagattcatctaaaatatttttttttataaagattggcttccattttctactctaatttggaccataaaaaccaataatgacgaccaattggcatttaaagaggcattggctattcttgattggaggttatggttagacgcgatgaaccatgcaagaaatggactttacgagtccaggtccaggtttaatgtctgagtatgggacgagatccggggatgggttttgggtctgagttcagggtctggggctgggtccagggaccagggctaggttcggggttctggtccgggtttgggtccgggttcggtgtttggggctgaggtcgagttcggggtctaatgtcggggctagggccgagttcgaagccgtgtccaaggccagggcccgtgacgaggctaggttcgagctaggaccgaggtccaatttcaggtcttggtttggggttcgggatcgggactaggtctaagatcagggtacccaaccctagaccctttctaaattttataatataagttaatatagattatttgttatatattaaattatatgattcatattatattaaaatttatggtcataataattaatacaatacaatattttatctaaacttagtgttacttgttatttaatacaatatatgactcttacacggactatcaaatgagccttaaaattttaacaaccctagccttttaatttcaataaaattctcatcatgcaacaaataaactagagaaaaataaaattaaaagtctcgactttctaagtagcagttgaaccaaagttacataaccattcgataactagcttacatgatacggtcagacaatgaaggaagtcttttgaagaaattcaatgctggagatggcttcctatcacgaaagattggatgacgaaaataatagaatccaaatgtcatggcaaccattttagaggggatcaagtacaacatcattgcaactacaaaacacaatcctataaaaattcctgtggcccgtggatcacaccacgtaaccaatgcttgcaaacgttcaccttgtgttgccaaatctcctaaaccattttgcacttttgcccctaatattcgaagtttatcatacctggcttgaattgcttcgggttgtttacaacttggcagtgtgtcaaattcctcatctagctcatcacggtccacactctccaccaatgaaagttttggatcaaaatgaggaagtgggtatcgagatcgaaatctataattccaagctccaaccgcaaagacatagaatgcaagagtggggacgattagttcaggaaaccacaccaacatcacgagtaatgcatgcacaagtactgtagctgttggatttttccacgttcgtgtattgtcaacccaattaacaacatcaatcacattaccaattacattaataattctcaagtaattcactcgaacttttctcatactgaacacgttcgagtcagcatcaagcatataaagcacaacttcacgccgaagtggtggctcatgtcgcgaaaagtgtgaggcaatgatcttcatagtggtgcttctcaacacatcttgttgagctagcccgagaggcttaatatggtgcatcaacggcaacaaaggttgagaatacacgtggagcaaatctaaagtaggactcaccttcacaaaccgaatagcaatatctacctcacccattttcttcataccacccggagtcaatactaacaaaggatatgtatttttgtacactttgccagtagccaacgtggatatacgaatccgaacctttccaattcggtaatcgggatgtgttgcatcatcagtaacctcaattaatgctgaagtttcccagctatcaaacaccccaatcgtcaaaactgtacaaggatcaaacaccttgaaggtgtactgttcgttccacttagggtccaaactatccgaaatagtgcgagttcgcatccacttcgaaccgtactttgccacacagtaagcgtccgtacaccctttaccgtcgatggtcttgaccggaacaagattctttgcccgaatgataccgagttccactgtgccaacaggaggcttccagagttgcctagccgtggggcggtagtcgctgctcatgtgtgcaacctcatccatcacgtgatatccgccatcaaaacagagccttaggtgaacacgtccgttataagttcttcttttctcatcctgaatattttcaaggctgagccaccgtgacgctacttttctgtcatccactctcctctctacaacagtaagaggaattattgccgttcccaatgtagtttgtcccttttgatgtcgtatctcaagagtgattacaatgtgttcagagaaaggttcagcagcaacgaaaataagatcttcattccacaggggagtgctattgcgcgtaagagaagctttagtcttttgaatttggggacccaattgagctttgacttggaagcttaactccttaaacgacttcattatggggagaacatcttgggcttcaatgactgtgatacgaagataccaaagtttgggagattgataaattttggcacgagcgtgtggatttccagaaatatctgatttccacgcgtcagcaaatgattcatctgcctgggtgcctacccatgttgctagcatgaggtccccacagtgagctccgcccccttccaatcgataccactgtggggccaatgggctgtccggtgggtcccgcaatggaatttctgtcgcgtcaaaacaaattccacccaagaagtttttgctaattgccacgtcggatgtgggcttagagttgggtatgtcccacacggagacctctagtgttgaggaagattccggtgagtcacgggaaaaagcgaaggtctgatcccaatcaaagaacgtcgttttcctcgctggtttcgatctgacgtggtaattggatattgatatctccacgattgggttgccttctgtggggagtgatctggctttcacgattcgtacgaacacgtagtgcatcttctccactagatcgaatgaagatcgttcgatcgaggtgaccatatcggacatatcagaactaaatgattctaaggaaggaaatggtctcgtcataggcctcggaccgttaatattaatcccagctgttcttattttaggcaacggccttgagacggaggaggccatcatgtctagttcagcttcacgttgcatggttttaggagttgttggttgaggcggaggcggaggcaagctattctccggtggaatttcttgtggcggagcaacttcttccactttctcttccttaggtggttcagttctcggtggtgactcagtagacggagccggaggctgatcaaccttttcagcctgatcagcagcattattttctgttgtgtttgacttgggagctggtggctcgggggtaggctcgggagttggagtcggcgctggttggggctccggcttcttttcctcatccgttagtggaggttggatgatctggtcggcgtagtagactttcaagccgatatcaccttgaacccaactaaacaagtgtttcttttcaagagtaaaatatatgagagcctcttctcctttcttaacgaactgagccgtactgagtcgaagtctgccgaggaagttggttctagtggtgggcccgtgagatttatcgtggaacacattgagctccaaaatgtcctcgaacacttcagatggttttccggcattgaactccagcacttcattccacgtcggattcaggtcccgtaagatagtctgggttcgctttcgttgaccgtaataatcaaccgttacgtacggactcgacgtgccgtgaccatctttgggcaagaggttacgtgcgtccactacttccactatgagcttctgtactgcggtcgccattattattaatggaattttacaataataataatatataagctcctacgggtgtttgttattatggctctgttttcttaatagtgtcatttactttggagtttttcttttcttactgagatcagtctagtatgtgggaaagttaataagggagaaaaaagaaagagtaatggtggaaatattagttgtatttgtgtagataaagaagaaaatgatgtaaaaggaaaggtacatatgagaaggtatgcttaacttgagtaagaagaagctttttttagaccaaaataatattattataaacaaactatattctcttgatttctctttatcattttaatacatttatctttatactttgttatacatatatacttttctttaattcacactctgaacaagattctcacctcacagtcacagtgcgcctttgctttatttttttgtcctttattttgtagtccatataatatgataatattattatgatagctagcaaggtatgattcccaaagagtgatgacttttaaatcaccgaccgacctttgatttatttgtcacaaatttaatgctttcaaacactgcaagtttgacaaagatataacacgcggtatctagtcatgatcccatttcacgcatttcaataaatctatatatctaagtttagttcatacttctacttcatacttcataatttccatttattatttatttatttattttttccaaatcgcatgtaattgtaatggaatagctctttatgcatcctagttggctgggcgcaaaggctttatcaaaaattattgatcttaaaccccttttcccatcacagtggaaactgatttttttttttagaggaaatggccttttaaaaaattacaaagaacagaggaagggctcacttccatttcaaacccaagcgatatctaacccgagtataaattgagcaatgttttgggctgttgtattccccgttttatggacatgggataggaaaatagttgagaaggaatataatattggacactataacagtgaaaaacgtaattattttagttattgaaaaagtaattacactaagacttgaatacttttattagaccagaatacatcaaacacttactcttttattttatcactagacacctttactacacatttgtgtataactcacactttgggacactttgtctttagacacttactaagaactcacacacttagactctttttctcacacttgaactctcttgc

SEQ ID NO: 297891 - DNA, 12462 bp, Cannabis indica
aaaattaaaattaaaataagaattaaaaaatgagtgtaaagtgtaattttctcgagtttaaccattccaaaattaaatataatttacttttagtaatacttgccacatgtattctatttaaattgacaataataaaatgggactatttaagagtaattaatgtattttttaaggaatatagatttgacggagcatagttttggtatttattttttaataattttcaaatgtacataatttctaataatatcatacatgtaaagatgataatatccacgaagaaaaataagaatttttacaaaaaaaaaaaaagctacaaataattagtgttttcaaccataattacaataaaacatgataaaagagaataatgatagtcttagatggtgcaacatgatttaaaaagtacctcatgttaaaaaaagaaaagaagaagaagaagaagcatgatatgataatatcttgctaattggattggaatgagccttgtgtggagtttgcattgaaattaaagtagtctaattcagaatgagttggcttgtataaatcatttgtggataatgacgcccttgacctttgtgttggtggaccttctcatacatgtatgcttagtataatctgtatctttacaaatttgtttaaatctgcccatcgtttgaaacatgtgcttttgccctttttgaatttattggtatacccatttcttttgttctcaccctaattagatcttctataatattagagcttttatgatgtgttgttatttttgtagttaattcttggtcgtcactttaattgtcattgtatttatctttaaatatacttgttaactgagtaatttcactttttgccatttcaaaagtactggtgtcgcgtgacaaatagtagcttattaagtttgaatatgaaatgagtgcgacatacttattacaaagttatcaaaacactatataaaatttctcaagttataaatgtaccataataaaataggcaaagagagcttttgtacaccataacaaatttatttagttagcaaacaaatcatgaacaactaaatgataccaattagataaaatgtaatagtatgagagtaaagaaaaatgctataattatctcaagcaaaaatgaaaaattaacataataaaataaaatgaaattattactaaatatgaattgtgttcaccttgacttttgcttgagctttgattttttcttgaaatattgaaggattttaagttcggaagaagtcttgacgccctttcggcaacgaactaatataattgattttggaatagttcatatgtcaagagttttcagctcacaccatatatactatagaattcttccatctcaaacaataaacatgagcagacaatggctccgtgtagagtctagcttgggtttttgagctgagggtttcttgtatacccttccttttctttgtgtagtaaactgggctttcatttgcctacagaccttttactgatcctttcgttttcctttgctcttttctctgtgaaaaatcgcttttggcctgggggagtggagtgtttgttgctctgcagcatggaaaaagctctgactaaggatgttatagtaaaatcggtggatgagaatatgaacaacactctggtgcgtgacagtgccctggagttagaaatgctggagctttttgaagatatcaccttggaggatgttgtggctaacaagtcttgtgtaggtaaagtcataaggtgtaaagatatgccagcttctgtggagattaaaaagtgtgatgagggggtccttcgcttcttctttgaacacggaggactgttcttttgtcttacagaagaggcattggcttgtgaatggcgtgttgctaaacatcaagccttggccagaaggggaggttcgagcgggagaattcgcggtggctcggttctgggtccagatccatgggttacctacgcggtgcctcacaaatgaaaatgctcccgttgttgctaagaaaattggagagcttgttgaagctgatggaaaaagcaaatttgaactggttcagagggagtatttgagattatggattgatgtttgggtttcacatccgatctcggtagggttctttctgacaacaaatgggaaaccagagtcatgggtgcattttaagtatgaaaagctccccttgctctgctttaattatgctaagttggcacactgggataaggtctgtcatgccccgatgacaatggttatgccgaggacgggggaggcggtgccaatgtatggcttgtggattaaaagtgatactaggaagagtaactgcttcaattccaaggggaaaggagtcctcaaaatgacttttgatacaggggatttaccggaatgggagttgaatgggaggagtcggagagggctctggaaacgggctgagtccaggcggctgcctgagaggagtggctcgacggagaaaggggtaacggggggcgggggtggcttccaactgtcaaattcaggaaaagggtggtggcgagaaggacaagcagtcgtacgaggttggtacgagtagtgggaatgtgggaaatgattcgagtacggatggtcatggcatatcctcccacgtggcaattgggggggaccacggaatattggcggctcggaattttttaaatttgccaaatcctgattttgcaaataatcgtaatagggagcatcttattcttgatttgggccctaccctcgcccaaagcattgatgtaccccatgattggttgtgtctatctcaaaaaccgcattcttttcctgaacataccccaattctctggcccaatgatgataaggaggtccaaaaactcttccttcagctataaggcccaataatcccttttatctaacccacccaatttatctgagatgattattcatctcctgggcaatagtaggaagaggaaggcccacacttggtatcaaccattctctgctgtttcaaacttctccccgccttcaagccctgcaaacattgttactaccagtgataaagatgatgcttccaaggatactttctgtattggtgtgggcgatgaggggtcgttttctcagtctggaatccgtggaaggaagacaagggaaaaaaataagtcttactcgacacgaagatcctcaggagttaaaactcggagtggaaggaagaaatacaatatggcagcttgcaaagacgtaattacaacctgaaatttggaagaaatactgggtaattgtattgaggtggaagtcacgcttgaatgaaattttggtggaggcgaggaggcggccgcaagcatgcccccaccgtctttatgaggtgtctatcatggaattaccgcgaacttcgtagacccgcggcggagagagccctacggggtttggtgcgagagagtaatgctgatatggtctttcttttggaaacaaaggtagatgaaaatactatggtgggtgtgatgaataggttgggttttggtaatgcgtgttgtatacctgcaattggcattgctggggggcttttgtgtggcttggaggacgggtgttggttgtgtaatcacagaagtattcgaagctggtttttgcgtaaggatgcaaccccttggggatgtagctccttggtgtctcttttgtatatacggtactccgtatcatgctctgaaaaactcttactgggaatggcttacaagtaaggtactatgttgtaattcttcatgggttgtcattggggaccttaatgtcatattggacgcttcggaaaaggaggggggaaaaatgcttcaatagtaaagaaggggagtttcttcgggattttctctttgatactgggggagtggatttggggtgtgaaggaggttttgctacttggaaaaattcaagaaattcccacggtcgaatttgtaagcaccttgatagagttgttgcggatgcaaattggtgtactgaatttcataaggctcgggtggttaagttcccaattttgggatctgaccatgccctgatttgccttcagacaacgggtgaggtgcccaaactcaaatatccctttcggtttttttggaagtctggacatctcggctgactgtgagactgtcatcatgaatgcgtggaggagaggtctttatggtagtcctgattttcagctcctggggaaacctaagggggtaaagtatgatttaaagaagtggaatcaggaggtgtttggcttcagtgatagaagactagtggctctaaggagacaattggctgagattcaaaaggagtcgatctctcatgctagtgtacaaagggaagcagaagtgcaactagaaatcatagaaatggagggaagaatggacagaatatggaggcagaaatcccgagaaaactggatacgatttggtgacgctaattcaaagttcttccacacctccaccataatctgtcgtaggcgaaattccattggttgtgtggaggactcacatggtgtttggctgagtgatcgtgaggagataggaaactatttaaacaaacatttcagtgacatctttgagtcgacaggaagcaacattgataatgagtttactactctgtttgaggataaggtcacggacgctgaaaacgaatgcattggtagaattctcgatactgaggagattaaagatattatttttaagatgcatcctgtcaaggtgcttggtctagatggcttcccaagaatattttatcgaaaatattgggacatggttggtccccaactttgtgagatggtcaagggctttttgaatcagtggtctcgaacaagaagctaaatcattcttacatttgtctcatcccgaagaacccgaatgcttcaaggttcgatcactatcgccctataagtttatgcaactacagctataaagtcatatcgcgcatcttaacggacagactgaaaggtgtactagatcgtttgatatcgcctcttcaattggccttcatgccggggcgatggattgctgaatgttcaatcctagctcaagaagtcctccattctattaaatccaagaaagggaaggtgggagccattgctatcaaaactgatatgagtaaggcatatgatcgcctagagtgggatttcatccgacaggttcatcaaggaaacagtttcaatactaaagtgtgtaatttgattatgcaatgtatcacaatgattagtttctctgtcttgcttaatggagctccgatagctcccttcaatcctaataggggtattcgacaaggcgatccgctctctccatttattttcatcctttgcagtgaagtgttgtcaaagcttatcgttagagctgaaagtaatggtgagatctctggtgtgcgtgttgcaaagaatgcagcacctatatcccatttactctatgcgaacgactccattttttttttcatgccacagctgctaatgtagacagtttgatgaagtgtattcgcaagtacgagggctgttctgggcagagggtcaataaacagaaaagtggtttgatcttctcgcctaatacctcctgaagattccgtgaggatatcaaggtaaggttgggtattagttgtttgaattcaagagagaaatatcttggaaaccctttcttttttatagctagtaaaaaagggattatcaattccttaaggagaaaattctaagtagacttgaaggccggaaggctcgccatttggctcaagcgggacgatctgtgctgataagttctgtcctccagagtattctaaattacttcatgtccacggtccttgttcctaaaactctctgcaatgatctggacaggatccttgctaagttttggtggcttggaatctcggaaaggaataggtattgtgcgctgaaaagcaggaatgatatatgtcaaccaaagaagagtggggttcttggttttagaaggtttgcggatatgaatgtggctcttcttgcgaagctttttttgatggtactgaagtatgatactaaggtttgggtccgcgatcttagagacaaatattgcaggttgatgtccccatggtcagtggaaaagaaagctattgattcgcagtgttggaagagcattcttgaggctcgtcaagtctgtttggatggtgcagggttgattgttgtagatggaggcagcgagctttgggataggccctgggttccccataggaacatggaggagttaaaagcacacttcaaattcagacactatcaggccttttggaatattaaagacctgtttgtagatggattgagagtttggaatgaggagctgattcgggattgttttaacccaattatcgctgatgagatccttagaataaggcctttggaggaagggtctgatattctgttttggaaggcttccaagtcgggtttgttctcagtcaaaagcgcctattggataagtcaacaacactgatttaaggaaccgtgcaagatgtggagtaagctctggaaatcaagttgcatccacggtttcaacttctatgcaagaagattttttctgacattcttccaacaaagggccgtcttgggttaggcaggggagaccaatctctgtgcagtttttgcaattcgaatgaggaaactactctacacctcttttgcaaatgtcatgttgtccggggaatcttgtttagaagctcgtggggtcttcgagtagataatctaatctggaacaatcttacagagtttggtgagtggtggtacgacataacagatggaaacctatctttgtttgcagcttgtgtctgtgatacgatttggagatggagaaatgacatgatacataaagaaagggtctgtaatttagaggatatctatgcagattgcatgcttagagttagtgagttctaatcgactcactattctgtttgtatggatattcctcctgagttgggcggggagaaacctcaccaataggtgcacaaagacaccagatgtttcagggtggacgcctcagtggccagagaggaggctggctttgcgacagttcttatcactggtaatcagatggctgactacctcattgcagctaattgtggtatggtctacagtgtccttgaaggggaattgtagggcattcttatggcccttcaaatggcctcagagacgggtttcaagatggtgaaagttgaatcagattctaaggctgttgttactgctttccaagcgggttcgattcccttatgctggagtgtctttcctttgttttctaaatgccttaagttgtgtaaggagtttgtcaatgttgaagtgtcctacattcctcgtgatcaaaatgtagttgctgacaaattagctcagtgggctagagttaattcttcaaattgtatgggacttcttagcgaagtggctccttttgtggccactagcttgttgtagtttgttttgtttcttttaataaaattttaaaaaaaaaaaaaaacaaacatgagcaattaaagttgtttccatcttttgtgtgttggacttagactatattgaaattctatgaaagagtaaatggtgtgtgtaatgtggtcctccttattaaaaatagaatacaaatgctttttctcaatttgagcaagcaacttatagtagatatcttgtaaaaatttcaacaacctatttgtgatatggtaacaaatgtttggtggtaaactgtggagaagtgttgtcttttgaagtcattttcaacttcattatggtggagtgtgttgatggcaaggtcaatctgggacacaaagtctctcagtgagtaattatacacttaaaatctcttcagttatgtattcattcctcacacctttgtgtggttgtcatgcctgcaaagaatgcccctcttaatcaagtctctacccattgatcatgttctttatatttgtctttgaaatattttacatatctgatgtcataatattccaacaaagcaatccatttctcatcaaattcttcgacggtgtagaatctatacatcaagtcataaaacattgtcttgaatgaaggatccgtacatttcttagttatatttttttcgatgtgccacaaccatagtgatgaagtacacttgaaagcaataacttaatagcaaatgccattcttgcatcaccattagtgagtactacaacatgctttttgttgaccgtgcaatcaaggaacccttaacatctagagaaatgtatcttctgtctcatctaagagaattgcaaggccaaaaacacagtctgaaagtggttgttgacgccgacaaggatcgccaaaggcttatgatacttgttggtccttaaagtggtatcgaaagccaaaacatcaccgaataacatgtaatcccagttggaattttatgccccaaataatgctcatttcaatataatcttatttactaaataaaagatcaaaaatcattttgtgttgcatggttcacatgttactttcatgattaaatgtatcatataaattctgttaaatctcaaacatattgttattcatgattacaatgttttctacacagtgaaaataaccatgcttatatgctttaaactatttagtcccacgatttattagtgcactaaatttacacagatgtgataaccaataatgtagttgtataagtagaatgccctttccagggcattagagaagtaaacttgtatcagatgtatcgactatacatcggactagaccaatattaacagtggaaaagatattgttatcccaatatttgcccacctgacgtggcacctccacgtggccaaaagcagaggacacatgggagacaggtcagcactaactggccaggttagtgtcgtgcaaccatctatctttcaagatcccaggtttgcaagatggactcggacaagaagagcatggagacttacaagatccacatcttcaaggttctgaagtaagttcatcctgatatcagaatcactagcgaagacaaagatacacaaagcaatggcaagatcatggccgaacctctagctagctggccagggaagacaacccatgtaccaggaagcctccaaatatgactggccagcttaggaatgtcaatcgggccgggccgggccgggcccgacccgccatagacccgacccgacccgccacagacccggcccagcctgatatcactttagcctggcccggcccagcccgactccttcctttggcctagcgggtcaggcccgacccgagataatcgggccgggttaggcccgactcatatttttttttatttttttttaaaatagtttatttattttatattctagtaaaactcttattgccatttattaaactatgcaatattgacaattaaaaagtatcatttacaatcaaatgattgtgtgaaaatataattgctgaagttaatctaattggttactctaagaaaagtttcagcaaaatgagatttaaatgttcaaattaatagcacgccagcaaaatagataatcaaaacatgaaacatagtttatatcgaaaatagattataaaacattatcgatatcagtaaaacaaataaaggagctgagacactgtgagaagagaaatagagtaagtaatccaattgagggtcaacaatgcagtaatggaataaaatagaattacaatcaataaaccaaaattgaaactaatacctgcagtttagagaaatgctgcagacccaagttaatagaaaaatgtacagtgtctgtaaggtgaaggggcaagagaatcacatagactaacaacaggagatcagaagagtggtgaggtgtgaggtgtaagagaaagcgatggaagtggcggtggcctgaagtgtggtagaagggaagtaatattaagagtcgaagttctatagaatttgggaaaggttctttttttagggatttaggtctttaaaaaaaagaaaaaaattctgaaattgggtcgggccgggctcgaagcccgatacaattgagccaaagtcgcctcgtcgggccgggtgtccgacctgcaaaaatggcccaaattgccattcctaggccagctaatgcacatactatgccttaacaactatatttttcccataggccttctagaagattccaaatcgtccatatcgctccaccaacttttgaacaattcaaaccacccacaaaaattgggattcaacaccagaatgtaactgacgtattttctagtgttattttcgatctgttatgtattttgaataataacttgtaaaccctaacactatataaatggtcttaactacgtggaaggggcctaacctgattttattctgcacatccacttaagagctcaaaagcactaaggcataaaactctctctctcttttctcatacttctcacattgctttccacattctcataattgtagtactaaagagagcataactagaaattacaaggtttctacctataatttgcatggtattatctcaagagtgaatacaacaaaaggggagtaggtcattacctgatcaaaggggcctaacctttataaattcttgtgtccttttacatttattatcattccgcacgtgacagtcataaataaattagatcctagtcagactccgcgtcagttgggtaaatttatcgtcaacattttgattctttcattgagagcttgaaattcttattcaaaaagctctcatatttttttttttgaaaatctattctgcatagctttcatgagacgtggaaattctactgaaccacaagaccctataaccacggatcctaatgtcaaagtgccacctgttgtaggcaacctaaatgtggctgcccagccacaatttttcgaccatctggctaaccacggaggtctagccaggagatcaaccttctactggacccactgtccaactaactgctgaagttcttgacacgggggttggaccccatgtttatgctggtgagactggacttagggttggcaaccctagcatttatgaatcccatgttaatctgggggatgacttctgaactcgttaggctgagagaggccatagggaaagtacagggtcacacaaatcttcttcatcatgaccaataggaaacttgcgctgctataggcgatgcttttgcccaacagagatgcaaattctaggagtggatggatcagcaagatgcaatcctccaagcctgtcaagtggacctgaattgctagaatcgagaggttaacgacctgatcagacgattcaacaagagagtttcatctcaagttgaagagccaccctcataagggaccctttttggggaaaaggtcctatgtccagagggaacttagcaccctaaggattatgggcaaacctcacagccagggggaccaactgcatcccaaacaaggtcgccatcctatcagcccaataacagtcaaatcttgcctaaaagagcatatggcaggactaaccaatttcaaggcctgcctggaaatgaggagagaaggaaagatgtcccaccaaggcaagagcgaagtaggtctcgcagtggggagtcttaccccaatcccaatgaggataatgtcatcagtcacccaagtggtgagcgcattagctagagaactcaacatactgggtgcaacaatgacattccaccctgaaatgctcaaacacgttctgacttgagacccagggactccgcatttaacagaatgggtccccatgtaagagtagatctttggcctagcttggaacgaaggagaaatgtttgggatgggtacatccagccccataacacttaaccaataggacaagacagaccaaatcctgccaactttaatagggtactacctgtcaacccaagggaggagctggctagacaaaggccggacagggttgatcccgcaatgcaagcgcaattggatcaactcaaaaacatgatacaaggcctacccaacctaaagctttccgacttagagcttcataaaactagaggatcacctttctctgcatgcatcaatgtgttgcccctgcaaaccaagtttaagatgcccaattgcaagatgtatacaggaaaagaggatcccttagctcacatcaaatattttgagatccgaatggatttacaaattatagaaaccaatactcgttgcataattttcccagcaaccatgttcgaaaccgcacaattgtggttcttcaaactagctgttggaaggttcgatttggggaactctttcatagtagagttctacacccaattctcgtcttctagacaaacaccttacaggctagaagacttggttgaagtcaagtagagacttggggaacctttgaaggactaactctaaaggttcatgactgaggctacaaaagtcaagaatttgatggaggaaggaaggtacacaaccatcatgagtgacatagtgcctttgggtgagttgtggaaagatatgttggaatatattttaccaggacctagatttactaacaagtatgtttttaacatcataaatatgaatttctaaaacaatgaaacttaaacacatataaagt

SEQ ID NO: 297892 - DNA, 1312 bp, Cannabis indica
gatgttaatgaaacatacatggtagtaaatctagattctggtaaaatatttccaacagagagttcctaccctcagtttggattttaatcttgcaagtttaatttcttcctttggattgtaaagtttggtttttccttctgtctattgtatttcgacctcctactgtttgtatatgctagattgccttcccaagtcaaccgtaacttcaaagttggaagagaggatcaatttttacaagtccttctcgcccaaggagttgcaagtggaaaaattggtgaccatggagacccttcgaggggtaggtcttattgcctctcaccagggcgtgactcacctttctattaaggagtcggtccaggaggcccgtcgggcagacctatatgaggttaaagaggccattacaggtaaaactatcgaagaggccttaaagttagtgaaggccgatgagaaatggctggaggattggaggagacaattctcgaaaggcctgagtaaggccaaagaacttgccatccacttcaaggaggtggtgcataaggagggtgcttcaggagcgagcacttccactagtggtgagataccttttcatataattaaggctctcattatgtccgatttcaagaccatcaatcaatgtggatttgatccatattttttgagtttagaccatcataagtattcatgcagtagatatatagatagagtagattgtatcatctggagtcccaaccatttcattcctcgtatgcaccatcatgtcaaagtggatgcatttagtgaaatttacttcccaggattcctctattacgaaactaatttaggttgagaggatgtccctctatttgctaggggaaaagtcaattatgctaggattaaaggtttggacggtcttgatgccttccatgttggtgtgttgtaaaatccacgtcttttgttacaatataatttgatgaatatcttgtttgtcttatgtagattaaccagccactctttaaatggggctactaaaaaaattcttgggcagcgtcaaaagtcactttgacaagattcgagagatagcccaaggaggtagagatggtggcaagaaaaaccagtcttttgggagcgaatcctaggagccagcacctttggccttgaatccagaggctgctcctaaggctcttggtatggaggctgcgtctactgtcatcatagacttgactgagccttctgttggaaattattttaccaggatctagatttactaccaagtatgtttaattaacatcctaatatgaattctaaaacaatgaaataaacacataagagttta

SEQ ID NO: 297893 - DNA, 3957 bp, Cannabis indica
atgtgacacttgaacaagtttttgtttatcatatttcccctctgtaacctccagagccaaaatagtcccttcttgaactggaaatagctacacttttctgatgctctaacttaggacaatcaactatacgatgaccaagcccaccacaataagcgcaacccttgaccccgcttatgttagtaatggcatcgatatcatccatcggatcattaagctcagccaacactggtggtatcctctgctttgcctcttgcaatagatgtttcaaatctagaagtgttgtctcactctggttcttgtttatgaatgttgttgctattccagtcttaccgcatcttcctgttcgtccgattctgtgaacgtagttttcaatttctgctggcatgtcatagttaataacatgctgaatgtcaggaaaatccaacccttttgaggccacatcagtagcaacaagtacatctttctggcctgccttaaaggacgaaatggcattttctctgtcctcctgatctttccctccatgaatagacactgcttcgactcctttaaggagaaggtattcatgaatgtcatccacatcagctttgttttcacagaatattagaacaggtggtggggttttctgtaagcattcaagaagatatacaatcttagcctcttgcttgacatactcaacctcctgaatcacgtcgaggttagcagctccagctcttcccacattaaccgtaacaggctttaccaaagcacttctggcaaagttctgaattttggcgggcatggtagcagaaaacaagagagtttgccgttgatctttaaagtggtcaaacacttctctaatgtcatcttcaaaacccaaatctaccagtctatcggcttcatcaagggtgagatacctgcaagaaatgaagaatctcagtctgtaaacatataaaaaaaaatgaagaaatgacaaattgtctaggggcacccactaatccaatagaaaataataccatccaagggatctaagcagggtggctctgttgcctctaagttaatctattgtctagacaaaagaaaagggtaattgttcttgaatcaagaagaccacatctgactcaatcaaaatacatttaaaaatactctcatctcttccagtaaaaaaataaatacttttatatcatactaatacagaatacttgtctcatcctgacaaaaaatagagtaagtgaaagacaacagttccagacagataaagaatatagatgatctaagctatgattatgttttttatcatttggctatcaatatgtctactcgatgttatttgtcccaaaaaaaaaatcacaagataaatcattttaattagggtcctattttcatgcttcaaatttataccacatatcagattttggtattaaaaatgtagttggtggtaagagcttaaatacgtgaacctatcaaatactaatatagtgaagaaaagacagtctaagctataaatatttttctgtaactctgaaattgatatataaatcttacctgcaactgtcgagactcatttttttctttgccaacatatccttcaaccttccaggagtagcaactacaatatgaacgccccttttgacaacatccaactgtgatcgcatatccactccaccaatacagagcaatggcctcagttctggatatccagcttctctcataggagctaaaaattcttccaccacttcataagtctgcctggccagctctctagatgggcaaataatcagaccatatggcccttctcctggagcaatcggcatcataatctcctcttgtaatgcaaccatgatcaggggaagcacaaaaaccaatgtcttccctgaaccagtgaaagcaatccctatcatatcccttccagataaaatcacaggaagaccctgcacctgaatgggggtcggttgcacgatccccttggcttttaacctcttcaaaattggttcaggaaatctcatatccttgaaatttttaataggtgggggtacattgtcaccatccactatgatgtgccactgctttcgaattgcatcacactgcttcatcgacatccttctgatcggcaatggcggtttccaacctgttggcaaaggatctgtataggttatcccctttgccaattcacgaacagacattagagttttccgatctgataggtgctcgatcatttctttctcctgctgcacaatctgttctgttggagtaatctcaggagcatctcgcttcaactgggatgctttcacaagaagacttggcttggcttcagcttctttggatttttccaactcatcttcaacagttgaagacgcacccttgcgctgaaggattttctgagcttccattgctctcctctttgccacaggcacatattcaacataatcatcctcttcctccatacttctgaacaaaaccataattagtattcacactacaaatatcccaaaaaccagaaacttcgaacagaagtgtgaattagtcaaaaaaaaaaaaaaaatacatactgagtgaacagttgcatccgcacacagaaagatgcaaccattggcatactaaaagaaatcaatacatactgaaaagttgcatcccacagactttacaacaatttcatgtaaatgtcaataaaagaaactcttgtcaagtggtcagaataacaaagggtatgaaatcaaatccccctttcatagttagtttaattatttaaagtataattacatcattaaagaatcaaaccagtatattatagcatatttcaaaaccactaactaatgctctgaactatttcagtgatagtctcatctcaactctaggttgatttaattactttaacactgatcagagaatatataaccataaaaaaatgaaaagggtaaaaaaaaatctctttagaaatagatggaaggaatgaaaaaacgaccaagcaattgaattattcaaaagaaaaaatctaaaatatatgtctaatttcttcacaagtttgagaaatcaaatactcattaatagaataatgaggacagatactatctacaagagacaagagtaattgcaatataactcaatattgaatttggtagccatgacagagtaaatcatagaggattagaggtataccaaagggcttaatgaatgattacaggaaaacccagttgagaatggaagtcaaatattgaatttgaagctcaaattaaaataacccaaatctaacaacaggtaaagaaaaaaagaaaaccaatataaaaaattactatgaagtcacgtaactgaccaaaaacaaacctagtaaaatatgcgaagagaaagagagagagagagagagaagaagaagaagaagaagaaatactaaccttgaatttgaaatgatgaaaaatggagcgaagagatggattggataggaaagcgttggaagtggcaatggatgagccgtcgtgagaggggactggagagagtgtttccagtgagagggatggattcgaagatagggccaaacaacggctcagtttagggattcattcaggttcggatccgaaccgggaaaaattcactttaattgtttttctttttttttttattaaaaacttatttccaaacattttcttctgactttaaattttggggaaagttttttgtccctgaatcttgatatgtaactaaatcatactcctgaacttttaaagtcgttaaaaatgcttactgaacttattgagattgttagatttaaagacttttatccaattttagtaaaaaggtctaacatgaatgaaagttcaggggacatgatttagtacatttcaaaatttgagtggcatgatttggtagatatcaaagtcagggggagtagtggttcggccattgatcagaggaagagggcacccactgcttccggcggctcgagtcagaacaagaggttccgggggaaccagaacagagggagtcgtc

SEQ ID NO: 297894 - DNA, 1729 bp, Cannabis indica
aataacaggctgttctccgatcaaagtaaattaattacaggctgttcatgctgaaaaaacgaaaaaaagaaaggaaaagtagataatgatattgggttttttcgaccttgaatttattggttatgggctcaaagttcaacaactataaatttttgtgaaattggcccataccattccctaacctaattagatcttaatgacaaagcccacagccgtgtaactattcaacaactttaattattatcaaaatatttgaatgaaagaggttcttcaattacaccgtcttatatgtgtataatatatattaaattatattttatgtcttatacttaagtaaaataatatttttatataaattaaaattaaatattgtattgaataataatataataaaaaatataatttgatataataaaatgtaatgtaatacaatagtacctattatattaaattatattttattcttatacttaagtaaaataatatttttatataaattaaagttaaatattatattgaataataatataataaaaaatataatttgatataataaaatgtaatgtaatacaatagtacctaaaaatgtaccaaactaaatattatgatgtgtaagacaaaattaatcagaacctttaacttctttactatgctagaatctcggatgtattttgagatcttggtatttaattcaaatatattaaacctagtggttatttaaagctttttaaaaaaatagtaatttgtataataaataataaagttaaaacttttttctttttttgaaaaagaatatcgaagggagaggtattggcacgtgaggtgagtcgagagagagaccatgcatgtgaataggagggacaacttgaaatgactttgtctttcacgatacaacattttgtgggagaaacaaaagagcatgtttgaagtcactagtgtgcccaccgccaattgaagtttgttacagtgtttttaataatttaatattgggttactaatgtaaatctcgataatctttatccttattttgtttttcatttataaaaaaattcaaccccattatcgagaaaaaaaaaattataccacaaattaaaatatttaacttcaagacgaatttttttaaaaaaatactgtgtattgtattaaatttataccgttgttctacaattattttttagttgttcttatattaattattctattttgttattttatggctgttttataaaaaaaataatatttttgtaaaaattccgtataacagtaaaattgtaaatttttactcaaaattcagtattttttgtaaaatttcaaaaaaaaaaaatgctcactagtaaaatcagaaacttgcatagtgctcaacagttaacttttgttaatcaaatctttcttattaaccacaccctaaaattgtcttgttttaacaacttcaaagttgacatttcattataatttgttaatatagtaacacatcacattcacatatatcttcttctttctttttcttttttcttttttttttcttcaattgacatttacattaattgttcctacttcctctatttataaagtgagtgaacaaatgtagtttgggaaacaaaaaactaaggacataaaaagaaaatgaaaatatgaccaagcaaacacatgatatgtataaaacaggtcttacagtgtttacattaatctaaatatagattaacttattcaatgaaaaaaaaaaaaaaaa

SEQ ID NO: 297895 - DNA, 2288 bp, Cannabis indica
aaagctgatgacgttagtcggaacacaaaagatgatgactaattatattttgtatattttaaaagttgtctaagtaaatactaaataacatttcaaattagaccaaaacttcttatttaattatcaacaactttaattaaatcataaaatatatttgtacaaaaataaattagttgttacatttaaataataataaataatttaaaaaataattatttttaacaaaataataactaaacatcatctccctcggtagggtacccaagttgtctaggcacccacattcttctcctttgtctttttttctctctctccctttctctttttattctctctccttggggccaaggaagtgttggcgccccctcctttcttcttattttctctctctttgacgccaaggagatgtgagtgccccctcttcttctcttcctttctctttctctctttttctctctcattggcgcccacaatgcccaggaggtgtcggcgtcacctcctctcttcttcatttctctttctttttctctcttcctctttctctttctttctctctccttggcaccaaggaggtgttggtgccctctcatcttcttaatttgctttctcttcctctttctttttctttctctctcttttgtgctgaggttgtcttggtgccctttcctcccatcatctcttctcgtttctattttctcattccatgggacaacgaaatgtgaatctcatgtcttggagggaacaggctatagtaactaaggtaattgttatccgtatttccaaataaaggatgcgtggtaaaagatggaaggcgatgatccaagtaattaccgattaggtccccttaattagaaaaggtcgcaaaaagactatcttagcccgagaaaggtccaattcgagaaagacccaaagatttaccacaagctaaataaccttctaagacctggaagcctcatcctctctccgggactcggaagagaccaaagcaaccaagcacgcaggcgaatatcaggtgccatatgaagagtctaagaaggatacccttcgcaccaggaaaattgaaagtttatcacaaggtgagagccagacaactcttgtgacagttacacttttctgacacaagatcatatatcttgtcccttgtgtcagttgcatgctcgacacgtgccctgcaccaacaatggtccccgctatacggaccctttgccctatgagaaagagccttcttgggggcccaatagtcagtatttcctatatattttaccccagtgggtgtgctttttacagaaaaccctaggcaggtcatgggtatgcacatacctgcactttagtctatataaacccctttatttcttcacaaagggggtggaaaaaaactacatggccgaagctctgtcaaaatctctctaagctttcttcatcatcaagagaaacctagagaaccagtgttagggttttattgtaaataccatttgtaatatattttgcaagccttcaaggccaatatactgactcgtggactagggataatttacgcttgaaccacgtaaaatcctatgcctattttactttctgtttttattattttttaaagctttggatttatttactttttaaaaatctcgataaatattttggtgcttttattaagaaatgaggaaagatctaagctattgtgttactgcaattatggtggctacgtgaaaaatagtgatagagaagactcatctgctgaacccaacgttgtcatggaagatgcacccctaccaccttcaatgcacgctccgtcgagcaatgtgagggaaggggatatatctgaagctcacgaagaagggatgacccagatcgacgtcgcaagcaagtcaaaggcgaagaccatgacactaagaggaggaggaggatggctacatcaaagacgggtactataaagacaagtatcattatgaccaaaaccaagatcttgtctgagtttctaacaagctacttgaaacccaatagaagttttcctgttaagaagagttcactactacaatttacacaatttagtgacccacacaaaagtgtgggtcactaaatgttttagtcaattgttagtgacacacattactagacagtaaaaatttcaaatatatgttccataatgtgtgttactatatatctgaagggtcactaaaaacttatttattttaaaaaatatataaatatatagtgacacacaagaaaacccacaaggtgggtcacaaaagattcaataaaaataaagaaaaaaattaaaaaagcaaaaaaaa

SEQ ID NO: 297896 - DNA, 3322 bp, Cannabis indica
ttgatatttatatggccattataaaacatataagttttgattccaaatttagagcataaactgaccttgacataaatgacattgtcaacaggtatagcaactgctgatgagaaagcatgggaagataattcatagcagctctacgcactgcagcttctttagccactttgagccactgtggtgtcccaaagttagcagcttccccacaattaaaacctaagttcagtgacaaacgctatacttagatatgaaatttataaataaggaatgggcggcaagtcctgaccatagtagcttacaaatagtgaagtaaaacaaatatggtaaataacagagacaactagagagcaaacattatattagacataaacagaacaccataataaaactaacaataattacattgattggtggaaatgcatcttagatcttatttactggtgttctaaatataatgaaaaatcaagtttaaattgtattctcaaaagctttcccagacattatttatctatctacaatgattctgcttcaagaaaactagtagcatagcatcatagtcaaggaataatcttcttataattattctacctaaatatccagtaaataaacattatataagcaattaccatggctaaatcctacatggtaagcccttggaaatgtcacgacaaattcaccaggattctgaatcaacctaaacaagaaaccaagaaagatgtaagcaaaaagtcacaaccatataaccaaaagaacaaaccaaaccatgttttacaaaccactatatgtttttgttaaaatatcttctttctcttctcttattagatcttttgaacaatagtactaaaatgttaatgaaaccaaaagacaaagcgaaaaaaaaaaacacagaatctcacctgcaacaaggtatattagatgcaacaactacctcaggggacactagagtagtcttctcaccaagtagtgttagtgcagctgacaataagagaaactgaacctgagtacaaagacgctataaaaataatgaaatccaacattttaacttcaagtttctcattgtaccagactttaagaaaatttaggcaataaaaacccagattaaaacctcagacggtggatgggatgtgtactcttgttttaagtctgtttaggtctatgaaaatttacacaaaattaccaagcactcaaaccaaaatttaacatacctaagtggtcaatatcaccaccatatgcctcagaacgcacaacttcctcgaaagcaaatgcataatccccagggacagcataccaagtctttgaagatccagtgtgaaggtaattcatgctgtgaagctcgtgatcttcaacatgccacgcaaaccaactaaataacataccaatgtacaccataggagaagtaacacccgggatatcatctggcatgaaacgagtaagtgagccaggtgaccgtgaaattacttgcaagttccaaggactgtttgatagcttccaacctgcactaccctccttctcacaagaagaatattgactcttctttttagatgattgtgaagttccattaagagggttcattggtatggaagttggtgtttcacatacatcagaaccatttatatgagaagcatccgcattggtatttgaaacaactattccatttgtaaccacttcattgtttttgcaattactgccttctctacttctatggtaaaagtttctctttctcctacgcctatggaaatagcggaattgaccctcgggttccccaaaacctgaacctggtacatcattagcatattccacatacataggcttctcagaagcagctttccaaaacattgcttctataaccaatggagaaacttcctttatcatacccaattggctcttagcaaaagccctggacttagtttcaaactgctccaaagtatagatctccccactttgccaaacttgcttatgaacagatgggggtggattttgaactgcccccttcgcttttttcacattctgacctaatcttgctgcctagtggtaaacacagcccgaacctcctctccattactaccataccaatgaagctgtttttgacaaagaatgattgttcaccgaatttccatgagaacccaattcagggctcttcaagagcgacttattcaagttgttgaaaacatatttcttagatggtttaggcaatggcggaataatcttgcaaataccaaaagcaccagcttccttctcaattttcgatatataagcaattgggtcagcgaattctgtgtcggtagggcgaaactctggagccaaaggcaacccttctagccatttgggtatttcaacattacccattcactatttacattcaaatccacagcataactgataaacggcacaaaagatagcgtctttcactcatttaacattgtccaataattctacccaataccaatagccacccaaatatatcaaattactcaaaaccctaggctggaaattaccggtgaactcccaaaatgaggtttccacttggtattacatccaataaaagtgaaaattgggattggaaaaaagaaaataaaacgcaaaaagggaataaaaaaaaaaaaataaaaaaaagaagctgttagaacctgtaaatgcacgagactgtggatgatttatgccatcaaaatcaaaagcacccaaaaacgagagagggagagagaaacacagacgagagaggaagaggtattatttgtctaggctttgtgtgacattcttaacctgcgcaaaataaagcttttttagtaaaacttatctaaactgaactggggaaagtatggcgcatattagagtccatggttgtaaaccgtcggatcactattattcgccttgattgcatgcgtcaatttacaccgaatgggcgcatgttagtgggaagcggtagaaagcgacatcgacggtgtgtatgatttgtaccatgccatccatcttcaaaaccagtcgtgacgtagagggacatgtggtttgtagtggatcccacaagattttgctgactcgtcttatgagatatcttaaaaagtcctaatggtgtctagcaccatcttacgtatcaatattcaggctcagttatgggcataggcttgatacttgtggtgacgtgtaaatctggccaactcactcgtatgtatagacgagataaaagttaaaaatagagagcacgcataagaatttataataattcactccctgtgtcgcaatagtaacagagctatatttacttcaagatttttattctcacgagattgattataagaaaaatagctaagtttgaaagttctaattt

SEQ ID NO: 297897 - DNA, 2934 bp, Cannabis indica
tattgaagagatgccgcaccagaaactctcctctcgtttgcaacaacctccagtttatcctacctttgagttttctaacctctcattgaaggataacactaacgatgcacaattggcgtaggctaaattacaacctcgccaatcgccatgaatatcatcaattagaatgcacaaggtttgagcagtccccgtgcttttcgtcagctaaaactgcttatttcattaaattcacctgatgtattcttccttatggaaaccaagttaaaagctagttctctttttaaattttgtaatgttttacattttccaaatgggattgaagttcctagggttggactaggggtggtttaatattattgtggaaatcccatgttattgtaactattctcaattatgcaataaactttgttgactgttatatgtcgtgtaacaatggcccacagtagcatttttcttgcttctatggttctcccatcacttcttcaagacattatcctggaaacttcttcaacgacttcatgactctgcccctcttttaccatggttgataatgggtgactttaatgagatactttctattaatgataaaattggaggtcctcctcgacctgccaagcaaattgaagatttacgtgatgtaaatgactactgtagactctctccactcaactttgtacgtgaaatcttcacgtggcataataatgttagctttgctgccaatgtcaaggagcatcttgattatgctttctcgaatatcccttggattgatcaccttcaactgacatcactaaaatgcttggatttttacaactcaaaccaaagagctcttcaagtcacgatttttctcaacgatcaggaacaacccaaatggtttaaatctcattttcaatttgaaaaactatggcttaaacaacatgaatgtgaagagctaatatccaatcattggacacttggaacagcacactcaactgacctatactgcagatattgaagccatttcatctgagcttcaatcctggcaccatcaaaaaattggacaattgcctaggaagatcaaattggctaaaagtgtgagtgaaaatttacgagactcatatgataacttcacaatcacacttctctaatcttcacaaatctgagaatatattagataatttactagcccaagaagaagaatactggcaacaagaagtcgaattgattggttgaaagttggagactccaacaccaatattttcatcaacgtgcgaatactcaaaaaaacaataataagatcacaagcttgattgatgatggggaatagaacattcttcaaaggctgaaatttcaagcatcatcgagcaacattaccatggtacatatttcactgatggagttgagcatatcgccattaatcatgttctcaactcagttccatttgtcatttagaggaagataacctatcccttaccagaaattacactactacagaagtgtatgctactctacaaataaagaagtctaacagcagccctggaattgatggttttttagtcatgttatattgccaatactggcatattgttggagaaatggtcacaaactaagttctcaatgtcctgaatcaaggagcagacccttcactactcaacaaaaacaattattactctcatcccaaaagtcaaaaaaccaacactgatttcacaatacagatcaatcagcatgtgcaatgtcttatacaaattaatctcaaaaatgagtgctatgagattaaaaccactgttgtctcgtctcatatctaactcccaaagtgcttttcttcctcaacgacttataacagatagtgtgttggttgcgtttgagcttttgcactcttttaaaaatagaagaagaggtcgtgtgggttatgcgacgatgaaactcgacatgagcaaagcttttgaccgtgttgaatggatcttccttgaaaaaatgatgcttgctatgggcttgtctcatatgcttattgaactgataataagatgcattaatctatgtcttattcctttttggctaatggagaaattcaaggcaacattgttcctggaagtggaagagggatttgacaaggagaccctttaccaccttaccttttcattatttgtttaggagttttatctcgtttgttatattacgaagaataaaatctaggttaaatgaattataaacttcattgattttttacggagattaacttgtcttcatagaatttaattttttttcctaggttaaatagattgcatgcttcgtggatctattgcttagcaaaaagatttaattatttagtgcttcgtcgtaattaattataatacggagactatgataagtgattatcatcagggttaatagttcaaattaagaataaaaagtaatatttatcatcattgttcttaattgattgttgaaggtggagaataattcttaactgcttttaaaattgtaatcgtaattatcattcgttattttttttttaattgtaaactcacatttcctcttttactttctatttcatattgaataataaattaatcataattctcatgggtttgacatttatttttcgttatactgaagtaattggtaaatctgaaagaaaaaaatattattaaatttattgtggcttacgacacgtatcgatggtatatatttttttgatgtatggtatataaattttattgtatataatatattatttattttagatcatatttagtttctattttattatatataaatgtagtatataattttgtgtgtggtacttattttaattgtggtatataattttgttagtatggtatatatatttttttaataatattattttgttataaaatacataagaagaaaagaagaataagatgaagagagaaaaagaaactgaatgaaattccttagttgtttatttcaatgggg

SEQ ID NO: 297898 - DNA, 7662 bp, Cannabis indica
ctgagaaataaaaagggataacctgttctgggcagtaagaaactccttctttttgacatcaacagcattttgaaggtcagtgtcagctgaatgggtagcagcttcctcttgaacccggcagtattactctttaacaatcgtgtacttcttttcaacatcccccacttcttgtttgctaaacttttttagagtatgttttactctataaagtttcttaacaattttctcaagattactgcctgcagtaggcctattccagctagatataacagcccttctgaagttcggataggtaggccagtggttacaaaatctaaagggtttgaccccaaccttgttcgactcatgattctgaattaaacaataactgtgatcacaaactgtctcccatttaaagcaagcttcggcattaggaaaagcattcaaccatatatcattgatgaaaactctatcaagtttagagtaaattctttcacccacctcatgtttattgttccaagtgtagaaagcactcgaacatttgaattcctcaacctggccattagcaagccaagtttgagcatccaaaatgtccttagcttgcactggtctaccaccatttttgtcttggaacgagaacatagcagtaaaatctccaaagatgatccatggttcatgtaacagcccatagccctcaagtttgtgccatagatttctcctctcatccattgaattgctgccatagaccactgtaataaaaaaagagaccttttgcccactacttttaactctgcaatgcacgagctgagtgtcctcatctaaaatttccacctgaacaaatttatcttgccaaataatcataattctaccaaaagtaacattacttgaatagaacttccaattaggaaaattattggcaataatctcataagctttctcatgtttcaccttggtttcgaataatgctccaaaaccaactttattcaatcaagaattgcattctgcttttcttttttattcatttccctcacattccaaccaatcatattacaaacttccattaataatcaagttagagttgggaaccattacctcatcaactgctccttgaagagctgcataaccgttcactgttttgggtgcttcaacaatagtctttgttaccattttttgccctctctttttaggagtaatccagtttgctttgttcgaaaccccactgcctgttttctccatgtcagcttgacttgcttactctgctttttcctccccagtttctgtagcagtttcacagcgattattcaagttcttctcatcaccagtaattgtttcttggtttggaacctcctttttatcttccttaaagtcactaggttgtttcttcttccagactttaggtttctccttgttacaattggccacaacatgaccaagatttccacaagccaagcactttgaagggagccattcgtactccaccagctgctcaacaagctgcttttatattttggatatgtgagttataatatataatatatatatagtgttggtgaatgtatcgaatatcataatcttgtaaaatatatacatatatgatatttatattattggtagcatagcatctgtttttacttttttttttattattttatttaacttttaaaattatgaataatttaagataaataaaattcaatttgtgagctgcacttgcactagtcataagatgcctcatataacaacttatatattattagagatgtgtataaattgttccaatataataataattgatcgattcaattataactaattgctaagtattagatatttaattgggatcaaatcagattggatgatattgttcaatatccaattggatcagatttgatgttagatatggtgtttaaaaatttaatacatccaatatgtaactaaacaaattaatattctcagtttgaacgagtaattagattttgtgttgttatacgtaaaaatatatgtaacattaatttttttttgaattggatagatccaattcaatctaatagatactaaatataaaatattgaatagatctgatccgattcaataaatattaagtctaaaatattggataaaacagaattaaatcaatatatacatgaaatatattcaatattgaactgatccagtccaatccattagaagttggatcgattggataactgaaattaattagatcggatcggatggtaaaatctaacattcaatatataattagatcggatcggtggtaaaatttaacattcaatatataattggatcaaatctggataggtttaaaaatattatatgtgctccaatggacatctttatatactatgatataaatatatatatatatattacgtatatatatacttataagacatgtttatgaaaaaaaaaattcaaccattgatgatagattcaatagtgataaatagatatgtatataataataataataataattggtatttgaattgtattatattatttttatttattttttaataatattgtaaaataaatatttctttacaaaattaattaaatattatattctcaatcctccctcctctttatctctctctacactcatttttgttcttcatgttcttctttttcaaggtcatcttctagatgattaaataaactagggaaaaagaaaactcaaagaatcattcaatatcttttggagaaaaaaaaaaaggtgatgagaaaattaagatgaaagttctctctttacatattcaaacctttaattttgtttatcgatagctataatagaatttaatatgcatttttattttattttttaatatattaattatatatgttatataatttagtgcacacaagtgtatatatatttacatatgcacataaatgtatattaaatagtgtatatacttaattatatgcatcatgtgaggattagctcacttagtcaacataactaataactaccaattgtcaaaaggtagttagtttggttggctttaaacttttccatccaagacctaataagagtcttaagactcatttcagaagatgatcaagatcgggaaacacaaaacagagtgagattaattctctttgaattctcaattgaaagagagggttgtaaaaggttttttcatttgtttgattggatagtctcaagtgagatcataatgtaactagtgtgaattaccattagtgagagtttgtgtgtgtgtgtgtgcgcgcttgatctgagtgttgtaatcttgttcattattgccaatcatcaaataaagaatccacaactaaagaatgctacttctacccaacgactagatccaagttttagccaaacttatgattgaacctctttatgttcatgtctatttcattttctattttatcagatatttagtttctttttcattctcttgattaatcttctattcttgtaggtaaatatgtgcaccacaaatggtatcagagctctagggaggtcgggagtgttcattcaagaaccaagtttagataatcaatattttgtccaagatggcatcagccaaatttgaagtggaaaaattctcgggctcaagtgattttaatttttggagaatcaagatgaaagcctttcttgttcattaggaaattttagaggctttggatgaagataaactgaaggaaattaatgacaattagaaaaaatataatattaaaactaagactcatagtgtcatcttgctcaaccttggagatgaagtttaagggaagtttctggtaaagaaaaggcattggaattgtggaataaactcgtaggaatctacatgaaaaagtctcttgcaaatatattatatcttaagaataaattgtacactctttgaatgtattagtccaaagatctcctgaaaaatcttgatgattataataagcttattcttgatttgaataatttgggtgtgaagattgaggaggaggaccaagcaatcattttttttaagttctctgccctaaatgtatgaaccttttgtggcttgataatgataaaagtcaagactgctctattttcaaaagaaatttaaaagaaagatgatcgagctgacaataatggagatggtctatttattgtgaaaggcaaaattccaaataacgaatacaaaggtcgcaagaactgttacaacaataatagagataagtctgatagattcaaaccaagaactctatcaagtaaacgatgttattattgtaagaaagaaagtcattttagagatgactatttagaactcaagaaaaagataaagagagacaagaactggggtaaaaatggtgaggctaacatagcagatggctatgaatcagttgaggtcttagttgcatctagcaatgtttcagctggagtctagattttggattaacggtgttttttccacctgacacctcacagggggctgtttagctcattttcagatgaacatggtgtatctgtgttagttagtaataacaaagcttgtgaagttaagggaattggttcaattgtaatgcaaatgcatgatggtgtttcaataagtgttcaacaagtgagaaatgtaccagttttgaaaagaaatttgttgtccattggaatgtttgataagaatggatacatagacaagactaatgagggcgtaatcataatttctagggttttaaagattgttataaagggatatttgaacaatggtctctactatccagctagtaagattgtgattggtaatgttgcatcagcactgagtcaaacatctgagatcactacaagactatggcacttgaggttagggcatgttagccaaagggggctagatgagctaaataaataaggaatattcaagggaggtttgaagaacaaacttgaattttgtgaagaatgtgtctttgggaagagttgctaaaccaaattcaattaaggtgaacatcatacaactgagaaactagcctatgtgcactcagatctatggagtccttctatggtggagccacttggtgggactagttatatcataagcattatagatgattatagtaggaaggtttggatatacctacttaagagtaaagaccaagcatttgggacctttttcaattggaggacagtgctggaaaataaaactagtaagaggttgaaaatgttaagagcaaataatggactagagtattgctataatttgttcaaagattattatgctaaggaaggaataaaaaggcacaaatagtaaggtgcctattggttggagctagttatagaaagaaagttttgggaagagactctcaaaaatatttgttatctcataaatagatgtccatatgtttaaaacaactttaagacaccacaagaaatatggacatgtcatgttcctaaggtggatcacctcagggtgtttggttttatagattatgctcgtgttaaacaagataagttgtagcttagagcattaaaatgcatgtttttaggctattcagatggtgttaaatgctacaagttatggtgcttggaatctagatacagaaagtgtaccataagtagagatgtagtcttcaaagaggatgatatggcaatgaaacctaaggttcataatgagattcaataagcagctccagttcaggatatgaaatttgaggcggactagaaaatagattctcaaattgcagatcaacatcaagaaatcagttcaaaaagtgagaggcataaagatcaaactattttgagttcacatcatctttccagagatagagatagaaggaaaatcagccccctgacaagtttggctatgcagacttcatagcatatgcactgattactgccgagaaaatagacatttcagaacctacaagctactatgaagttgtcattagcaagaacagaggaaaatggatgaaagcaatagatgatgaaatgatatctctcaaggagaagaaaacttaggttgtgtccacaaaaccaaaggggaagaagttggtaggatgcaaatggatcttaaaaaaaaggacacaccaggtacagagcaaaccaagttcaaggccaggtagtggccaagggattcactcaggaagaaggagtgaatttcaataaattttttccagttgttaaacaaacttctgttagaatcatgatggaaaaagttgcaaaagaagaattagaaattgagtaagtggatgtaagaacaaccttcttacatggaaatctaaatgaggaaatctatattcaactacttgaaagttttgaaagtatagatctagactaggtttgcctcctaaagaaatctctttatggtttaaaacataccctaaggccatggaatttgaggtttgatgaatacatgaagaaaattggatatgctaagagctaatttgacccatgtatctatcaaaacagttacatctactcgttactttatgttgatgatattctaatatttgggaaagaaaaagtaaaaaataacaagtttaaaaccaaattaagtcaagagtttgagatcaaagaccttggatctgctaagaatattcttggaattaacatcaaaagactaaaaccaaatgtgattactctatctaagaaagggtatctataaaaagtgttaggtaagtttggcatggaaaattcaaagattttctcaacacctctatctcagcatttcaagttgtcaagttctcattcaccaacaatatatgttgagaaagataaaatgaagaaggtgacttaagcaaggtttgtgggaagcttgatgtactctatggtctacaccagaccaaatttagctcatgccatgagcatgataaacagatttgttggaaatccaggatatgtgcactagacagctatgaaatgggttatgagatatctaaaagggacattagacacttgattaaccttcaattataacaacaacttcaaggaagtggtgataggttatgtagactcagattatataggaagtctagacacaaggaaatcattaacaggctatgtattgcctgtccattgtgggtgtgtgagctagagatccaatttgcaaaatgtaatggatttatcttctatagaggctaagtgttgattggatttttagccaaccgacgcagagttgtaataaatgagatttaaaccaaaatcacaataataaatacagttaataacaccgaaatttgcaataaatgtaaataaaagacaccagaatttaaagaggttcgacctcggatgtcagtaatagcctactccccttgagttttattgtctgagttgcaaaagtcaagaacaggctcttgattgcaaagaatgagaagtatttatttttctaagtgtttcaaattgcggatcccctctccaaggtcatgggtgaccccttatataggggagggggtcggtgcttcttgcttcaggaggtgcgaccaacgcggagctatctcaatcgtctctttgattttcagaggcggttggagtctaatttttaggataatatcccgctatttcgtgggttgacaactgtctttgagcctttcgcgggatttgaatatttgaatgagccactgatgacgagggtcccttatgggtgtgacatggtcgtcaaccacttttgaggattaagcccatacttgggggtaacacccccaggaccctcgtttagggggatgacaaccatcctagtt

SEQ ID NO: 297899 - DNA, 1767 bp, Cannabis indica
aaaaagggttagtgatgaggacgtgcgaaactaacatggaagggataaagttgactaattatataaataaagaataaagaataacgtatcatcgcattataattacattgatttatatattataataacattttttttattaatattatatatatatatatccaaataaaagagagtcttggatgttttaattaacaacgatgaattaataatagagaccttttccaatggatctgaaaagctcctcccaagatcaacaacgtcaaaagctccaaatattctttgttccaaaacgagatgttcgttatatcttagctttattcatcctaataatctcttcattcgttatttcaaggctcgttaatctcacaacccctttcgatcgaggcttcttcatcttttttctttccaataataataataattccaaaacgacgtcgtcgtgtgattattcgtatgggagatgggtttgggatgagactcgtattctcgactcctacaacgagagctgccactttctcgaccccggatttcgttgccgccaaaatggacggaccaacgaagattttcgccggtggcgatggcaacccgacggctgtgatcttccaaggtaataataattaagatttaaaattttctccaaactttcaagatttgttttctttattatttgcatgcatggctctcttttgtaattatgtacttttttgtactgccctaattaaacactttttccttttttaattagagagagagaggtgaagttaggtttaatcttgtaagtgggccacgtggcagttttttttaacaatactttccttctgaggggaaaagatgaacatgggtccaatccaacttaagttcatgttcatagttttttataaataaaattctttactcttttaagaaaatgataaaagaccctagagttgcccttagtaatgcaatttagtatagggtatgatattttagtattatttgtcattaaattaaaaagatacatgggatcccaatactaaattactctatagcaacttgtatatggtattggcactattgaattgattatattattttttacaatttaatatcgaatcccttatatttaagatgtaactatatatgtgtagatttgaattgtaattatatatgttgatattgtttttttatattattaatgtatttattccttttcaaagtaatatatgtacatggacatacgacattgcattacaagttagagcgatagtttcaaagcataaaacgacaaactaactaagtgtattttaattagatttaacgccagcgatttcctagagagaagccgaaatggaagaatagtatttgcaggagactccattggaaggaatcagtgggaatctttactgtgcatgctagctcagggagtgtccaacaagtcgacaatccatgaagtcaatggcaaacccataaccaaacacaagggctttctctctatgaggtttcctcactataatcttactgttgagtattacagagctcctttccttgtcatcaatggccgcccaccgaagaattcttcgaaacaagtgttcagctctgttaaacttgaccagttgcattggtattccaagtactggatgggagctgatgttttggttttaacgatggacattggtggaacaaggacaagacaattaacatgtatgtatttcctctatatatatatatacacattaggaatattttctatataactacttaaaagttttaaatttataatccata

SEQ ID NO: 297900 - DNA, 1393 bp, Cannabis indica
gccaggatccgcgcttggtttgactcaacagatgcaactaacatcctcaatattgggctgccgacatcgaagcaagaagtctcgtggcaatggctcggagagaaaagaggtacattctctattaaatcggcctatcatctcatcataaagcatcgatgtgctgaggttccacattagcattggaaatttatttggaattatcccatccatgcgcggttgaaactgctatggtggcaaatcatgaacaactctctcccaacccatgagaggattggtatggtgttcaacataccctgcactttgtgtcccctctgtgatgaggaaatggaatcgtctttccacgtgctatggcaatgcaatttcgctaaagctgtctggtttggaagcttatggggaataaggacaaacttgagccaatgtggaaattggagtgaatggctagattgggtcaaggacagtagtaataggcctggcactctaagcttcgaagacttcattgctggggctttgtgcatttttgagagtatatggaaggtgcggaatgatgtctgtcatggcacgcaccaaattcaaatctctgaggcaatccaggcaatttgtgtgcgatacaaagatcatcactcttgcatccggccccttagggtcaaatctgcaattgacctcactccacctctgggatggatgacgtgctgtactgatgtgtccatcgatttaaacctctcggtaggggctgctgtcttccgggatgatagaaatcgaatctgtggtgtttttgctgcttgttttacggctactgagccgactctggctgaggctcataccctggcaatggcaggccactatgctgtgcaaaaccagtttatgagggttggttttctctgtgataatgcagcagtggtatctaatttcttggaaaccaatactcaaaatttgcatctcaacctggcgggagctgcgtccaagttcagatcttctacgctccatctgcagagttttcagctgtcaaagatcggcagagagcagaatttcatggctcataatgctgcaaaatgggcgaggattaacgatgtggtgggagaaattgacatttcttcaatgcctcctgaagtgttcgtggattagaaggaatggttcccggatctaggataattctcctttatctttcgggccctaaagtgttcttcggcaactgccattttatgtttttgctttactatttgctctgtagtttccttttttgactgtttttttctgttaaagtttgtctcgttagtttccttttttctgttgtattatgccatagattttggctttgttgttcctgttgttttttcaatgaattggtgctttgcacctcactttcaccaaaaaaaaaaaaaattaataaaaacca

SEQ ID NO: 297901 - DNA, 3564 bp, Cannabis indica
ttattggaaaattctacattatatatgagtgcaccgatacacctttatctattttggtatctaaaaaaatatttagtctaaacttttatggtcatatacgttgtacttatttaagatatttggcaaaattttcaaaaatttgaaaaaaatttaagacatcaaaagtagggttcaaagaatttattagatgcgtgacttttgttattttatacgagtctgaaatagacggtttgaacattaatttctatattgtaaattatttcaaatttctcaaaattttacaaaatatctcaaataattataatatacataattataaaaaaatttgaactaaaaaattttataaatgccacaacagttaagggttgtatgactatcagtgcacctattttagttagaaccatccaatattatttcatatggttcaatcctatgagttgtcattaatccagtaatccatcaatccatctcaatgcgtattacaagcaacgactaatagtaatagctatattcaacacaatgatatgatccaaagaacaaaaacaaataaataagatatattacagattacagttaggggcggaaggatgttattatttgccgggaccatttcggcctataaatataatgtactgatcattatatacattattattacatatacgatacagtttgtattcaagagcaagttttttttttattctaaaactaatgtaggagtgcgtttaagcaagagcttaacaacctctttcatagaaggccttaaagaaggttgtgtctgtgtacatttaatcccaatcttgaaaacacagcacatttcttcaacataacatgcttcccttatctcctcatccaaggcttcggctattggcttgtcctcatggacatggcgccacgcccattcgactaggctactgtgtgtgtcgctgctgtcatttgcttctctaccagttgccaactccaagagcacaatcccaaaactgtaaacatcaatcttctcattcactcttgtagtatatgagtattctgcaaattcaagataataaaatataattttgagtccttactaaaatagtcaatggcataaaaagggaaagaaacatattgttggctcttacctggagctatgtagccaaaggaaccagccacagttgacattgtagcaagttcaccttgccttgccaagcacttagctaccccaaaatctgcaatttttgcgttgaaatcagaatcaagcaagatgttgcttgatttaatgtctctgtgtataactggtggcacacaatcgtggtgcatgtagcagatgccctgagcagctccaatcgcaatttttagcctcttgggccagtcaaggactaaatggtgaacagtcacagaaccaggaacagggctagtgatttccctgtttttgctgtaaagccatctatccaaactacgattttccatgtactcgtagactagaagggtagagctctcactggagatacagccaatgagtttcactatattggaatgtctaattgaggtcaaaatcttgacttctgcaaggaattcttgctcaagattgtggtctagcttattcttgttgcatatgctttttacagcaaaaacatctccatgacgactcacacgaacacggtagactttgcttgagcctccagttcctattaggttatgctcttttattccagacacaatttttgtttgtctgaaattcagtctttgaaatgacaccaccttccatttggaattgaatctgtttttcctcctgtaacatcttattatgaagaataagatgaaaagaacagacaaaaatacagctaccgttaatgttatcaacacagcaagatattttcctctgattatttttttcagtatcttttccagcttcttggatttggaatcgcagagctttagttttaacacattgttacttgcacaaagatcaggattatccaagaagctttcggcaaatgcaggcttataaaactcaggggggactataccagtaagcttattggaagagagattgaaagtttggagcatcgataaatgaccaagttgggatggtatttggccagaaaacatgttccctgaaaggtccaaatttattagaattggtaacagaccaagtctttgtgggatctgtccagagagttggtttcgactcagattaagagtaagtaggacctcccaagattgtatatctgtaggaaactctcctctaagctggttttgatcaagcaaaagatttgtcaaacgaggaagagtcgtcaatccttgaggaatagtacctgttagaaggttatcactggcctcaaactcaatcaaatttctccatgaagacaccgcagtgggaagggtaccggaaaacctattgttactaatatggaattcccaaatgttatcagacaacttctcaggaaacaaatcagtaaatgaattgtttcttaggatcaaggtgcccaagttaggtaatgtccacaagccactaggaatctcccccgaaagcatgttgtttccaacattgaatacaagcaagctactgcaatttccaagtggttctggcaatgtgcctgtgagcctattggaattaaccctgaaagattgtagcttcgaattcttgccaaaatcagaaggcaaaacgcctgacaaattgttgttgaacactctgaaatctatcaaagctggtaatctgccgatgccttctggaatatttccagataattgattgataaacaaagccaaacccgtcatttgctttaactttccaaagtcttctggtattatccctgtcaaattgttttctgaaaaatcaattaccttcaatttcagagattcaaccacttgaggaatctccccagaaagtatgttcttgtaaagatatactgtgcttaaattcttcaacgtgaacaatccatctggtatattaccaatcaaactattccgagataaatccaagaactccaaagctaccatatctccaatactttcaggtattttcccaatcaaatttaagttagtaagccacaaattcttcaactttttcaactgagtataatttgaaggcagtttagatggtgaaagcaacttattattggataaccataacgtttcaagattggacaagttacctaattccagtggcagagaaccattgaattggttggcccctagttccaatgtccttagctcttgaagtcgtccgatggcaatgggaatgttaccagtgaagttattacctcctagtttaagactccggagatgaaccattcgatcaatgtcactaggaatgtttcccacaaagtagtagtcggagaggtctaattcttcaagctttgaacagttgaacaaagctgtaggaaactcccctgggatgtagttaagcccaagagtaattagtgagaggttgctaaggtcacagatgaagaaaggaacaggtaccgtgatatttacgtcatagagtttcagctctgtgactgagtccagcatacaagtaatcccaggccaagaacagtgggaagaggagttttttgatgggatccattgactcatataaggaag

SEQ ID NO: 297902 - DNA, 5724 bp, Cannabis indica
tgtttttcttttttaattgccgcggctttcctttgagcttgcagtattagagtgctgaagatttgtcgctttgaggtgctttttgatttgtgtatttcgctttccattttttaatttcgttcaattttattattgttattgtcaatatttttcgggtgatccgtgtttggttccttggaaagttgaggaacaagaatgggacataacaaatttgaaaatttcatattaattttgcagggtgctataccatatattttagttatatggttgagtttccctccctttattacgaaaattattggaaattgttcagttcaagctttatccccgcttttatctcctttttctttccctctctctctctccaataccgctttttttctcaatgaaactgaagaggcttctggggcttgtttctgaaacttatagttgtttgtaatttgttttgcaactttgaaatttcaggttaggattatggtagtttctcagaattttggagttttgttcgaaatcaatagcgttgagagcaggcttgcaattctctggaagcatattgtaatttaagaatcttgagctgggtgatagggttagtatttggggtttagtgtttatctctttcaggaatggcagaagacagcctccgaattggtgggctttcttctgggttggctgtgttattgaatggtgaggatagtaaagtgggttcatcaaaatcttggctagtttctaattgtgatgattttggccatcaatcagttgaacgaactcttgaatacatatttggtatccctatcaaatcaattggttcaatatcagatcaaatcaacagcaatctagtccgtgatattataaagaaggaatgttctgattttttttcagattcaggtgctgtcctcagacatagagatggaatttgtgttgttgataatggtggtggaccccacaaaattgctcttgaagaatccagtatttgtggtgatatcagaatcatcagaccacctttgcttgtagagagcttagctatgttcagcagtgttagggctaatgcttgtctatggaaagggaaatggatgtacgaagttatattagaaacctcaggtgtccagcagttaggatgggcaactatttcctgccctttcactgaccataatggtgtaggtgatgctgttgattcttatgcttttgatggaaaaagagaaaaaaaatggagcaaagaagctgaatcatatgggcagtcatggtgtgccggtgatgttattgggtgctgcatagatctagatcagcatgaaataacattctatagaaatggcatttctcttggtgtggcttttcgtgggattcgtcagatgggaccagggtttggatattatcctgcaatttctctttctcaaggtgaaagatgcgaattaaattttggttcccgcccatttaagtaccccgttgaaggatatctccctttagagccacctccaacagtcaatacttgcgcttttcagttactttcttgcttatcaaggctgttggatattgactgtgtggagcgggctggacattcttctttggagaaattgaggaggctgaagaggtttgtttcatttgaagatctctttcttcctgttactcttgggatatgtgaggaactctttgccttgcttgaagaaaatggtcagagcatagaatatattgctagtggtccatttctgtcattcatgatggatgtgtttggaatgcaagcaccgcatgactatttaagtcttgatagaattcttgatgtcttcctagaatttcatggatcaactccattgtttgaacacatattaaatgccctctcctgtgggtgcaaaacagctagattggtcctgacagattgcccttgttcggggtcatacccctatcttgcattggcttgtcacttattgaggagagaacagcttatggttctttggtggaaatcaacagattttgaatttctttttgaaggttttctttcacggaagtgcccaaacaagcaagaccttgagtctatcatgccatctgtttggtggcctggttcatgtgaagaagtgtcatatgaaagcagcatgttgttgacgactacagctttatctgaagccattagtaaggtattttttttttttcttctttttaagtggctctgataaactgttttataataatctttatactgagatatttatataaatttttcttctattattcgccattggatcaaaatagtttaatatttctaaattgatatttatagttatttttttggtaatcatcaatgaagtgcaccatatatatatagggtattttggtatcttcgctacataaaaaagttgcaactctagttttccattttttatgtgaggaaatataatgtagttaacagtggacttttcacaaaatttcagaaaccttttacaaattttctgaattatttaaatgattcaaacaacttattgtacaggtgtataattgcacgggtttttgtattgaaatatatatacacacgtgcaataagctctttgaatcctaattttggcatcttaaattatcaatagtttttctagcaaaaaaagttatcaatagttttctgaaaatttatgagagctctcctataattatattatatactgacatataaaacaaatagaaatacaatttatctatgcaatgaaattactaaaagtacctacatatacatatggtgattaaaaaccgtcactatccaacaaattttcatacatatatgcatatatattatttttaacagtatgtcctaattctgaaaatggattaataacttagcttactcttttgaatttatgttaaaggattgttagagtacaagatcttagctattcattatctataatttgggagtattgacgacatagaaatgggtgaaacacaaggttctttaattggtgaagaattattctgccttcatcttatgttggtggtccaagggatattcgtaagtggcattggttcaaagatttggaaaaccagatttattttgaacaaatacttctacatgcacatttcttacttatttctaaagtaggttcaaagattatatagaatttgggctttacacttgcattcttttaagcataatggagtatgaatgaattcttaactagctacttgctacagtgccacttgtgaatcgatattctaagtacttaaattatacacaaacaaaataatgattcgataggtttcttaagttttctggtaaaataatttgatctgtgcttaggacctaatatcaaatgccactattgctgtgttcttgcaactgctttaggttaaactgcaaatcattagagggtctcaatgttagtttagtaaatattttgtagaagaaacctttcttttaatagaaattttcattttcagtgtgtgactgtgtgggcagaataagttggtaatattctcttgattgtatttgttaatggcttatctgaattagagatccagttcttggagttttgtatgcatactaaactgatggcacgttgtgttgctgctgcttcatacagattgaggagaaacatagggacctttgtcgcttagtgatacagttcatacctcctgtaatgcctcctcagttacctggttcggtgtttaggacatttttacaaaacctcttattgaagaacagaggggcagatcgcaatctcccacctcctggagtttctagcaattctgttctggtttctttgtacacagttctacttcattttctatcagaaggctttggcatgggggacatctgcagctggctgaagaggagtgaaaatggttctgatgttggttttcttcataggggtggtgagcggagttttccagttggcctgttcctaaaaaatgattcccatcgaacagacatttctaggcttggtggttcttttaatcatttattgaaattgcatcttgtcaatgatgaagatgatgaagtagttcggtgggaagaaggctgtatggatgatgaagaaacaagagtaactcatttaagcaggcaaaaaccatgttgctgctcaaattacgatgctgattttgctaggagcttgaagaaccctattagatacataaacaaaggttctcgttctcactgtggccctatttcagagagatctgctcatgttgctgcagaatgcagtgctggaagtttaaacgatgagatagcagacaaaccaagctccagtgatcaatctgaatctgagtttggttaccattctgtgcagcagttgaggtttgtacccagggagagtaacatgtcttcagcgacattaagagaagaagaacttcttgatgttttgctgttgctgtatcatataggtcttgcacccaactttaagcaggtgaggagctgtaatgaagtagtattttcttattagaaagattcagtgctgttgactatttttattcttcttgcatgcaggctaacagttttttaaatgctgagtgttctgtttgttatgctttatatttgtattttacttctatctttgcttgatgttgttctgctatcctttgtgacgtgatctgttatttttttccctcacagttaataaatgtgtattacatacatttgaccttatattgttagctgataggtaggagctaatctaaaacatttgtgctgggtacaatctgtattagtcattatctagctgttctctggcctttatttatttatttattattctgatgtataactagattgtacgcctcagtcagtattctttacttgctttctcacctttcttattcagctcataggtaatacccttttgtttactgtttggaactcttgattataatttatgggggcttctttcctatttcattctgcaggaattgtatttataatatgcttatgcacttatgtatatcttattataggcttcatattacatgtctcaccaatcacaatcaatatccctacttgaagaagtggataaacaaataagagaacgagcatgtagtgaacaacttaagcgtctgaaagaagctcgtaacaattaccgggaagaagttatagattgcgtcagacgttgtgcatggtaagatgtttgtcttgaagatatgttactcaaaatgttttacttatatttgttttattcttcggaaaatctttagtacatgtatatttttgtgcttttccataaattcaggggtagcacttgctcttgtaatgcatgcctttcagttaccgcatctcttgtggagtatagattgagtttgttcacagttgcttatgttgatcaatgtatgcctttcaggtatcgcatctctctgttttctcgatggaagcaaagaggaatgtatgcaacatgcatctggacagtccaattgcttctaattcttagtaaagtggattcactgttcttatacatacctgaattttatctggaatctctggtaaatttgattctttgtaatcctgtaaatcttagttggagatgtcatattacatattttatttatagatttatagattattcaatttctccttgctataagaattttgatttattgtttcattctatcttttgccagtacatagttgcatgcttgacagaaaatttctggaaatgctttgaatatttgtattgattaatgattctcccttttaagataacaattttctgtcaaatttaagatattttcccttagagtctctctctctctctcatgtttcgaagt

SEQ ID NO: 297903 - DNA, 7930 bp, Cannabis indica
tctctctctctctctatttctttgacttctttggtcccatctgtataaagggtctatctcaaaacttcttcttcatcggtcacgcaggtatctccttttgctttctcaattactttttcacacgaaatgggtataaactctgtgtttaaaaaactgtatgtataagatttgatttttagtttctgttcatcattaatattttgattatatgtgttaaggctgaaactgattgtaacttgcctcttccaattttcaagagtcgaaaatggtttgaccagtagatagatagatagttaagtcttttacgaaactgacaatttttaatttaaatggttgatatgattttggactcttgaagagttttggaccactaaaccatgttcttcaagctattccaacaattgggtccagtcacaaaaactggtggaatagtaattttgatgttagtatgtttgtgtaatctgtgttgacagatatgggtggtgatgagcaaactctggtggagatcttagaggagcacatcccaattgatttctccaaatacattaattatgtcagtgctccacaagctggtgccatagcaacattttctggtacaacaagggacacttttgatggcaaagatgttgtggagctgagatatgaagcatatgtgccaatggctctgaaatgtgtcaagactatatgctcatctgcaagatcatcctggaatctccattccatggcggttgctcatcgccttggcccagttcctgtcggtgaaacgagtgtcttcattgctgtgtcatcagttcacagagcagatgcattggatgcttgtaagtatgtgattgatgaggtgaaggcatcggttcctatttggaagaaagaggtttattcaaatggagaggtttggaaggagaattccgagttcttggaaagaagattgtttgggaataatgatgatgatgatgggagctgttctgttaaagaagttgaggttcataggcatgagagaaagaaggggtgttgtggtgctaaggtgaaggttattgatgaaagtggaaatgatgatgagaagaggtgctttgttaaagatgttgaggttaatagaatatgagaaagaaaaaagtgtaggtgaaattccctttattttttctttaataagaagggctcaaaagttgaaaaaatttcttttgttaatctgcaataactgtgctgcttctgcaaactgggctttccttttatttcttctggctttgctgataaattattgtctttttaaatcatcataagcaatttattggtatttttgggaaaaagtgagcttgagaaaaagataaaatgttgtcattactttatatacacaaacaaatatgcaacaacaaaaacaaacaatagatgtcatttctttgtttttaacaaaataggccacaataatattggtcctggtaataatactactacttactgagaagccaagctataataaaatagccacaactcttttacggatcataacagcaaaataatctctcactaatattggccacaataatattggtcatgataataatactactaactaagagccaagctatataatgaaatagccacaactctgttactgatctgatgatgattcagccagaagttctttggctggagaataaagtgcaacagcaccagactttatactcgagtatttcttgaacactgccttcagcttactttctgctgcacctgaatgaaagcccaccaacagctttgcacaatcactgttcaaataaacacaaaaacatcagatttaccattttgtattcagctaggtagttgaaggagaaaaaaaacaatgttcattttaattacatacatcagttgattttcagaatagccagtattatgctcaagagtttcagtccaagctggactcctcttaagtgtgcatcttgcagcataaacagctgaagcagcaatggttgaagcacaatgtgcaattacagcagagtagtgcataacaccaagttcagcaaagaaaaacaccatattctccaactgcatagtaaaaaaataaatcaaataatttctttattaaacttaatccagaattctagatttattataacaaggttctacctcctcatcaacattaggaactgaggctttgatgtatctaacaagaaagacatagggtgtgggaactgtcaagtaccatcccaacttaaccaagattgccttctccatcactaaaatctgttctttcacataggcattgtcagaaatgcaaacaaagtcattaacctgcaaattttagagcccaatatcagtaatcagtatagggaaattaaacaagggggaaaagccacaattgaaccaacagttgttgacgatggtctgacctctggtgcccaaatttcttcatatttgcttgctagaagcattgagctgatgccaaccaactgcaactccctcctaggaacgaccttcattgaaaggaatctgtctacaatgtttatggtaaggtagagggtctcaggcatgagttcaaatttgtgatgaacttcaattagccaatcaattaggattgatctcatcttagcgtttatatctggctgtaaacccatgtagtcattcaccttggtttcatcctgtaaaagagagcattagtttataaatattaccacaggtgaaagaaaaatatgcagaataaaaaataaaattgataaggatggactaacctcagattgcttgtaatagttatacaattcatcaatgtattcaactacagccaactcattatcaccatcttttgcatcaatattcactatctcacctttaggcttgttattaattccacaagccgcctgtatttattaacataattcaaattttgagtatttatttattatataagagaaataacatttaaaaaagaagtaaaataccttgcttcgagcactgagggtggaggtaaaagtcttctttattggaatcccttccttgaatcgtctgaccggtttgacaatttcatctccattcttttgttcaacctttttagtggcaacattttcttcaacgatgatgggtttctgtaaattaaaaatttcccaacattttattcaaaaaatcagaatttttttacgctaacagatgttttagacaagaatttttgcagaaaagacatatctaccttgttcttcttctctacttggtttttcccctctggagctctatctttgactaagttaccaatatctttaagaactttcctgtttcttccttcaagaggtacaatcttctgcttaattccctctagaaaaacattaaaaatcaaattagagaactcattacgaaaaattaagcagaaatcaaagaaatagattttagaacatgaaaaccccaattaataaagagagcagtagctttggtgtacctctttgaagttgttggtgaggcacaacaagagtagctttggtagccatatccgaatcttgatcttgaacgctgcttccgaaaactccgccgatgcttgaaaacaacgaagataggaacacctggagacgactgctgcctcctcctcctcctccttgtacgtcggtgttttcgatcgccaccttcggcccttggattatctcactcaacagcacactccctcccaaatcaatcctctttcttcttcttcacttatattttctcttactgtatttttcttcttcttcttgttcgatttctttggcggaatttgaattggaattttgcgaaatgtttgatttataagaagaagccgttggtgttggctttaccttgctgttgaagctgcccgaaacgatgcatctcccaacggtcgaatttttattgaattatggccgttgatgatgtttaatctaacggctttaaccctccttaggtgatttccttctttgggattttctagccgttgggtactggcttccgggacgagtcaaagcgctcccatccgtttataattgggccatgcaaccaattttctcttaaggcccaaacttgtttgttaggagatttaaaagaaccaattaaaaaaaattaggagtttttttttggtaaatatgaaaaaatgtagtagagtttacttttatatggcataaataaataatgtaaaaaaaaataaaattaaaaataattaaaattgtatacaaatccttcttgctttcattctctttctcttccatggcaaagaagaagaaagtgggtcgatagccgattactagagctacgattgggactccggtgaaacaattagaaatcgtgagcaatgctagaacatgtgaggaatttgaagcaacattgtatactgcggatctttgccctaatctaattgttgaggaggaagctcgaaatgaaatagtcactgaaatcagtaaaaagtcggagctgggctgaggaggtggaggagaaccattgttcgacagctcaaaaccactggaagaaattcacggaaggtaagagcctaaattttgatgctaaattgaattttactgaacctttagttagggatggtaggaaaattgctcagatagatttggaagaggtaaaattgaaggaagccaatgggaagtcggctgtaatatttatggtaatgggagtaatgtaccagcagttatttttgaaagggtttatacgtagaatctggggacatttgggtattatgcagattgctagaatgacaaaaggtcttattatagtcaagtttaatgatgaagcaactcgtgatgaggttcttgaaaacggagtgatacaattcgataggaaacctgttattattagaccttggacttcgaatttgaatgctattaaaatggtgaaatctatccctctttggatcagactccacaatctagggcttcaatatcgggggaaaaaagctttgagtgctcttaagggaagcctattatagttgataaacacacaaaggatcgtacaagggtgcaatttgctcgtgtgcttgtcgaaatggagatcacagacaaccctgatagatctttctggtttgtaaatgagtatggccaattggtggaacagggtatcgagtatgagtggctgcctgtaaaatgtaaataatgtggaggttttgagcacattatggctaattgtagaagggttgagaaacctactgaaacctcgacagtgaagatgatagtgaaggcaaagaaaggtaatactgctgatctgaaatctgcagggaatcaggttgtggaagaggttagtgtcactgactgagatatctaaggattagcagcttggttctcaaatagttactatgggaaattcagcaagcaatctaagtcctatctcaagtgattggcaatcacccaagtcaagaatttctaaaggagctgggtcaataaaaaggttaatgagtctcaagagcaagtgcttcgaaactctttcgaaattttaaataggaagcagggagatgaattaggagatgagggtccattacttgctttttgttgatggatttttacaacatgtgtagttggaatgtgaggggtttgaataagagggagaagcaagaatcggttctgatatttggaaacttaataaagtaagagttggtgctctcttagagactaaggttaaagggggaaaattacagaggatgatggctagtagttttactagtttggagttctatagtagttatgatattgaggggcatattttggttctttggagaaagaactatgctcaggtggaagttatggaggagtccaaataacatgttcattgtcatattaaaatgatagggcaaaaaataaattattatgctactttcatctatggagcaaacactatagatgatagatgtgatctttggtctgccttatccatgatcaatgaaactaaggcgtggattattcttggagacttcaatggtgtgcttcaccatgatgataggctaggggaatcctattagtgctactgatcttgctgattctacaagttgggttgctctagcttttgttgggccaatgaaatgaactggttcttcatttacttagactaacaagcaagatgccataattttttctcgtattgatcatgtttttcacaatgagacttggatggatgattttctaaatacctcagctcatttctcgtagaaaacttgttcaggccattacttttgcattgtccactcagttgttacagagaatattggttacaaaccgtttcgattctttaatttttgggctgaccactttgagtataagcaggttgttctcgaaagttggtgcaaacctttgaattttcatgggttaaaagggatttatctcaagatcacgaggctcaaacataaactcacgactttcaatagtcaatcaattgaaaatataggagaaacctatgagaaagctaaagatcgatttaaagaagcttagctcttttgccaagctcatcccctatatagacctcttcttaatagagagcacaatgcgacagttcatttccacaatcaagaaaagatgtacttgaatttcctaagtcaaagaagtaaaataaaatggatccaaaagtggggtagcaacacagtctttttccatgccatgttaaagaagagaaaggatgataataatattgtttcttttgttactgatcagggcactttgaatgatcactttccagatgttgtctaattttttcttgatcacttccggagcattatgggcagagctagagcaacttccttagattcaacagaattgcattgctatgggccccaaacttaaccttgaccaacatgtatatttattaaaacctttctctcttaaagaagttagggatgcggtgtttagtattcctagtactaaatctccaggtcctgatggatttgattctggtttttttaaatctatttggtttgaggtggggaaagatatagacaaagttatttctcatttcttttaatccaatctgtgacctgctgaacttcacaacacgaccctatctttaatactaaaaatagatttccattcacaagctatagattatcagcccattgcttgatgttcaactctttacaagtgtgcctctaaactcttgtgttcttgattgaataaagtcctcccgcgtttagtggatcagaaccagggtgcatttgtaaagggtcggtctattgcctacaacatactaattcttcaggacatatagaaggactataaaaggaagaattgctctgcgaggtgtaccattaaaattgacattagcaaagcttatgatacgatcaattgggatttccttgaaaagttattggtggcttattgtttccctgcaaagtttattagttggataatgaattgtgtgagaaatacgtcttattccttacaaatgaatggaaggtttcagggttctttcaaaggtgagcaggggttaaggcaaggggacccaatttctccccttatatttgtgcttatataagtaatgaaaaataaagctgtttctttattgataattgaatagaaaaaattacattgaaatagattttaatttagggcacaaagcccaacacactttacttcttctttggcattgaagttgtaaggaatgaaactggagtttaccttactcaaacaaagtagaaaaataatttgtagcacctaaatctctgtccaactctagtagcaactagcatcactgtctctttctgatgtcaaatagatggataatcttacagtatatagaagccttattggagctctgtagtacttgaatcacacaaggcctgatatcagctatgctgttaattctcttagtcaattccataaagctccaacatctttacattggagtgcaactaaaagaatcttaaggtacttaaaaagaaccaacacaaaagggcttcatctctactgcagtgacaaacttaatctcactgggttttcaaatgcatattatgttggaaattatttta

SEQ ID NO: 297904 - DNA, 1516 bp, Cannabis indica
acaaatcaaattgtattgaaatgagttttatttagggtataaaatcccaacactaagaaagttacgtctaaaagatattgagtagtataattgtttgtaatagcaaaattgtattgtacatattagaccattatagccttcattgaaggtgcctataatttgtaattgatgttggagcaataaatagaactgccaaaaataaatagaccaccaaaactaccttaaatatgtacaaatatagtaaaagtaattctacttgcattttatatctaaaacaatttttttatacatattaatattgatggtgcaattcatctcggaagatcttttcctcttgatcaacttcatcatgtgaagtgtcccattcattgtggctttagcagtcaaagtcaaatatctagattccatgtcatcaacataaatagaatttgttgcccccatttcagctaagaaactaatcttcttggttgaccgagctttgacttttcctttctcgaccaaggcatcgccattaactagggcaacatgagttcccctgttgaaaaagctaactgaggtcctttcgaaatcgaaatcgccaaagttggaactctttatgctaatttcagctttgaatttcatatcaatggtgttgtttaagctattcatactgagctcatcaataatgattgatcgaatccgaaactttggactgttgatatgaaatattgctactgaaaacaccaaaatcgccacagttaggataaatacgattactgccaccaaatacaattgtctcatgtttttcttgtattccaactccttagaataatcacgatcggactctatcgaagttgtgtcttcatcaaattcatcatcatcatcttgggaatgaacttgttgatttttggcagccatatttgcatgcatggatatggatttaactataacactctttgattttgagtatagaattagtataaagtactctatatggcgtttatatagagagaagatttcacgtaaagaaaaagtattaaggtttaattatcacagtagagatggcccgttactatttataggctaattaatggaacgcgcattataatatttataaatataatattaagccaaatttgagatggaaagtaaaatattaattactagattgtgcaagtgcatgcataagggggtttcaaccaacgactagtcaagtgtatatcttcaatgagcattaggtaattgtacgtgtagatttagtcaaatgaaaatcatatgtataatacaatcattatatttaatgtagctgaaaagtaatggaagcttgacctagtaatttctcatgtaaaaaaaaaaagaagatcatatttgaggaacacgtaaatgaatttattgtaataatactcattgtaataaccttcaaaaatatttttaattatgttataacaaataatcactacaaaaactattacttttagtgataactttttaatcgtaacatatattttttgtgactaaatataacttttagtcacaa

SEQ ID NO: 297905 - DNA, 4850 bp, Cannabis indica
ttttttaaaaaagaaaaacttaattgttaataaattaaaattctaagaatttaattgcaagtattaaaacgttttaaggataaaatcataagatattaatagtccaaggactaataatgcaaaattaattttatatatttatattttttaattaattaaaatcaaagcgaatgagagggagctttagttcactatcacgtgtcccacccaccccaacggttcttactctgtctcactcttttcttaacgattcaaacgcatccactaaaaatgcgccacgtgtaacatctaccgttattattgctcctgttctctcaccggcccatgatccaaaactcggacccaaaagttttgggccttcggcctgatacctctggagcccattttttgggcttagggcttcgatgtgtccaaaaaatgaaaaaattcagatgcggctggctgcgattagggtttggagaagaggaaattccggtcgatctcggaatcggagaacggtgtttgttttcagatccgtatgctgaaacgcttgatttgatgttgaaaatcctaatctgtatctggaaagatcagattttgggtttttgtttgggtagatcgaattggatctgtagagatggagagtgagttgaaactgaggataacgatgaagatctctttggtaattatcctcatgttatacgatctgatactattgatggttgtaaatgaaggattcgcctaaaaaagaatatagacttgattgttgacttggtcgttttcaagtttccagtctgaggtaattaaagctttaattttttcccctttttcttccgtaatttcctttttcgtatttgattgttgagcctttgagatttgagcttcgaagatgtttatttttgggtcatttttctcattattatgctattattatgaaggttaaaaagtgataataattcagctgaatttggatctgtagcatagatcaaagccatgtataatagtggtgtattatatgtatttgaagttaaacatggatgatcagcagctgatggatcttgggtttttggaggtattatgcttcataattcatatttagtattatactcatcaatatttttaattatatattatgagatgtgcatttttgactgtaactgctgatataaacacttcaaatatatatttttgtagacaaaaatttcatgcttggagatttgggatgaggtaaagtaacagatcttgatccttgttttcattatttatgatacaaagtagggttcttgttgcagttcatatattcttgtgttgtttttgtttacacattcatattagtggcatagtttgaatagaacgtttatgcttatcattgagctctatttggtgtgattaaacatttggaacaaaactcacagatagaaagaaaaataagaatcattgagtctgattcacccttttttttggttggatatttttctccctttttggatgagcaatttaggtagtgggaaattagttgcttttgcttaataatcacagccgttctgtcgtgctgtctgggttgttattcaggtttttgaatgaggaaactttattcttcaatgagattaacaaaaggcagtttaagttagctagagattgcaccaatttctgtaagtcgattattgacttaaaaaatttattaagcactaacatattctgatcagcatatactgtgcaagcctgattgttttaaccctgaatagcctttgtcgagactttatggcttttcagtcagtcaattcactctttttaaataaaaaatggctttgcttcaacttctattttgatgcatctaatactttctaaagaaaagttgtttaagggctctgttctggccttttttactatgaaagatctttgggttctttcatgattttcacgctaacggaaaagttgttgataaacaatttagtcagctcttcttcgtaagatgagattggcttcgaaggcagttgttgaaactgttaggaattttgcagtacttggacactcaatttcatttggatttgagatatgaaaattagaacctcaaataaagttaattaatatgatttagccaccacctgagatagaaccacaccaaaaaagcaccaaaaacaatagaacaataactagaaaagaatagaaacacaccagcagaaaactaaaccgtaacagccatggttcttgattgtatttctcaaagatgaaagcaataacagatagagaagacagtggtcctttcagaccttgatgtagagagaaaaatatcaattcttacataacctttcccgctaaaactagctatatgcctttccaaccactcaacaattacgaaaaggccctcacacacatctctttgccctttacatattggttcccttattgctcttggcccttctaaagcataagtaaacctgataggaggtttaacaattcccccttcccctcggggaaaaaaaaaatccttaacctggtcgtcaaggttagaagaaggaaattttgtgtggacactctcaaattgttcccaagtcgcttcaaaatttggcgggtcctggcactgaatcagcacccccactcctcctgtagtaccttccttagagtgactcacatccagcaaagccgttagggtcacttgcaactcaaggtcagtactgagttgatgaggcagtgttggagaggaatgagccatgcctcaggctgctcgaagttgtgacacatgaaacaccgggtggagaaccaaggtaggggcaactgataagccattttgccaatctggcagagtaccttaaagggcctataaaaacgagcagccaacttctcgtttttacgacgagcaagggtcttttgtcgataagggcaacttgacaaaaaccaagtcaccttcttggaactccacatgaccggcgagaagaatcaacaatgtttttcattttttgctgggcacgcaacaagtgcatcttcaaatcatcgagaaaggcatcttgatcctctaaaagttaatccattgctactactgtctagacctagtagtgtagcgaacaagagcaaggggatcatgaccataaagcaccttggaaggtgaacaacccaaagaggtgtggagagaagtgctgtgccaatattcaacccacgacagccacttagaccacactttaggtttctctgaagcaaagcaacaaacataagtttccaagcaatgattgactacctcgatgtgtccattggtttctagatgatacaccgtgctatgctcgagttctatcccttggagttgaaacagttcagcccaagaatgactgaggaacacacggtcgcgttctgaaataatggtgcggggctccctatggagctttaccacaagttggaaaaaggcttcagccatagttttagctgtgaatggatgccgaagtggaataaaatggctgtatttactcaaacaatccattaccacaagtatagtgtcgacctcttttgattttggtaaccctttgtaataccctatcccatagggacgccgtgtgtgcgcgcttttaaattagtttataataataaaccaactgtatataaaagaaagtgtgacttattaaaaattcttatttactatgtatataattcggctaaacaacttttaggttcgggattcccttaattacaaaatagttccataatatctttacatcaagatatttaattcaaaagtgccattaaatttctcttgacaacttcggtgaaactagctggaagagttgatatgtacacttgccagagaagatctaggtctcatggttgtcctattatgcctttccctttacttgcaccatatagcacctgtgagtcacaaaaactcaacaagaaaagtagtatcacaataattatataacattaaataatctttcagatatctcatgataatgattatttgcgtaatgagacaaagcatttcattacttaataaagtaaccattactctcagttgtccaataaaacaacctttaatccgttgcctaatgagacaacttttttaccctacaacgagttttcggagagtaaaactcttccgcacatagtaccatacaatgagttctacagagtaataactcttccgaacataccaccctacaatgggttttggagagtaataactcttccgcacataccaccctacaatgggttttggagagtaataactcttccgcacataccaccctacaacgggttctggagagtaataactcttctgcacataccaccctacaacagtttttggagagtaataactcttctgcacatacgataataaccgtatcacctttaatgtattcaaaggggtacaactgtacttttcttatctcaagtccaatttcaagtcttctagctaacgaaaatgggaaacccttgatgatccgggccctatgtcacaatagtaatgatgggtaaataattcaatcaaattcgcgttaagacttaaaacaaaactgagtaaacccatccgaaaatcttatacggaaatccttgcttggagacatatccagaagctcatgttcggaagtcctcccttttggaatcttccttcccggaacctcacaaccgggtttccccaaactattccctaatgacacgcatctgggatctcgcagattcaatttctaccggctaagccacaactaaccggacaatctattatctggtactaataactcgaagcctgttcgcaattagtatctggaactaggactgtacgtcggtcggtttatactacatattttttaacccaacgtaaagatcgggttgcaaaattctacgtccaacctgcccaatttaaaaaaaaaaatttaacccgaccgacg

SEQ ID NO: 297906 - DNA, 978 bp, Cannabis indica
agaattctaacaatctcaatagtttagaaaaaattattagtagcctaaaaaagtttagaggaattatgtagtatatgtaaaagtcacttaactgactctgcattttgttttgaacagagaattcaaagacgatgactgatgtgaagtgtgaagtcccttgtaagaagctattttcggctatttattgtgacaacaattgagaatatcgagcaagtttttgcattactcttattctacacttgtttataattatatgtgtttctttgcctctgttttttctggatgttttcctgtctttttgtcaaagttttgtttatgtttttcttaaaaaagaaaaatataatcttggctgttcttcatgaagtgctaattataaaccaatggcttacagcaacactccactctattttatatgttgaacccacaccctaaatgatcttttcaactccacaaataacacaacacacacatacactaatacaccacacaacacatattgtcttagagctaggatactaaaatctcaaaaataaaaaatagtaaaaattagatacaaaattgctttaataaaactctaaatgtcatcttaatatatgtggagtttgtagtgtcacactaaaaatagtaggacactataaaccacactaattttttttttttagtttttaatattaaaattatgtatttatgattaaatttttatatttatataaatattctaatatgagatagtttaataaaataatataataataaaaatatttttaatctaaattttatattgtagttggaataaaaaaatttagagctaaaattatacttttgatgatattttgtatactatagttaaattttaattattggagttgcccttacaaaataaatattctatttattctttgtcaaaaactaaaacaattcttatattattttattaaatttgaatacaaatagtataatatagattgctttttcaag

SEQ ID NO: 297907 - DNA, 2432 bp, Cannabis indica
tcttggaacaattatgctggggacttcttttactctgttaattctatgttttgaacaggcattttgtgtttgtgactgatttaatggtatgcttttgcgcctattgcttgacgtgcaagcctttcttttaattgttctcttggggataataaatgttagctatttccttaaaatttggatgtatgatgtatctacgcaaatacatggatgtattatgtatcaggttcagaaacaaagggagtacaggcagaagataatatcaaattatcaggtatgtggcactgtaaatgtttgcttaagttcgtgtgtggtaaacccgaagttgtatactaaaagtacagctaaaaaagagaataaaaagacgaataatgtttatttttcttgcttgtttctatcggccttcagatgaattgactaatattgatgctgtttaattttaatatatttatctttttcagccattacataaagaaatatacacaatgcatcctgcaagcacatttgttccatcgtttctaaaagcaataagtgataatactgaggaaagctttagaagtattatgtctgaaccctctcaaggtgtttttacatttcagatgcttcagtctggcttctgcgaactgctgttatctgaggtatttgcttgccttttatttttggtggtgggaagattagtgaattatatgttgaattgtgctaagtccttttaaatggagcaatatgccttctagaatatgttcattgtgtctaatttccctgcttgatagtcaatgattaaagaagtgatggaaataatcacatcagggaaattgggagaggggatttttctctacttttttctttagatttcatctattatgtttgaacttcaggttgataattttgaaaagtgggttactgatgtaaagtttcgaatcatgagacctaacacaatgaataagtatggtgctgttcttgatgattttggccttgaaaccatgcttgacaagcttatggagagttttattcgtcccatatcgaaaggtgaaaatgattactaataatgtatctgccttttgcccctatcattttcattagtaccatggccatatattcaagccttaatttgttgctgtatttcttcatgcagtgttctttcctgaagttggtggagcaaccttagattctcatcatggttttgttgttgaatatggtaaagatagggatgttgacttgggtaagtattcgtattagtcaatgtatatgatattattttgctagtctatagaattgcaaatttgttctgttgttttgtttgagaagaaattgagtaatttaaattttttcatgtttttgtaggttttcatgtagatgactcagaagtgactttaaatgtgtgcttgggtaagcagttttctggaggagaattgtattttcgaggcacacgatgtgataaacatgtaaatactggaagtcaacctgaggtatgtagtcagtctttgagctggaaacgacaaatatatgtttcatccttgtactattatgaatgatgggcaactctaaaggttgttaatgtttcttattgaagcaggagatctttgattattcccatgtcccaggccaagctgtacttcatcgtggacgtcaccgccatggtgctagagccacaacctcaggccatcgaatcaacttacttctatggtgtagaaggtacacatttcttctgtccttcaacaagcaactgatgagacctgctaccaaacaaccaaatcagcaacaaaatattccaaacagtaaccaaaaccacaacaagcaatagaatagtaactgtagaattaataggaaaatttgggaagctttattgaattaagaaaataaaggacacttgagacaatgtctcttacaatggtagagagcaaaagttctccttttatgcaaagagttttattcaatacattgcatacccattctatccttgcttacctatatatagaacctagtctcactcacaaaccaatcctaaatacaatgactcaaatacccttgttatttattatatgcaagcacaccatactaattctagggcctaacattaccagctactcaaggttcaccttgtcctcaaggtgattgatggcaccaagctctaaattcgaataagctcgtcttctgtcaaacaaccattgaagtggaggagtcccaattgaagggtaccaaggatagaacaaggccaattgagtgatttcttgggatggtcacacaagctacaaaagaacagtcatcgctcaatgagtcgatctctatcgaaaaaccagtccatcaatgtaattcgcatagccaccggctcatagacaatggttttggtccaccaaagaactttgaaaatttaagagcatgtttggtattgttttttgttttttgtttcaaaaaaattgtttttagaaatgagaaca

SEQ ID NO: 297908 - DNA, 3754 bp, Cannabis indica
tttttttttttttttaaagttcatggtgctaaaattgaaccagatgggaactttatttcttatttttcttttaatttaatttgatagagctataaagattctggacgttcaaagcgattaaaggatgactcattgcttttgatgagagggtttgactcggttgctcacactctgtctcaactatctaaccatttggacaatgctcttcaggttgggatttaatttttggtggtgccatcattttggtacattatatttatttaattgaagttcaatcatgtatatataaggaactaatgaaaaagttcttctttcttctttctacagggagctaatgatcttgctaaaccacccaccttaacagaaatatttcacagtagcttaaaggagtcagccagtaacaaagatgaagttgtaggaaaacaagaaaatgagttagatcccaacaaaggattgaaaagaaaatacgaaaccagccattgctcagaggatcaagaagaggggccaagagatgaaaaggagcaggatccgaaagatggaaagctgaataaagccaaaaatgttgggtcttgtatctctttatttatatatgttcaaatgttgggccaacagattttatcgaagctaaaattggttgttatttgttgtaaccttgttaacagctagcagttaccatggcaacaaagcagcttcacttgcgagggaaatgaagttaataaaatcagatttatgtttcatgcaagagcggtgctcgctgctggaagaggagaacagaagactaagagatggatttgccaaagggataagacctgacgaagatgatctggtataatgattacttatgttaatgtttgaaaagaatatataatatcattatggttacttattgtttaacaaaaaatggtgatttgggtttggtaggtgagacttcaattggagacattgctagctgaaaaatccagattggcaaatgaaaatgcaaatcttgtaagggaaaaccaatgcctgaatcagcttgtggagtaccaccaactggcttctgaagatttttcttcatatgaacaagttgtacaaggaatgtgcttagacttctcgtctccgccccggctcgtgccaggagatcatgagcagtcaactgatgaggatcatggcgattcagaatgcttccaaacacctgccggtaaacattttggcttcgccacccctgatctcgatgagtgtgaaaaccacactgaaggggcagcagcaacagtaccgtaattgaattggttgacattttgagttgtgaatgctgtaatggggttcatctttttgcaaaaaattttcactgggttcggaaataaatgctacaatgtaaattttcttctatatagttcatatgagatagtaggccacttttcaatttcaagcaatgaagctaataaatttatccccaaagttggggttaggttaattaattctcttcacagagacaaataaacaaacacattatcgacaatacaaaattacacccaaatcgagaatcatcgtcgatctccactaccgtcgcgttccttctcaaccagttgcttctgcttctcaacgagtttatctatagccgactgtacagcatcacggccgccgatgagcaaccgggtcacaatttcgggatccgtttcgaagcgggcgagctcgaattccctccgggcgttctctctgaggacatcgcgccacagaacgcccttggagtcgggccacatgaaaaatcgggtagttcggaggatgtctcggtagagactgagtgcctctcggcgcgtgctggtcaatcgcctccgcctcaagagctcgtcttcttcttcgtcgtggagatgggatttgtctttcttcactacatgtcggtctatgagctcctccagcgtgtcgggtccttcgtgcaaaagacgacgggtaaggttagatacgacggcgttttggggaataagctttaaagggaggcgtagcttcgtgctcatattttccacttcgatcgattttgcaaaggaaaggattgtgttggtcaggtggggaggaggactctagtctagatctcaattgtgggtcataaacttgggctgtttagctgcatataaatcaaccacacatataccacatttcttgtggaaattacaacattacatatggtaatatgttatttttgttgtaggattcatttgtaattttcttaaaaaacattttctatttcaatttatgttattttcttgaatttttttaggttattaaaaattttcttgaactattgagattgttagatttaaagacttttatctaattttactaaagtaaatctaacgtagatcactcaaaaaaaaaaagaaaaaagtctaacgtagatgaacttttaggaagcacaattcggtacatattaaaatttggagcacaatttagtatatggacaattaccatattagcaaaattgaataattagataaaaaattttaaatctagcaatctcaatagtttaaatgagatttttaacgacctaaaaagttcaggggcataatctagtatatgtctaagttcagaggacaaaaatcttgataaatcttctgattatataaaataaaaaaaactgtgcgcctcatcacgagattactactaagagtgtgtataaattgatccaatccaataacaactaactgatccaataataattaactgccaaaaattaaatatccaattgtgatcagatcagattaaatgttattttttaatatccattagatcagatcagatgttagatagatagagcgtctaagaattcaatacatctaaaatttaatcaaactaattaatattattatttagtttgtataaataattaaattttatattgtcattcgtaaaatttatatgcatatacaaaaattaatattaaaatgttatatatttttttattaaataatagacttaaaaaaagtttaaatattagatatattcgatccgattcaaaaaaatattaagtctaaaatattcgataacgttgaattaaattactaactatttacggaatacatccaataaataaaatcgatgcaatataatattattcaattatatcagatggattaaataattaaaattaattagattagatcctataataaaatttaggctaattaataatttttttcctgaacttggacatgtagtaaattgtgccacctgaacttttttggccgttaaaaattcgcccgaactattgagattgttaaatttaagaacttttaactagtttcattcaattttactgtttcaatgattgtttatttactaaaccatgctccttagactttgatatctaccaaatcatgcctcttaaactttgatatgtactaaatcatgccccttgaactttcattcatattagaatttttttactaatgaatttttaacggtaagagcacgatttattacatagttcagagaaaaaaattactaacgaggctaaaatttaaccactaatatataattagttttgaagtaaataatcaagtctcatatatccttgataggagagaaaacatatgaactaaaataaaaattgtactgattctatataagagtcatgtctcttgacatgtttgttgtctctctacattagagtgattctcaatttttgtgtaactgtttattggtgattgtttgattgatcttctctgtaatggcttcatctagtggagtgaacaaggatatggaacaaaaatggaaaaatata

SEQ ID NO: 297909 - DNA, 1979 bp, Cannabis indica
tctataccatagagttatcagctagccaccgctattgtccttattgttctacttcttttcttatcagaagaaagagagttggattttgcttcaatgatatttgatttccctttcttggatttatctttgttaaggctttcaaacatagtcaacttattcaattattgagtcagttgaactatagtttgttcatcacacattttggtgaacactttgaagaaatgagagagtgactcaagaataatgctcacttgagtcctcttgtctacgatagatccatgtgtctccacctcatgtattagcccaatcatgtgcaatgcatgaaatttgatagagacactactcagtaaggaaaatttttgtggttctcacaaaccaacatcatattcagattaaatttctatttaaggaaatattcaccattcaatttttgtaatcgctagtaaagtaataaggaaattttggcatggtagacatttttaaaaataacataatgattatacttaaataataaatatcacttcaaaattttggccaaatatttattgttgtgtcttttgtaacaatatcatttttgttgtagatgcacaatagaagtaaaaatttgaaaattataccacaatttacttgaaataatcttcgtgtctttgagttgtgttgggaaattgtagatttctaacacatggttattataccttgtcatttctggctctccatatagtatcaactacgatagacacatataaaaataccttatcaacattcacgtctctcacatacaaattctgaaagaatttgatcttgtcccacaacctagtccctgattcatgtacagtaatgaaatcccaaggagaaactctccgtagatgagaagccatgttccaatgaagaaaaatatgctctattatttcttcctctcacccataaatcgggaaagaagtcttcaatgttcattcattatctaagaatggatcgaatagcaagcgaattagatagaatgatccaccaaagcactttatgtcgttcatacgctttgctattccaaagctttttccacaaagaaggagcgacgtgacagtgttggtcttttttcaaatccaacaaaaggtaagctaatttggtggagaattttcctttcggcttcttagtccgaattcagtaatttatcccttgctttggttgctttttccctttcaaaacaactcatactagggttgaacatcgagcgaattgactgaattttgggttgggggttttgggtccaaaaaagagaactcaaatctgcctgttcaagtgttttgagttcacaagctttggacttgcgagtttgggttggccgggttgacgagttcggtcaaaccttttttttacctgcttgttggttggctgctgctgctgttattcgccatgtggtggtggactgacgagactggaattgggggtgaggaggatagctctgtcagcgatgactgagagagaagaagagatctcagtctgtgaggactgggtcgtctttgttgaggaggaggccgaatcttcagctctccagacaaggccaaaccatgagatgagggtgggtgggtggtggtctagtttagtggctgattggttgggagggagagggtcgggtcgggtcgggggttgtggaggagatgtgtttcttttaggttttttaggttttaacttttaagtttcaggaaagtaaaaaaaaaacgggggcttttttcataaatgtacaacaaaaacaacataattacaaaaaatgtgaaaaaaaaaattattttaaaaacttatatattttgaaaacttattacatgaaaccatacattttaatcattaaataataaactatgtttattaaaactcaaaataaataatttcgtaaaattaattaaacagttttataaaaataaacaagttaatttttttaattaaaagataaatatttattatctattttagtatgaattattataatt

SEQ ID NO: 297910 - DNA, 4769 bp, Cannabis indica
cctaacactattttgaattgtaccaagcacactctaatttaaatattttgaatggttctttaaaactgtgtacaatgttttcttcacacgaaaccaaaagggccgcctagagggctacccaaaaaagaacaatgacgtatgcaacaacatattacaccatactgtaaattccactttaaataaatgttagtaagggaaaattactctgcatatttagatgcagatatcattactgttaagaaaccgcaaagagcaaagaaccagccaatgcatttcatttcagccttttttaggcatggctgcgagccttgtgtacattctagccattgattggtatcctctgatatcaccagatcgcagaagattacctgtacacgttaaaactacagagctaagtagcaaacctatctaaggtttcaaaaacatgctttctttaggaaataggaatgtttagaaaaagtttgtaatcagaggtagcatgatttctttaggaaatgctaatacacaagattatactagataggttacagacaaatctataaagaaggttaaaacatttagctaaatcctttgacttcacttttgaaatgtgaggtgatgggtccaactccatgggtgcaaaagacaaaagcagtaaaactaacgaccccattaaagtttagcaactcggaatattattctgctttgcttcaacctggcttttattctataatacattcataactgatacaccaaagacttttagatataagacaatttagatggagaactagcttacctgaatcacagttgaggggactatcaggctccggatgtgccatcaaagcaataatagctctgcaaacagattggagtgtccaagccgggctccatgcattcttcaagatatcaaggcaaatctctcccgtctacaaaagaaaaacaaaattaaaaaagaacactaccaggaagctatttaaagatgcacatagtatacacttttaaagatttcattaacatttgatgctccaattaaagattgaccttattcaagcacaatggtcactttataaaatgaaaatttaaatagactaacaaatccccctcataggcttcgaaatttgatttgccgccagaagtcccgtgagttgtggttgaggaacggggaaagtaataccaatttcttccatgcttctgctgttatcaaacgacaaaaaactttatgggagtggtgacgaataatgggatggattggataaggggtcgtgtgaatgtggaacactattttcagtctagattcatggaggtcttcttcacaactacttcagatttggatcccgacctgtttgacttggttaccccaatgttaacgcggcaggagaatgtggatcttgtcaaggtgacgtcacatgatgagattaaagaggcaatccagactttaaaccaaacttcgcttgtgctcattccaaagaggaagagggctcaatgttttgatgattactgctcgattagtttatgcaacattgttataaagtgatctctaaacttttagcaaactgcttgaagaaaatctttcctaagttcatttctcctcatcattttgtccctatcattgggtccctaggagatagatagtggaaagtgggatcatgacgcatgaaattctagattcctttaaaaagaaatagagaagagttgcgtggactggtttgaagcttgatatgtccaaggcctttgatcgagtggagtgggatttcttggatagggaccccctcagcctttgggtttgatgaaccattttgataattgatccttaaatgtgtgacgggcttggtgcgtgtaaatggctgccctcttaaacagtttcaaccggaagaggtcttaaaaggagattcgttgtcgccatacttatttattacttgaagtgaaattctctcaagacttcttttgctggcgaaaatgagaggcaaaattcatggggtcaaagtatgaagctaagatcggcctacatctcacttgatgtatgctgataatctttcattttttgcaaggataatttatatgagattagggcagtccaaaagtgtgttaatacctcctgtttaaggtggggtcaattactcaacattgctaaatttgcctttgttttctccaagtcctcccctctaggggttcgagagcatatcaagagcatgcagagttttagggagaagaaaaggcatgataggttcttaggtaatcctattctcttcttcggaagtaagaagaatttcatgtacattaaagaaaatctagagacccagttagaagggtggcaatccaaactcttaccccaacgtactcaatgtctactcatttgatcccaaaaagtattttccttgagatggacaagatggtgcacaaattttggtggttgggagtgtcgtataagaatagatatcttgccattgctttttgggattctttgtgttcccaaagactggggggtcttatttcaaacgacttgaagatattaatcttgccttaatctccaagttgggttggaaacttgcaagtggggataggacttttgtggtgtcaattattttgaggaaagtgtttcaaaagggatagctcctttcggtcaatcccttggtattttagcctcctttggtgctaaggatattttatcctctagagatctcatatggaatgaacatgttacttggtaatggaaaatcgatggatctttggcacttgctttggatattgtggttggagtgggctctctatgggaaaccttcaatccaagagtggaacttagtaaatgttattttgcaaactatcttcgagataagaatggggatggaactttagtcatttggggagaaggtttcttcctagattggtggggaaaattgatcttactgttagattgttattgaaggttgttgttgaattcgaaagatgagttaatttggaaagattaagcctctttttttcgttgtctggtgttttaagttgtatcactaatgtggaattatgctggatttctaggactttgaactgtgtggcttatgaccttgctacctgggcagatctcataattcggtttggatcattggagtttggggaggtggaaccctttgttcccaccacgaactttgttttttatgtatattctccgttgatgaagttttcttctctatcaaaaaaataaataaaaaatcagcccctcgaccttgtggcctcccctcaaacttccaagcaattccaagataatctaacatctttatacactccacttagccctatcacacactcaagacttcttaaatgagtagatatcactacattagttatattctgtcaaaattatttcaacagttttgaggatatcaacataagagaaagttcaaaacttccactcaacaaacaaaaagatatatcctagagtttcacagcatttgtttacacacatcttttggtgagattccatatgttaatcttaccaagtagtaacataggaattccataagtcaactgaaaccgcataaaacatatactagtaatgagcattaacacttgccatttctcaatgttatcattttctttcaaaataatgcactaattggatcaactttttttaaaaaataaaaaaaagtaatcgtgaaaacaaccataccttgaagtgaacattaggatgaaaaattttcgttaagaacctcacttgaggaggttgtaaaggatactgctcagggactgcaaaagcaagttgaaatataccaccttcaaatggagtctctgagggtccctgaatcaaaagcgaacatttataaagacatagattatatatccaagcaggaaacatagcataacctttctgtaataattgagcctaccttgacaagggcagtccacttaaatatgttattatcatcacaagaaagttgaatatctggatcagccactttctctcgttgcacctctttgaattccttgaatagccttgctctcgatgccttaacagaaaatagttcagcttaccatccaaaaaattggatactcatatggcccattaagctatagagcactttgctatgaatatataagaaaggctaaagaaaaataataataaaaatgaagagataatccatagtcagtagctaacctgcattgttttgctgcttgataacttcactaagcttcacggcaacaaacttgaatgtcgcaaaaactgtaaattcaacaatcatcattttccttcactttgctactctttcttgctaaccaaacacccttataaaaaggcatcaaattataatttaaccctaatctcaaatcttcccacactttccatgactttctctccaaccaaacaactcaacaaaactcatacaaacaacaaaataatttcaaaaataaatccagatctgatctcacccacatcacatccaaacataacattaacaatcaaacttactcctaatctagatctgaaatcaatcaaatatagcaaaatatcaaatctaacattaacaaaatcaaaaccccacatctgatttaatcaatttatttttatagtattaaagtttctcatttgtaacttttagctgttgtagtattattctgtgttatagtaccaaataccaatatcagaacatgaaaatatgagatatgcgttagaataaatattgagtttttgtttcattttatcagtaattttatacgttaatggtcagtttgacacaattctggtacattactacttaagttttgaagtgtgagctctttactgtaatggaagctaa

SEQ ID NO: 297911 - DNA, 3248 bp, Cannabis indica
gtagaaaaataatcatccgattgtttttctttctttctttctttctttctttctttcttttttcattttatgatacaacagggattagaaccccttacacttcccaaacacacaaacattcccatccaattgagctagccccatgtggcggaaaaataatcatgcaattaagtctataggcacatcaaaactagtatgtctattgatcttccattttaagtggaatccacgatcaaaatatgatcacttggtacaagctatattttaatccagtcatgtattcaactcaaatatgctttcgcagaaatgtacaactgcaaatactttccgcaaaccttcatcccaaatacaatcataaaatgatgtatgtctgctcaataactttaagggaaaaaagataaacaggggaacaaaatagaaataaaatgaaagttcctacaattgggatgcatgttgtacaagttcacttattaactagtcataaaagattttacccatgtgccatacacagtccacggattgaaatgtcatgagaagtgtagaaatattgatttagtattctttcttcagttctttcagcaattggaagaaggctgaaaatcgcacctccatgattgttattcactagcaccgtcattggtttccgtgatgtcctgcatacattgtaaattattattgaatttacaagatagtatgttgaatttcttattaatggatagatgcaatataaataagttgaacatcgaatggataacaaaattaaaggataaatataatgatgaaaactttacaaagtcacattttcatttcaatatatagaagataataagaggttaaaagggaaatttatcaaaacataaattacaataacacagataagaatcaagataactacctttgcttcaaaagtgccaagccattggtatcatgaagaaaagaaacatctccaattacacaaatgacctgaacaataacacagaaatatgaaacgctgtctataaagaagccatgtaataacaactaactgatttcccagataattttctcattatcattctccactaaggtagcaatgggttggacaccctaattccagtaatcagtgccctacacagtcatgacattcattttacaaatacgatacacaaggaacttacccgtttgttgcatcctactgcaaagccaacagctgtactgaccaacccatcaataccacttgctcctctgttcccaacaacccaaaccaattgacaaagtgcgccagagtttaaaaccatagctgaagtgctgtcacaacttgaccagccatgaccatacatgtctgcatcacgtattgccatgctatttccgatgaaaagagctgtatcactagaaagttctgatgaaattacttgtgcaacttgaggctcagtcaaggagtactcagcagagatttgaaatgacaactccctggctacctacaaaatagggaaaagaacttacgaaggaacatatataatccccaaaagaatagcttacatttgtatagaattttacattgtgatctccacttttaacgtttctaatctttttagaaagaacatgttggaagaaaaggaccgtagagttttaacttttacattatatgtctcaaacttatgtccagaaggaactgatgaaccaggatattatatcaaaccaaaaagaataaaacaaacccagtagtgtgtacagcttaggtgattaccatcagattcactgtgtgtagataagagctccatttgtttctcttttgcagaaattcaacttgcattatataattagcaaacttgataatgctactttgtatcctatgtgttacaatatgagaaggatcatagcggaatggatgattgtccaccatgatatatgagcaaggagagcagttctctaacatctttgaaacacgcttgcttgtaatcctactcccaatctgatcatgatacatgttaagaaggcagttaatcaacacagaaaaataaataaataatatgcaactaccataacatctatgaaccacaaagaagcctattctaagatttatataaatagaatggctttaaaagattactcatatgtggactataatgtgttctattttctgaagggtaaagagatgcgggtgtattaattttttattattaaatgagtcaatttttggactatgcatttttgacagtgattaccaaaaaaaaaacccagagtatcaagaagatgatatacctgaataatcacatcaacatgcatccagtcattaacggcatctgataacaaagaatggtcaagatgatcaatgaataatatgttaggtttaatttcaggaaaagatgtcaaaagttttctcaaccgtaaccctgacaaaatatcagctacaacaggccatgaaaggtgtttagccaagagaagaaccgcccacatctcatccacagtatgaatcccaccaataattagaatcccttggtttactttttgaattgcatttacaacctctgacatgtcatgagggctaatattacatgcatgagcacattgtacatcaaaatacttggtaaatggttcagcactactgatccagaaatctaatccttttaaacagcttgacatccatttgctaggactattttctagtggctccctgaaaggacaattaatatgaacagggccacaaggtgaagaagttgcccagtgtacagcagaatcaactgtcgtaagaaccattctagcaggaatacaatcggtgggtgcaggaaggttgaagaagaatctcacaaaagaaccaaaatgatttatctggttttccaaatcaaaaagtgaatttaggaaggaatcataattttgtaatctcattactacacatcctatatacatgtcctatttttctttttcttttttatctagtttttcctctccttttacgatataagatcaatcatggtataatgcggtggtttctttacctaaatacaaatgtaactttctatttagcttaagtttttgagaaagaagatttctgacatcccagttctttagctttaggaacacaagaaaaaaaaattgtgttaaggagtgttagatattagatgtatattagctgtaagagagttagatatttagcagatatttagtagatatttagtctcctaactctgtatataaatatgtattattctatgaaatcaacacacaattcgaatcactattttctacatggtatcagagcattgtgattc

SEQ ID NO: 297912 - DNA, 1397 bp, Cannabis indica
ttgagggttgcaagaggcatcactgctatgagaggtctttgtgagtgattgaaggttgcgagaggcctcactgttgcgagaggctttgctgctgcaagggtcgagggctgcgagaggcacacatgcatgatgtcgagaggcatgcatgcaaggtcccaccgaacgaccccattgtgacttactccaggagtgaactttgttatataagtgaaagatgaggaattgttgtggaaatttgcccaggagttgagcacccattcactcacacggtcgaagctagcttggacgtcataatcctcgtctggttaagggtagagaagtttgaggtttagtaactttgcgtccggaaaatgggttgaatgaagttctaagaaatgttggatcaaggagttgaaaagttcttgcattcaccggtggaaacgagcgcaagagtaaagttttttcttgggataaaagctctagttcgaattttgaaaataaggattttgaaaagtctaaaatggtaaagaagaggaagtgggtttgatagatctattgatagtctgaccaaggccatacagttcaaaatgaatggtctagatggaatttaatatctgcttaggacctttatttttcatcattggctcctcgagccttgtatgcattaaaagagggtcatgtcaatcgacctgccatcattgtaacttcctctaaaagacgcgctccctacacgtgcatgtggtaccattgattcttgattctttaattgatgataactcaacaaaaggagcacgaccgtgttctcagcaatcacaacatgtcataaacatgtctccaagatacaaaggaaaattacaagctcccacaactcacaaagttccagaagcttgggggtaaatgtcatcattattcttggacaaaggaacatgtggcataagaagaaaagtattggttcatacagtcattaaatgaatgtcttccatgaagccaagtcacaagaaggcttcacaagcccaaaaacagatcaaggccaaaggatacatggagattcacttagcttcgttatgccttccgagacacggaagacttgccacctccccaggatttgaagtggctcagattgaaagcttgcctaaatgatacccagacgggtacttgaagggcctattgcggacgctgactgcccaaaagagatgcatacatctaccttaggataaacttggatcgtccaatgatggttatgctttttctagcacaagatcagatgttgccccctataccagaacatggtagtgcacacacctcatacaccatttttctagataattattccgacatttacttgtcaagattaaactttttggcgacatgtgtcctatacgaatggtggtcccctattgtccagctgcttcaacgca

SEQ ID NO: 297913 - DNA, 4132 bp, Cannabis indica
agagagagagagagaactagctagcaatgctaataaaataacagcttaagcaaacacgaacaatcaacattgacagctccaaaaaatatatatctactaagaataaaataaagtattttaaagtacgaatgaaagtcaactgctatctctgactcaagaaaaagtcttaactagaaaaatcagtacaaacactagacataccagtacaaacaagattcctgcatgcaccattacggaagtcatgaaatactctgttacggtgatcttggagcatctttgcatgaatataaaaacaagaatagccaagttctgtaattttcttggccaacagttctactcgatttacagaattgcagaagataattgactggtttatttgaagctggaaaagaatatcataataatgttataatcacaatcagaaaataaaaatggctggtgaaaatcagtaatttactcgagaactaaccttggagaaaagagtgttcaggcagtgaactttctgtcgttcttcaacaaatgcataaaactgtgtaataccctttagagtaagctcatccataaggttaataatataaggcttttgaagatatctatccttgaaatccttaacagtgacagggaatgtagctgaaaacattaaaatttgcctgtttccaggcaaaaacccaatcagctgttcaattgatggctgaaactctggtgacagtagcttatcagcctgagagaaattttatagccaaccattagacttcatatgtcatcagtaaccacattgtgaatagcagaaaatcgaataagcctatagaaactacaaataatgtaaagtaagttggtgacaagttatcgcacacagataaggtcaccatcacccaccatgttaccgtacacataataaagtagcagtcaagtacatacctcatccataacaagcatagcgcagtctttcaagatgcaaacacccttcttcgaaagatctaaaattcttccaggtgttccaacaagcaaatgaacaggttgatataaacgcatgatatcatcctttaagctagtaccaccagttgtaaccataacttgaatattcaaatgcttcccgagctccttacagacttgtgatgtttgaagagccaactcacgtgttgggacaagtattacaactgtgagaatgtggagtgtataagttaggatatgagatcagcacagtaacagcagcatcaacgcatgaacagcctagtattctccagtaacactctttagctgaaaaatacatgcattttctacatctagaacaaaacaaagaaaacattgcaacaagttttgtgcttgaaaaacattattagacatcataagtttcttaatatacacaatcaagtagccccaatttataaacaaatcctaaaagcaacagcttcctttccgagacagagagtagagaactgaccttgtattgcatttaaatcttgatcaatcttttccaaggcagggatgcaaaatgcagctgtctttccagtcccatttttggctctagcaagtatatcactaccagtaagagcaattggtatactctcttcctgaataggggatggtctttcaaaccctttctcatatattcccatcagcaactcacgtttcaggaaatagtcctcgaactcatttcctttagttgcagtcacatcctgaaaagaatattagtaaggggatctggactattaggaagatatagagataacgttgcacttacagtttctttcacacaatcaacaggtccacaatttttcaacgcaaacaaatgaaaccacaaaagcatatggccacataacaattcaaacatttaactacacataactcaactaaagatgaaaactaaaactgttatcttattatcacaggaaatctaagcaaaagtgaactaatattagttcaggtttggggatggtgggacaagaaaatttctatcgagactgtaagagaaaacaaatatacaatacacggtaaaaacccactgcatatccattcttcaagtacatcaataatgaattaaatttatacagctcaaccctgagataaaatcagattgtttattaaaccagtaaaagtaagtactgatcaaataacgcaaaaaacagtaagtgtgtaaccaattattttaaaccaacctctgttctgtagcgggtatcagctggtggtattttcaatcttgccttccaatcttgagaactatagaaatagtagaaggaaaaaaaagatcatttagattgcaagtgaaaaagtactactcacatacattttcgataataaataaatttaaaaccagataaaagcaaaaccataaacatcccaaattagaaaacaagcaaaaaatattgatatcaatatcagcagcaagaaaattttcatatgcagattatttttttaacaaatatacagtgttgaaatcaaacaaatgtctggaagcaccttcaagctttcaacaaaataaaatttcaggatatcatcttcaagaattgtaaatatgctttttattcccacaaaaatcatatatcatgatatataaacaacatagaaccagagtcttcaccggcaacaaaactcttatagacgactaacacgaaaagcttcctgacagttgtttaataacccgatttcgtgacaacaaacatgaaggttgtgctcaacccatccagaatcagatttaaactacaaactataagagaatcacctccaacatttatctgcaattacatcatatagtccctttataacacacgtaaaactccataccataaacacacggtcacaagcagtatatcagaatcatggtttagtatggttctcatcctaacagagttatatgctgtatcccaaaaccgcagtatatatttgttctatatcttcttctcgttacttactctataactatctcaattccaactcaaatcatgtcagcacagtaaagcatagtacaaaccagttccacaatctcacacagcattcataaacccaacacattcacaataaaatatgtaaacgagataaaaaaaaaatgcacacacctggagtccacggcctccaactgtacggtcttctcgacctcatcagcactggaatcagcaactccacccaattgacctctcctcagccattgctgttgttgttgttgttgctgctgctgctgctgctgctgttgatgatattgctgctgctgttgctggtggtgctgttgttgctggtgatgaaaatactggggttgattctgaaccaaacctctctgcacgtactgctgctgaggtcccctagactgaaacgccggatttgcgttcatgggcccgcctcgaccggcaccaatccccggagggtacctccctctattattattattattgttcatttcacgactcagatttctcagatttcacacactcaaaccctaaaaccctccaaataaaatcaccaccagtcagaaaaaaatacaggaggcgatggcaactagggtttccctgggcgaaaagatcgaacaaaaggtcttccaagaggatttcccaaacagaaaatttcaaaaaaaaaatccaacgacgaaatggaaatcgatttgtggcggaagaatcctaagctcgaattgaaattctaaagaagcagaaaaaacagaaatcagcgaaaacaagtgaaaggatttcaattttagcaaaacagacaatgttagggtttcgtctacggatctagaaccagaacaagttacctttatttgtttttatttttacagagtgaaaaggataaaagagagaaattatgcgagagatagttgcagaagaagaggaaataaatggggttccatggttaagaaaagaaggaagaataagcagaaatgtgaaactctaaatcaaaaccgcctcaaaaccaaaacagcctctttctcgtcccctctagggcgtcgtctcgtcataaagattgtgcattatttgctgtttcgtcctttatctttattatattcataaaaagcaacttgttttaccatttactaacgtataaaaatcacgaaaattttataatgcaccttaacacacttttattttttacaattatatatacgttgtattaatttatgggattttttcaattttaaccaaaaaaaaaa

SEQ ID NO: 297914 - DNA, 3115 bp, Cannabis indica
ttagatgttcaccattctaataccgtggtacttgaactagctccatatttccatcacaccgacccaatttgtatgctccttattttgtagcattagttacttggtatggcccttcccaattaggcccgagcacaactgttgccccatctttggtgttaaggaatactattctatgtaccaagtctcccacaaaattttttctttctttgacttgcttgttgaagtgtctagctaatttttgttgataagcttgtagcttcaggtttgctagatctcttcattcttcaatcttgtccagtgattctgttaggagagcacaatttgtttcttagtcatacatcaaccttttgtgggatagatattccaattctacaggcaacattgcttcatagccataggccatagcaaaaggtatttttctagtgttcgtccgttttgttgttctgtaagaccagagcaccttgggaaactcttcaggccaattgactttggcttcttcgagattttcttcagagtaaccttaagagttttattaactacttctacctgacaatttccttgagggtgtgcagctgttgaaaagctcttcacaatcccatttgtcgtgtaaaagtcgatgaacatttagctgtcaaattattttccattgtgtaaaaaaaaaattctgcgggagtctttactgacaaataatgttctttattgtaaagtctaaaaattacttgaaatttatagttgctagtggttcggcttccgtccactttataaaataatcaacaatcatgattgcgtattgcactccacctttttcttttggtagttgtccaatcaggtctatcccttatatagcaaatggccaaggacattatattttgattatcattggtcgaaatcctaggcactttggagaacctttggcacttatcacattttttcatgtaaacttttgaatcttcaatcttggtttgccaaaaatatccttgacaaaatatctttttagacaaactttgcccctaacatgattaccgcaaaacccctcgtgaacttcaataaggagtcatgcaacttcttctttagtgatgcatcttagcagtgacatcgagaaacctattatgtacatcactccatgtgtgattaagtaccgtgcaacctttctcattatcttttgaatttctatcacttggaagctttccaatttatagatagcctgcaattggggtaattcatgtaggagtattgtccaacatttcaatttctttcatgcaagtgatgttatgttctttcagaaactgaattgggattaagttttccttgttagccatagtgttgcttgccaaccatgccaaagcatcaacagttacattttcctcttttgggatatgcctaaggttaaatcctttgaattgtgtgggaaagtcttgaattttacttaaatacgccatcatttttaccctcgagccatgtattcccccaaaatgtgattgatgaccaactaagaatcgttgcagatgtctaggtactcagcatgtacttcctgagtaagttttagtccggctatgagtgctttatactccatttcattattgttgttgtgaagccaaactttatcactccgcttagggattgcctccaaaatgtaatgaaagttattcctgcacctaatagttggtcagtggatgattcgtccacatgcaatttccatattgatttatcatcaccgttttcttctagtgtgtacacttttccttgttatttttttggctcggtgttctcctatgaagttgttgtttcttctcttgtacattcagccacaaagtctggcaaggcttgaccttttattattttcaacgctgataagtaatttcatattctcctagctcactttcccatttaagtagcccaccacaagcatcaggcttttgcagtatttggcataatggctggtcggtatagactctaatggggtgagctaggaaatatggttgtaacttcctagatgccaggaataagcaataggaattttttgattagaggatattgaattttagcatcaattaacctttttctatgagagtagaccgaatattgggtattgttttcttcactgatcagcatgacactgacaacatgttgagtcattgtaagatatattctcaattcttattcgtccaaatgttttaataggataggggatgtgcaagttgcttctttagttcttgaaaagctctttcacactcggttcattcaaacttcttatttcctcaaaggatgttgaaggaaggaacacattaatctgttgacttggatacaaatttgctcagtgcggctatctgactagtaaggctttgaaattccttgacttcttttggcattttcatatctaaaagggcttgaagtttctttgggttggcttctattccccaagcattgataataaaactaagaaatttacctgagctaaccccaaaggaatacttaagcggattgagtttcatgtgatatttcttgagggtcttgaagcattcatacaggtcctctctattaccccagccttattggatttgacaagcatgttatctacgcacacctctacgttacgtttgatctggtctttgaacatcctattgactggtcactggtaggtatcctcaaaattctttagtccaaacaacataactttatagcagtacaagccaacatctgtttggaagctagtgtgttcttggttgggtgggtacattcttatttgattataccctgagtaggcatcgatgaagcttaggatttaatgacctattgtagcatccacaagttagtcgatccttggaagtggaaaatagtcctttggacacgctttattcaggttagtgaaattgatgcacaaccaccatttcttgttccgcttgggtaccagtacagggttggctacccaggccgggtagaaggcctcaattatgaatctatctgttatgagtctttctaactcttcttttaatgcttgtgcatgctttttacccctcaatctccttttctgccagaggggataaaagttgagattaatgttgagggcgtgagaaatgatagttggatcgatcccgaccatgtcctcatgtgacca

SEQ ID NO: 297915 - DNA, 6009 bp, Cannabis indica
gagagagagagagacgatgatgatgaagaattggttatgataattcaataagaaattaactacaaaacaaaaaactagcttaaatcttgttggttagtggtgaagtagtctaaaaacataccttaacatatatatcgatgcatatatccaaacaatcattggcagccagagtctgtgaaattcttctaagagcttcaacctccattttagtaccaagattatcggaaccaccattagccaccatcatatcatcctcatctccattcatctcattattattattatcaactaggtgttccaaggtttgatgctttatttggtgcaacaggctctcatactcgtcctgcatattcaacagagcttgatcaagtgacccctcaaacctcatggcatcaacctctgtttcgtacagagccttgagagtgaccacagtctctcttaaccgatgagtcctgtactgatcagtggccttggtccggctcaagaactccaccacctcctggagcctctgaatcactgcctcaccatcttcactgatcgagctcaccgcctcgttaagctggtcaacacagtcaacgtacttgatcagcttcttcaatcgtttcttcttggtcgtgacaactgatctctcggccgacaactcttcggagatgtctaggagcttttgctggagagtgtcggagattttgaagctgtcgaggagcgagagagcgggagtgacagctctgttgattctggtttccagagcttttgcggccatggatagagactgcaaaggagctactctctttgaggctgttgagagagcctcgtctataagatcaaacttcttgtccatcatgcccagactttctcctattctggccgagttttttagtacgcttctcaaatctgagcaggcttcctcgagcttaaagaggtagaaatcttcttcaaattccttggaccccattaatggtgaatttagttgtgcaaactctaataatcttttaagtccttgtgacttaaggatgaaaattaagggtaatgatgatgaggaccaagagtaataaatattaatttcatatttgtataattacttaggacaagagaaatgctttcagatgacaggcacaacatgacagtaagaaacaatcttcaatggaatctagggtcgattagaactatgaaacaaatggcagttgtacgtcgaaaaccaacaaattgcggtaatattatattatacaaaacatataatatatataacatattatataatatattatatatcaatgttggcctgcttagcaatttagttttcatggatcaatgttgacatctatagtctaaccaatgatgacataggtttagtgtttatgatgaccttcttaacaatttagttaattgtaactagcctgtttagaaatttaaagttaatcttcatagatcaagtgtttatggcctccttaccaattatatattataatatattatgaaattttatattttataattaacgattaattaattaaatacggaataataaaattagtactgaagtcgatattctcaaaatcgtgttatgtaaatattgcagaatagaataccaacaaagaataaaagtgtagaaaaataaaaatataagatttttatacgtggtatcaataatctttacagatttctactagtccatagggccacgcccagagataatattcattaataagatctcaataatataatatttttgacttatgcataaatcaactctatcttattatatgtcgcaagcatggagaattccaccgtgatgtatgaaccttgttgaaacttcaaatgttcgaattctcttcgaactacttgaaaagtgcttggttctactcgaggcaagacttgaaacaccttctctcgaaggttcacaattttgtttttcttctttgctgacttgtttacaaactcaaaaaaattagaaatctataaatagacttagagtcaaatacaatctcctctacaaaacaaagacactcttcttacaaaataagaatgaaatacaaagagatgaaagagatagaaaactctagctaccaatatgagtatttatagacaatatactcacattagatagcgtatacatggactcaatcgtccacaactcataggaagactttcctaaaatatttcttcaatcaacctagaatttcctattctacacttgcagaatcgcaagtagttgatgcaaagtttcttatatagaaatgaaaaacttccaattcaattttctaattaatacttgatcaaatctttaataaatggtgagatcaaacacaatacacagttggacaagatagaacacataaatttgattttatttcattaaatacatactatgtttgttcagcttttctaaaataaaaaacctagacaacaaaaatacttttaataataaaatcaattaaaatatatatatgtgaaaagtataattatactcaatccatatatataaatattataaaatatctttgtcaattaaatatgccaaaaattgaattaacaatcttaccctttgactctttaattgacaaaatattttataaaaaagcaaacaaggagaaaacatgcacaaagtgttagaaacaaaataatgagtaagaaaatactcccatgcatgaatactttagagtttatgccctaaaattaagtatttaatggataatatattagagaatatatgaaatacaagtataagataaatgaaaatattaattatagaaatataattaataaatatctgaaaattctattatcatatagagtgggcatgatcttgtaaggaaatacaagagaattaagatcatacaatatgaataaaacaagtcggtagttgtttaccaagattttcaaaaaacgaattatttaatatttagaactaaagaaaatgggattaatgagccttattccatgagttagtattattatcaaataagctagaaatgtctaagggattacaatgaatatgaacactctattctcttctcaagcttgtgagttaagtaattataaccctttacataaatgattcaatgcgtatttatagagtaatagaggtcatacttagttaccatttttctctaatggggtgtttacagataatacattactttgggcttatcaagcaaagcctaacccatgagcaatgattgtatgctaacttctcatgttaatcacgctcacagctgttgttaccgtgtcctattattgcgggtaattagttatatattaattacttaaccttcaactatctaatttcctattttaacttgatattattctctatctgaggtttaaggagagtgaattccttcttttgcacaaaatagtaagcgggaaaactacaactggcttcaagatacacactggagggttcttctggctacacagagctaggatccttctgcatatagactagccttggcagagactcgtttgagcaagaagtgtgactgccttcccggaaggccaagtttgtattaggctcggcccagttcatgttctttaggacccactaatgggctttaaatagttgccttgagtccacgtgtcccttgctagaaatacagataacatttaccccccaagctttcgaaatattgtgaattgtggaagcttgcttcagtctacataggtggacaggtggaggctaaaggtgaaatctttacaattatccaaatataactgaatgtgtaggataatcttcgtttatttgcttttgagatctggtgtggcatttcttctttggctctcaaggcatctattcaaatgatgaggcgtgcgtggaaaaataagtgaattgatgactatttatttctagatgaacttcaaggagaattttatcatgtgattttgcctcaattcttgacaatgcattaaatgatgaatggatggccttcccggatgttggatctattttgtgtttttggaggttcaggcttgaccgttgatcttggctttatacggactgtcttttgtaggtatgaataccttcaaatgccacgttttacaacttttacctaaatttttgaatttttctatctcaaacccataaccttcgagagcacacaaccagaattagaatcatgcccaaattgagccactctggagcgtgatattgatttttgcattcaacttcttcttcgaattaaagctcaaaaattcctaggcacaccacccctagtgatcttaactgcatcgctagagaaagttgcaaatttggatattaatactgaaattgactcccttattgaccaagccaatgccattgtatagaggcttgatcgactcaaagatcctctggttaagagagtttccatacaaccatcctttgacgttagccatgtcatatttttactcgagtccagagttatcgctaatttatcatgaagtaaattttctccattttgattttcaaactttgttgcatgtcaacatacaatgattacatttgacttatttgctgtttgagaactaggactttaggcttttggctaggatattgttgctgataagagtaggatgttctgaatagctttaagtattagtaggaagtaaattcctttgttgcactattctgaaaaaatatattttgatgctaaaatgctagcaaaatttttactcccttgtttggaaccctcatggttttggatagtatgtgagcttttcttgtttctcttactctcgtgttcctgtttctattacctggaacaaattccccttgaggattttgtttctagatagcaaatttggtggggacctctccaaacagttatgggagaggattcccctacacccttactatcttagttagtctaagtaactaactgcttggtattttttttttagcttccataatgtctaagagagctcagcgaagagtactggaagtggatgaagaagatatagtggtggagcaagcccctactccaaatttagtattgaattcatcttcatgggggatggatcagttcaaaaactgagccaatgtacaagacattaagaggacttgaaagtgttccaagactattttggaacaggttgtctgtcatgggcgaaaattcgagccaatatgctgaaggaggtttcggtgtctagagttggggctatgtggaaatgggcatccatattcctttaagatgctactttgtggagttctacgcagtagctggagtggctccttatcaatttattccccaagtgtattgtctatttgtcgggtgatacattttatgcttctagaagaagaaggtggctccaactctagaagagatcttgtatttttataagatcaaggcataaaatatgagaaaacacaaagagaaagttgctttctatatgctggaaaggcattccaaggattcggtgtgccccactagctctgttaagtatgtatacgacatccaggactattccttctacacttttggcttcccaataaaaagagtcttgacacttactctcaactttaatatcgcaagtaagtgtcactagttgtttggtcgttttcttgccttcttgacgtcttcttctcgctttctgaattgatcttattcttctctttcctttctttcagattctatcccttgaccgccttttcactctagagtcagaggaaaatcttttatgaatcattgttagaagaagagtcacaagttggggagcttgtgaccactaaaaatcttcaggaggttggcctattagctcctcactagagcattgataatcttgctgtgaaagatccagttagagttcttttccatggtgaccctgttgatgttaaggaagccattactgttatcaccgtggaagaggccttaaaggccgttaaatttgatgaagaatcattaaaagattggcatcgtcaattcccagagtagttgagagcttgccattcatttcaaagatgttgtccagaacgagagtactccaagagcgagtactgttgggaatattttactaggatttagatttactaacaag

SEQ ID NO: 297916 - DNA, 2616 bp, Cannabis indica
aatttttacctaaaatccaatatatttgtaaaagctcgtttaataaaccttactcaataatttataccattttcattttataattttacaaaaaaaatgataaattaaagtttatttttataaatagacaaaaaatacaggtagttgaaaaaaagaagttttttttttagaaagagaagtacaaacacgacacctacacaggactaggcttattaatctcagcgagatgacgagcaactaagggctcaaccccattccaactggccgacgctttggacaccaaagccaacttagctaacctatgagcgagaaggttcgcatctctacactcaaaacaaaactcagcccgatctcaactacacttcaacattgaaacctcaactaacagattatctgcatcaaaatcccttattagagttattaataaggctaactgcattaagacaatctgaagccaattggatcttcttcaaaccaccagcagcaacaagcttcaaaccacttatgacagcagccaactcagcagaaagaacactaaggggacgggcagaataaccagcagaggagcaaagaacttgaccttcatggtttctaatgaccacacccgcacaacaacaacctcccacagtatcaatacctgcattcacattcaccttccagactcccatctccggaggaagccacttgttatccttcttgacccttctttaagtgttgattttatcttgaacctcactagctaaggaactacaccaatccaccaccccacttgctggcatacaaaagcctccatggagccaagcatttctttcattctaacattgccaagacaagatcacaaataaagtgaaatcagaaggaggcatctgaatcaaacaactttccaaatcttcctaaggatcctcagttctgatttgtttgataaatttccataaaccacttattgacacttccaaatactatggaccacatcttcattaaagctatttccacaacgattgcaccttggattgggataaattttcctgtaaaataaaacactattagtgggaagccaagaatggttagctctccaaagaaaatatttaatttttggaggtactcttaatctcaaaatctggttccaataggactcaacccctttcatgttcgacgcttcagctttaagacttaaaattagaagccaacttgtaaccactcttgacactatactctctgttcttagaatagtgtcacatgatctcatctttcactttattattgcaagtggccaaagcaatgataaggttagcatcatctacattaaagttggatcaaataaagtgctcatcccaatgccccttccactttttcagatcaatgacatacatgccttcgggtaaacttggtttttaaatcactttaaaattcaagggccttggaagccaagggtcatctatcactatttcattaccatttctgaccctctatctaaaccctttctcaattatttctctcccccaaaacaggtttgtccagacccaagatgcattggagcctttctttgcttcaagaatagtacagttaggaaactcagaggccttaagcacacagctacaaagagaacaagggttccttataattatccacgcttgcttagcaagaagagctttattgaaaagaccaaggttttggaaccccaaaccacccctctcttttggaagatagagcttctcccaagtacactaatgagtcttgtttttctgttcactagatccccaccaaaacctagccaacaacctatggagattattaatgattttctttgaaagtttaaaacacatcatacaataattaggaatagcctgagcaaatgctttaataagaatttccttacccgccaccgaaaatagctctcttttccatcatttaagcttgttccaaactctgttattaatatattcaaacacttgtttcttttttcttcccacaaaagaaggaaggccaaggtagaaaccttgactacccaccatcttgacacccaagatttcagcaagagcaatctttttatttctttgaacacacttatcaaaagacaaaccagatttttaaaatttaaccacctggcccgaagcctccatatattggaataataaagtcttgaagcactggcactcctcttccatagcttccaaaaaaataagactatcatccgcgaagaatagatgagaaacattaaccccatttcttccaaagttaagaccacgaatgtttccattgctctcttccttttggatgaggcaagagaaagcctcaacacaaaacaaaaaaaaaggtgataaagggtctccttgcctaatccctctttcgacaaaaccttccctttgacttccccattaataaaaaaagagtaagagaccgatgaaatgcaattcataatcttgtctaccttacctttgtcataccccaacttcaacataactttctcaatgaaaatccactcaaatctatcataggcctatgccatatcaagcttcaaggccattttggatccatttttaaatctattcttcctcatataatgaagaccctcataacctataatgatatttgttgggaattattttaccaggatct

SEQ ID NO: 297917 - DNA, 8724 bp, Cannabis indica
ctagtatatataaaatgtggctaactaacaaaattgttagtctataaaaaacttttgttatttgcttattaaaattataacgtttaagttaacgttttacaagaaatataaattctaaaaaatatcacaaaatttattgttgtggttgagtagctcgataaataattgttagtttacaaaatatttgccatttatatattttctatatataaagtgtgactatttaacgaaaattgttagtttataatttttttttgttatttttctttaaaattaacaataaaaattataaaatttaagtttaaaaaaaatataaaatttattgttatgattggtacctcaatcaagaataataaaattcaagagaatgcagtgagaattatgacaagctataatgctaacacttacggttcttttggttggtcgtataagggttgtattttatttgtttaccgagatttttgaaaaacgaattatttaatataagaactaaagaaaaataatataaagaattaaatcagaagagaacactcagattttttacgtagttggggcgttaaagagctttaatccacgagtcaattttattatctattaggctagaaaagccaaagggatcacaatgagtaagttgctctattctctttacaagcttgttagttaagaatttctaacctttttcatgaaggattcagtgtgtatagatagagtaatagaggttgtacttaattaccctttttcttttaatgtggtgtttacaaataatacagtacttcgacttatcgtataaagcctagcccatgagacagtgactgtatgctaaattggtagattgatcacggtgatagttggtcatactgtgtcctttaattgtggataactaattgtacattaattatttgatcttcaattatgtagttttccattttagtttgatattattccctgtccgagatctgtggaaagtaatttcctgattctgtacgggttagtaaaaagaaaaaatatcactgactttcaagaacatgctggtaaacccttccggctacgtggagctagaattcccttgaatacagatttttcttggcggaggctcacttaggcgagtaacgtgatttccctcccaaaaggccagcttatattgggcttgacccaatctttgtcgtttaggactggctgatgggctttaattatctatcttgtgatcatgtgtccctgtttggaaacatgcataacatttaccctaagcttctaaaatgttatagatttgtggaagcttgcttgagtctacatagacaaacaagtggaggctaaaggtgaaacctttattatttgtcaaattaaattaaattaaattgaataaggaagacaacttttatttaattacttttttaggatcttacatgatattatttctttggctagtgaggtttccattcaattgatgaagcgtacgtggaaactcaaacgttttgacgactatttacttctacacgagcttcaaagggaatatcattatgtgattttttccttggtcctaaacaatgcattaaatgatggttgtagagttcctctaaccgttagattgattttgtgcttttggtggatttatctcatccattgatttggaatttacatggatcgtattttgcaattataaatacttccaaacgtcacatttcactattttttctcaaattttcctatttggagacttgaatcttcgagagtgaaaatccaaacttaaaattacatacaaagtgaatcacactggagcgtgatatcgacttatgtattcatcttcttattcaaatcaaagctcaaaaatttccaagaaaaccaccctagtggttctaactgtatcgctagaggaattaaaaatctggatattaattttgaaattaactcccttattaactaggctaacaccattactaagaggctacatcgacttgaaggtcctttagtttagagaatttctatataaccatctttcgacgtcagtgtgtgctctcccaggacatagtttcttttaagttcagaagtgttgcctatttcatcaccaagtaagttttttccttttcaatttcttgaactgtattgcatgtcaagtataaggatttaaatgtgatttatttgttatctagaaattatagctttaggcttgtggctgagattctattgttgacagaaataggatactgaaaataatttcttgaataacttttggactcaataggaattgaatctttttgttgttttgatctgaaaaaccctattttgctgctggaatgttggaaaaattttatttccttagttggaacccttatggttttggacaatacttgagattttcttgttctttttttattcttgtattcttgaatctactacctagaataaatactccttgaagattttatttctggatagtgaattaggtggggacctcttccaattagttatgggggaggatttctccttgcccttactatcttagttggtttgggtaactaactgcttggaaccttctttttcaggttccataatgtctgcgagagctcaaaggagagtggtgaagactaaagaagaagttaaagaggtggagcaagctcttgttccaaaagtagtgttgaatccatcttcatgggaaatagattagtacaaaaataagttatggaattatgaaaaactccaaaaatacaagatgcagagaggtctcagaagtgttctagaaatatttggaacatgctatatattttaagagagaaaccaagctagtgtgctgagggaggttctggtccttggagctggggatatgtggagatgtgtgctcatgttcctttaagatgttactttatagagttctttgtgatattcggttataatgttaagataaatagtttggatcttacttgcatgctgtctttacccatattgttataatgcttccatatttgttgtttgaacttgttattctgttattttttttgcagatcaaccactcacactccaaatgggtttagtgaaaaagttccttggcaccatccacaaaaaattagatgaagtcatggaattagccagaggtggtcgtgcaagggagaagctgtgcaaccttttgatgctggatcgaagaaaccatcacttccaaaagaactcttgaaagctgttcaaaaggctctagatgctggaactaagaaaccaacacttctaatgaaactttaaaagcagttcaagaggctccagctttaagtactgttgcatgtcttttggccacttctattgctgtggatcccacttctcaatgaaaagagggtgaatatcccttggctatagttcttcctcaacataatcttattgagactgctgatggtggtgaagatgagggtggtgaagatgaagctgttggagaaggatatgtcttcctcgcaagggaaagagctcgcatcaagttgggtagagataacaaaaggtcgagggttgaagctaaagataagctctagcaacttgctacttcccaaaggcaaagttcaaaggtccatggacgaaggggtgccgatgttcacgaaagtgaaaaatctactgggcgaaacactcgttccaccaaagccataattatctcttaacctttgcatgttccacctgctccaccaattccagccttttccacttaactacctagtgataagacaagtttacctctccttcttccttgtaatatttcctttccaatccatcctacttcactaccagaggaggttcatgctaaattggatattgtcgacaaacttttccataaaagaattaactccgaatatgaagagatgaggaaaaaggagaccttgatctcgactaggtgaggcagtgaatttgttgacgctgaaaaattaagtgaaccacttcttgctatctttaattgccaataggtttctaagaggcttcggcctagagtaggctcagacctaactttgtttacatcatacttattggacttaaatgctgttacatgtagtagactataatctgataagtttgccacaatggtgagtggggatccagtctttgtggcagatagtattaagagccaagttgttgctataagttcatttacttctgattgaattatatgtatttttttattgtttgaaatatatctaatctcacatgtctttctttttcaaatgagtttgacgggggagagatggtgtacctaggttaacaagatggcctatgagattgacaccttaaaggctgagcgtgaccaaactaagcaaaaataggaagaggacagcaaagctttgaatgatgtcaagtcccagactgagggtgtgattaattagagggttaaagcttctcttaatgatgttctgtccaactatgaaacttccgctaaagcagagaaaaagcacgttgaaagatataaagaatcttacaatcaagtcaattctcgcatttccattcttgagaacaaagtgtctgaggcccagaagaaatttaaggatctagagaaaaagttgacctctgcttcccaagactataacattcagatggaggccctgaatgagaagattacagctgctacaacgttggaaagaaaactgaagcatcacaaagtcctccagaaaaaatctgaagcttcaaaataatcaagcttggaaaagcttaaagagaccaaaaaagctttaatcgagtctcgaaagcatgtccaataggaaatgtagaaggataaaattgcccaaggaaaatagagaaggccaagaattcccaagaagaaatggagaagccaaagttgttgttgtgaaggataaaacctatgctgagagtcttgaagagagaagcttgtcaccatagaggagaaacatcaggaagagctgaagaagtctctagtagtgaccttgtttcacttatcacaaataaagaaggaaatcctaaattatttagattaggatgacaaagaagagcttcttcctcaaatcttaaagcttgaagctatagagaaggctgctaaagtggttatcaacgtggatgccaaagatatgccatcacctgatgtgatcccagaaggatcttctcttctgtcctctgagattgttccagctttagagcaaactatatctagtgatgttccaactaccgagtcttcatttgaaaatccattagactcagtctagtagcacaatgatctagtcaaattataatctactaacttttaacccattttcatcaatgcagagacattaataacgcctttaccgtagggctttaactatgtggttattttttgggatatgtatgacttgcatactttatattcactacatatctgaagtttatccaacgaatcctgattttgctaagtttaatcttgtttccagttccgtaaggttctggtttcaaaggtctaggcatttaggctttcgattaggtgcttagacttggattttctttttaaaaaattgttttgttaattccttggaacatggttccaaaggtatgaaccttgtaattttaacaacttatttttagaaattatttagtaagtgttacttcctggattttaaagcctgagattttctttattttgattaacttgggttaatttgttgtgaagcctgaacttcttttttgaattaacctgagttaattatttgtgaagcttgaaattctttttttgaattagcctaggttaattattcattaaacttgattaactttaaatatagtaaggtagttgcttacttttggctccatgaagctccagtttcaggcgatacttcctacttatatacttattgtaaatttgatttaatgattttagaagagagtggaagaggtataacatatgctatctcccatgtgattaagagtctagattcttggtctcttattacattacttacaaaaattcaaggaactaaaaataaaatgaaaatcccttctttctattaaaattatttctaccctgaggcgtaaatgaaaatcaaacataaaaaataaaaatcaaataaatggataggaaaccaccccctagtttactgatcatatcgacacacatgtggtcagcgttccattctcttgggatttttgatccatccaatctcttgaggcaataagttccaccacctactttgtcttggatatggctcttcctagtttggtcctaggacccccactctttgttcctgagaagctagaaatgccctccttaagactagatcaccaattttaaaccttcaagttttcactttagagttgaaatgtttggcgattttggcttgatatatctagagttggacttgtgacttctctcaaagttctttaattaaatccaaagattcttgaagtaatgcatgacttaagtagggtcctaagtctctctacgatgagaaggtgttttggtctttgctgggattaatgcttcacacccataggccattgaatatggggtatgccttgttgatgttctttgtgtggttttgtatgcccagagaactcgtggaagttcttctcgccaatgtgctttgcatgcttgaagcttcttctttaacatggtttttaagatcttatttacgacttccacttgttcagtttcttatatctggccacaactgaaaaacttttgatgattccatgcttgacacagaaatcagtgaattgatcactatcaaattgttttccattatcacatacaattttatgtggtagtgcataatgacatacaaagtttttgatgacaaagtcaagggccttctttgaggttacagtgttcatatgctcaacttccacccacttagtgaagtaatcaacagcaatgatggcaaacttgactcctccttttcctattggaagtgatcctaccaaattaatttcccaaacaacaaaaggccacaaattcttcaacagggttatctctgtttgtggagctctaggtatcttggaataacgctgacagtgctcgcatttatggacatattccatacaatcctttttcatagttagctaaaagtatcattggtgaaggatctttttggaaaaattaagtctgtatgcatgatctccataaaatccttcatgtatctcatgcatgacgacacttatttctgttccaactatgcaccttagatagggcattgacaaccctctactatataatttttcatccatgagcacatatctttgggcttgatactcaacttttcatgaggctgctctgtaatctggaagtgttacagattcaagatacttttgtattggagccatccaaaaagtggaatgattaatgactattaccctcagtgtttatgtgcttagagcagaaaggtgggcgacagggactaatccatacttttcaatttttgggtctattgccaactttgctagcatgttcgcgaaggcattttgatctctgggaattttcttgatggtagaatgcttaaatgttgcaatatttctatagatttttctacgtaattagccatattctccccttttgtttgatgttctctaaaaatctggttaactacaaactatgaatcactatagaactcaatgttctgggcttcaatttctttagctaactacaggtcatctatcattgccttgtgttcttcttcattgttagagtcttcaaactcaaaacagagtacactctgaagttaataattttatagagaaattagaatgatttggtctcaatagatgctccatctacattatcttctagacactaagctctgggattggttctttatggttgttgtccattctagtgcattcaacaatgaattctgctagatcttggcctttgattgatattctaggttggtaaaggatgtcaaactggcttaactctattgcccattttaagagtcttccaaatgactggattttgcaacacttgatagaggggatggtttgttagtacctcaatggcatgggcttgaaaatatggtcttaacttttgtgatgaaattagtaagcttttcgatcattgggtacctggactcctcgcccatcaatctttcgcttacataagatacaagaagttgtacctttccttcttctcgcaataaactggcagttatggcatgatttgacacgccaggtacaaaaataatggttccccttcgataggtttaaaaaatattggagccttatgttctttaattaggcaatgtgatgtaataaagatggttactttatgaggtaacatatacataatttatattataaaatgaagatgatcccctttattggtataatggttttgtgttaccagatatctgtatactgatgcgtattcatggcagatgcttgtagtgatttggatttcatcttatgaacaatgcgtaatggtttaattctgattgtgtataaatgattatattccaataataaactatatgattattattattacttttcttgttgagttcttgtgactcatgggtgctatgtggtgcagataaggacaaggaaaagttagagttgccatgaggcgactaccttttctaacaatgtacatattgaccgtaccagcctgtgtgccgagttgccaggagttcttttggactggttgcatcttctatatttttgaattgtgttttcaattgttattgtgtataatcttttgagtaaatcttttataacaaggatccacgaaacacctttttactgtcgttataatgtctgttttttttaatattttattttaatcaagtttta

SEQ ID NO: 297918 - DNA, 1984 bp, Cannabis indica
agagagagagagaagaagctcattgggaaaaagagagagttatatattagggctagaccgtcactaatagatggtgtaaagttatggctaaaaatgagacaatattatatttagctcaaattttataatttttctccaatgcattaggggttaattaactttattttttatgaaaatgtgtaaaaaagtaaacatatgcattaaattttgattaaaagtgtatacaaatctaattaaatatataaatctaattaattaaataaatatttgctttcccatgtggtaaagaattttgcaatcataatatttaaccagtttcaaccatcgacgttgcttcatgtttaaaactctctgagtgaaaaaatacttgaaggttttacgatctgtcttattctcacattttttgccgtacaggtagtggtgccaaactttcaaacaaaacaccactactgctagctcaatgtcatgagtaggataccattgttcatactccttcaattgcttagatgcataggcaataacattgtcaagctatattagaacacaacctaacccttgtttagaggcatcattgtaaattacaaacttttcattgctggtcggaaaactcaacactgtgcgataatcaacctttattttaactcctgaaaactactttcacatttatcaatcatggtaaacttgcagttcttttaggttaagttcatcaagggtgtagaaatcataacatacccttctacaaacctctatagtgtccaagtaaagctaagaaacttctgaccgcagtggtagacttatcgctgccattgatttgaatttgattttatctctgtcataatctagaaagaaacaacaattgaaagagaaaatgaagaaagtaaacaccaaagaatgaacacctaaacacgaaaaaggaaaaagtatgaaaccacaaatgatcataagaaccgccatagaccaatgtaaggaggatggggaagggttgagattatgacggacattgattatcactggaaaaatgttggacacgccctcacgcgcgagctagcgcgtgagagtcggggtggtggcgatgggtggcgcgtggggcccacgtgcagagattctagttttcgaactttggggttttgcagatcgacgactgggcattccgtttatgtgggttgtgagaaagaactcgccctccaactagggttttcgaaaaaagaaaacctaaactcaaaccctaatcttatatttttttatgaactctaatttcgaatttcgaatcacaattttaagtattgctctgataccatgtagagaatagtaaatatgtgtgctgtattccataaaatattatatatttatatacaaaattgggagactaaataaaaaaactactaaatacaaataagaaactattaaatacaatttactctaatattttacaactaagattctaaaatatatttatctctttaggatgttggagtaatattcaaaaacaaattgataaatttgaaaaagaatgtttgtttttatgtaaaatgaaaatagtcaaaatttggatgtttttttatacttttttaggtgcaaataaattttacctaaaattattataagaaataaaattttaaataataagaatttaattagccaataatctacaaaatatacaaaattgcattaggtaatataatatttattccagaactacatattttacatactaaagagtaatattgcatttaaatatatatttttttttatataaatctatcttaattacttctatatggtttaagtttacttagagtgtgtttggaaagtcacaatgtaattggatttgtgtgtaattggaggtaattacacaatttaacatgtttgtctgaccatgtaattataccgtaactgtgtaattggaagtaattgagaggttccaattacactctccaattctcatggccccccatgagaattgaatgtaattacactgtgtaat

SEQ ID NO: 297919 - DNA, 2703 bp, Cannabis indica
tttaatttatttttatttttatgccatttttttctaaacataaaaaccccatttttcaacttttgtcactaatttttgagtaattaaataaacatagtcctcgtgggatccacccttacttacaattatagtaaaataattggaggtattagaaatattagtaaatttgttttggcttacgacatgcatcatggacttctacatattctttagtcttgacttatttttggttccatgaggcttctccgtgacgggatcatagagggggatttttattagaaaaattataagactaattccttcctctaaatgtcacgtgtggataacaaatgtattaaagtatgaaatctttaatataatattataatagtacgatttactaagcactatttagtagtggtatgtaattttgattcagatcacatatatgggtagatatttagtaaaagtactatgtacaataaagattatgcatgattggactgatataaattaatatattttatcaacatgtcgtttatcataaaaaaaataatttatatcacaaagattatcattagtagttctgtctgaatcttgagtatcatgaactcatatttgtgtttattaggttatttgactcattcgttaaagtttcttaaacataaagattaaaagtttttgttttgagaacttaataacatgaatgattgggaacatgttatacaataagcataatccaagcttttcgagaggatcaaatattagtccccttaagggtcaatcctaggagtgaatttagttattgagctcaaatctatgattggattatagattgactatttattatgaattaatggtacttgatgaatcaatagataattagaagggtaaatggtaattttgatcaactctaattgtgaactattaaattggagggcagactacttatattaattacatcaatggactactagttacaactcagtaaatataattttacattgtttaatagtgtaatttcatatttatagtgtagtaataatgaaattaataaatcatattattttattgatgagatcaataatgatctcgaatgtattggaacttagaaatataagttaattaatgtttacttgaactaaataaagaagaataagggtaaataaaaactaagtaagaacacaaaaatttctccccaaaagcaactcaacccaacaaacataattaaggctgcttttggttgggagtaataaaatggaaaggaatcaacaattccatccttttgtttaattgcattttaaagtattaaattattattcaaccactttagtagaatgactattctattttaaaatagaaaaagaaaatcaacaattgttcaatgaaatcttgataataagtctcttatcaacaagtggcagttcatagcctcccaagcatatatctatgcttaggaacgctcaaacgatcacaaactaccttcttatacttcatttaattttgatgtaacaagctatcataaagtttccttgctcaaaatttacctctacaaccaactgtaattaggctttgcttgttgaaagtcttcctcaaatgacatagctttcgccaataccaacttgagtctgaattgaggttgtaatcccaaaactctgaccccttcaaataaattgtattgaaacaacaagtcatatttttccattatatcccaaatatatttagcaagtgaagccctattccaatttctcccaagaagtgatatgtatcttactttgttaccattctggctctaaagaaaccctctataaagtttctttacctccttcacaacactttagggtataacaaagatacttatccagtaatttcaaagtcccaacaaaactgaataaattaattgagtcctaccagcaaaagaaagttgtctcgtggcccaagtttgcaaccttagcttcatcttctttataatgggatcacaatcctcctttcgccatttaataggtcgtaaatgaacccctaaatacttaagaagaaactgaccttcattaaaagacacatcctgaatgatatcaatcttattagctgcaaaaactccaccaaaaaagatctgggacttagcattattggccttgaaacttgacactgagctgaagtcgtcaaaagcaattttaatatgcctaacaacctattgagtacctttgcaaaagaagattaagtcatcagcaaagcacaaattggtaagctgaagacttttgcacattggatgatacttgaaaatgttttcatgagcttccatcttaagtcttctagtaagatattccatgataatcacaaagagcaaaggagattggaagaaatagaatctcccagccttagccccttctcccctttgaagttaccttaaaacataccatttatcatgagagtgtaagaaccattcatcatgacagtgtaagaaatacctttcacacaaatcataatccaatgaataaacctagcagggaaacacaaaccattcttcctagcacatttgggaaaatcatttccctaccaaaaatcattcatcctaccatagttctttatgacatcttgaaagatcaaaatattgagtaatcgatctattcttaacaaagactccatagttcaccagggaaaggaagaacaacagaaagcagtaaaagtgatatttatataataactagggaataggttcgtgttggg

SEQ ID NO: 297920 - DNA, 1592 bp, Cannabis indica
tctctctctctctctcttgtcattttgctcgtattagaaacttttttatatcacacgaaacgtacaagattgttaatatgccttcaccaatgaagaggaaataaacttcataattcttcagctattgtttctttaaacggatttgatgatcaaacaatgaacatagatgacccttaaaatattgattaacgaacaagacgcatcctatcggaaaacaaaaaaaaaataggcgctacaatgaatcctgcacttagaatccatattccgaaaataacattatttataaattcgtaggaaaaaaaatatcatataaaaataaaaataacaatttagagctaagatgaaaacagtgaaaatccagttagctgttcgcatctaaattatgatggaaacacgtaatcctaaaaatcttcgagatccaactttctccctacttttctccaaattctaacatcagccaaacggtgtctaacttgaaagatagagctaaattaatctcataataatctctttaaatatcaataattaagaaaagtcacgccaataaccaattaatcaaatactgcttcttcatctcaccgattaaaataagcactataaaataaaaggaaatgcagtcaacagggaccgaaaaagtcccccaaaaacatatttcccgaaaaaaacaaaatcgagtgatcgagtggaagactagttattaaccaaaacatgaaaactagatctgataaatgtagagacagagaaagagaaatcgaaccatcgccatccttgtcaaataggctaaaagcttccttaaactcggagatctgatcgtcagtgagttgatccgccattgctgttttcttcttctactggttctctgatcctcagaaaaactctactctctttaccggtttttctttgctttgtttttccaaacaagaaattataagcagagaagaaaaattaaatcaataaaggaaaattaggaaagacagcgtttttaaaattgagatattccaacaatagatttatttagagcccttatatacatataataatataataaagccaccgcacagtctgacccttcaaatgtggggcctacctcattttcatcgtaatcccgtccgctctgactatttgaccttttctcctttttcttcttagaacttgcttgcctagcctcttgtggcttctctttcatttttgccctctttcaattctgtaattgcttttcaccacgttcacttcagattagtgtgggggacaaattcaattcagtcacacaaaattagatattcaattaccattaaatctatttaattacatttctactaattttcttttttaatttgtattacttaattattttttatttattttatgatatttattctattttattagttagtaatattattattttagttatttcaatttttttattttttcaaacgataatatattaaatgaaaatttatatataatttttagatatgtttttcatattttaaaatcaatatttttttactatatagattttggttgtatttgctctgttgattgctaacgtaaaaaaaaaaaaaaaaactactttaaaatgtaaaaat

SEQ ID NO: 297921 - DNA, 3335 bp, Cannabis indica
ttattctctattatagagaatcaattttcatatgtctcacttaacagtgtgtacttagagagatggttaaagatgctcaaactcaaagagaatatataaggccaatgcattatgattttccctagcttaaagcaattttcacttaaaatctttatgttctttatttttgtatttataccctaaatgtttttacttcgagaaaatggtaaagggctcttccagtgccaaatacaagaggtagtatattgttataggtatattaatttcaatatcaagtctcatattttaaggagaaatgttaaccggcatcttaaggtgccaaatatcattgcagcatattatttgtgcaatgtaatattaagttttacatgtcttaatttaataaatattgtaaaaaactgttaaccataatgcttggtatatagtgttgattataattaaaattttaatagcaatactccattttaaatgataaaataatcaactatcaaatatcacgtcgatatatatatatattatatatttatgcaggacaaatatagcaatgctcttaacattaatattgttgtccaactaattaaggttataagtgaaagtttcaccactgtaaatcccacgagattttgatgatgatattctcaactgatcattgccattaatccatcccactctatgtacgtacatagacaaatataataatatatataatttaagagtggaaatggaataatcataacactacacgcagcggagaataattaaataaattaaaacaaaaaaaaaaaaattagagagaatcggtatgaagttgcgtatcaactactctctggctttatgcttctttttctcgttccatttttccctccaccatctacatacatacgtagcccccttttaacactactttttctctctttagcttttcctttcttctcattcttccattactgagtttctctttactgtctctagctcttcgatctccatgcatcatggccaagcaagctatagctagttagatcaatgcaagtaatcagaccttaactttaatggccactcccacaatatcttcactcttaaccaagctcatctctcatttcttccttctttttctcaacttgggctgctttgtcttctccaccagccccactaccggcaccgacaaccacatccaaagccatggtaatcactccaagaaacgaaaaacccagaaagctctctcctcttcttggtcttatatcaaaggaatcttttcggccaaaacccgtaaaacctgtatccaaacacacccttcgacgcctccgcgatcatcccagcactcaatcgtctccctcgtcaatcccgaacagtcagatcaatcctctgctgccgccgtcgtcgaagcagcacctcggaaaaagcattcgccgtcatcggaatctgacatagcagcgggagacagcgatctcttcttcccactccggaacgacatcttcccctgtacggcatgcggtgagattttccaaaagccccatctcctcgaacagcacctgacgatgaagcacgccgtttcggagctctacgacggagattcgggtaaaaacatagtccgaatcatattcaaatcggggtggaacgatacccgaaataagagcccgattatccacagggtactgaagatccacaatagcgccaagatactgactcgattcgaagagtaccgagagacagtcaaagccaaggccgcgcgaaacggcgccgttcagaagtcacgtgacgagaggtgcatcgcggacggtaacgagctgttgaggtttcactgttcgacgtttctatgtgatttgggtgtgagtggaagctcagggatctgtaaccaccagtactgtagcgtttgtgggattatcaaatccgggttctcacccaagttggacggaatttccacgctgtcgagtagctggagggcacacgtggcgatcccagaggagatcgaggaggagtttcggttcatgaacgtgaaacgggccatgttggtatgtcgggtcgtggcgggtcgagtcgggtgcgagacggacgatgtggagaaagatgacggcgttgggtttgactcggtattgggacgtggcgggaatggggcccacaccagactagacgaggaagagctcttggtgtttaatccaagggctgtgcttccatgctttgtgattgtgtatactgtgtgagcgtgcgttggatccttgtgttgtcttaattactttctcttatttttcaatttaatttttatttagtttaattacctaatcatcaaatatttgtgaattttttttgtgatgtgtggtacagtacgtggtagtgatggtgttatctaatgggtcccaaagccaaagatatgggtcaattctaatatatatatactagccaggaagatataatatgataattataaggggttattagtacctagttttgagaattaagaactctttgctgtgaccgttttgtttgtgaaattgtaaggtaagaatatagtattttacttcagccttcaggatatctgtcacacagattttaaattaatcacttactatttcttagttcaatattaagattggtagacgttcgagatgtgattcactgaatttcggtgtctccagcagattctatctttttttaatatagtaaaagttttgcagaaatatgtattgaattaattgtagataacttttcctatcacttaccaggaccaagacactaaactgatagtgtattttaaatgtagttctcaatagaaagtatattcttatgttgtttttggtatatacgaggcacatgcacacacaactactaatataaatatgtgataaatttaaaattttaatgctagaaaatcctgcattaaaatttaaacataatctctttccacaattccattctttcaagcaccttcaaatacgaaatcaatattattatcccattttctagcatattttaagatttcacgcaaacaaagtctaataatatagagaaatggaaaaaaaaaaatcttacaaaaaataattttctctctgatttgaattgacatcttggtttttcaaaactctgggtgtaaaagtttggttataggagttgcttgttttttagtcatgaacgattcatttgactacgataataatgatgatggttatcttgaggcagtttttgtggatgtcgataaagatagtgttaagagaactctaataggaaaattgatttcctccaaggtgatttctagggagcataaagaagagtaatgctatcatgactgtcaagacagctgttaagggtcaaaatattaacatattttatagtgtaaaaataca

SEQ ID NO: 297922 - DNA, 3428 bp, Cannabis indica
ttaaatggaaaaaaacgtgtccagatataattttccctatttaatatattaaaaccagtcaccaaatattagtgtaatgatgattataaattaaaatatatttatggtcagttagataattacatttcagtactgaatgttatatactgaaaccaaattcatcatatcaatttcctaagataacaaagcacaagtctctttcatttacaattagaaaatgtttaacaatagtattctgatacacatttgtgcacagttagttcttgaaagaaatgtagtttattggtaagagcaagaacaattacaaaaatcgcaagttatttgagaaacttggtaaactccccaaagaataatgatcctaactagccaaccaaattagaagacacaaacttaaaaacactgaacacagccactaaagacttaaggcctaacatattcatattcacaagatatgtagtacataatacaatagagtttcatcacaagaatttggaactaccattgcattagaaacttacttacttagcctatctcttctttccttttaatttcttcttatttttcttggatttgttacctccctgttttttgctttccacattttgactgctacttggtgctgctgcagcaccagcagcaatacttgcttgccaagccgatgatagctcctcatccttagaaaccaactgatcctcagaactagcttccacagcaactccaactgagctctttgaggccttaactttatctggaaacaatgttcttaatatttcatccatggatgtatttgaactcatacttacatacacagcatttggacatgactcgaacggacaacatccccataagttcacaatcaccataggattgttgatcttctcaagagcttcagcaatcaaattcacatttatattttgactgttgtttctctttactccctcgagggtaatacgaaaagagtgtggtagtttttcagttatatggctcttcttcaacacatcgataagtgaatcagtatccctactgatgttgacacaaaccaagcataacagcacaaccagcctagtaactgctctgggagattcccttatccagtcattataaagaagttctaggataattttgcacgagaatggatgtgctagatttggtacatcatccaatccgtggaagctggccaacttttcatggaacataagccattcaacaaatgtggatttggtagatacaaaataaccatatatggaagatgccccaataacaaggtgctccaaaagatacaaaaagcaactaggagatatggagtccttacctgtcttccaattgttgatgtaagtactttctaaagcacttctgagcgaaataagaagaaacatttctgcaacgaattcggtagaaaaaataagacctaatcccctaatgtcgtgtagaaagccaaagaatgacttccatgcatcccacatttcattatggttaatttttgatataatcttctcacagagttctttattcaccttcccagatccaagaataatcatggcaattctttcaatttttcccttcattgagctattccttagactgactgattcagctatgacttggttcaacatactcttggtagtgtcggttcctctaagtaaaatcatgtttttattcaatggtatctgcccatctgggaatatgtaattaactatctttttggtagaagattgaatgtacttcagcagattctcagactcatgacgcctcagcttcagattttttgcatccagaagaaatgttgcaacctcatagatcagagtaagagtcctgcttttgaagaaaatttcatcacagttcttgggtggaaacttataaagagagtcaagtctgttcaaaaccttgacaccaacagaaagcatctcagaacaccaatatgtctgagcagcagaaacaaactggtgtaaatcaatggatactaactttccactaactgatgttgtagcgacatttcttgcccagtccgcctcggggtttagaagaaaaaatattggattcaaactgttgaactccctccaaacacctaaaaaattcaaacagaactctccataatatctgaactcgttaatttcttgggtctcaagacatttaagatattcaagaacgccaacaatctggcccttccaaaaattccaaaagtagaccagtgactctattgatacctggtttttagaaatcatgtcttctgaatgcttcataacatcagtaaccagttcctcttcgcaatagtacttggttcttaaggaaatgtgcatgtccagaatttttctagctgatagaatctcgccagtaacactcctgtacctctgagaagcaatcacctgattcaggactgtaatcaattcactatgttcatttgcaatgatgtcagcttcagtgcaaacaatctcataaaactcgactgtatcattcctggcaaatgttttcgcttttattaagagatcacccttttctttgaactgctttaagggccagcccttcttaccttttgaccaaagggagttggaaagcacataaaaaagaataagattagctgagtctttaaattttccggcttttcccagcagatccaccctgcgtaatgtatcgccaattagcttagcaatatttgcagcttccatgaaattccccttttcttcttccaacaacaaaagttcatcaaagcagcacaacgaattcaagaagttccgaattgaatccatggaattaaactctttaacaaattccatcatggacctcttatctttaatctcaaaataatgagaagcacagctcttcaaaaacatctgttcaattctgtctatttcaatgcctctctctgcagtacagcaaccatttgttggaatttgtttccaacatttaatgtatttcaaacccttctcaaataactttccttttgaacaagctgtaagacattcggagaagaaattccctttagcataaacatcagcagcaagctcatgacaccctgccagagagaaacattccccagcttttcgaagctcagattcaccaaacttttctaaataaatatgacctgtcgaataaaaaaccaaatattaagaaactattaaaattgcaagattaaagtccactgatttgaagttttattgttacctgctttttcatactctcccaaagcagaaaaacacctggcagcagaatcagctttcccaatagcttcaaaaatttcagcagcttctctgaggatggaattagcttcttcaggatttgaaacgcgcatatgatcagccatagccttgagtccagcagctttagacaatctctcccaatatatatcaccagctctttcaaagcacaatgtagccatttcatagttgtgttcatgaaagagctgttaagaaaaaaaaaagactaaagataca

SEQ ID NO: 297923 - DNA, 4273 bp, Cannabis indica
cagtgaagttaacagcaaatattatacataattgaagttccatccaaaacatggttttctttaagcatttaattatttaacataacatagtgccaccaacctttcattttcatccacatgcaagagttatatatggactgtacaccactatcacatcaattgtaaagccattttaaagaatccaatatataattttccttacaaaactataaataaataacactagtatatgaatgtgatagttttgtgtcttatttgggatattaaatatttttatctatactagaaaatcaattttgatgaaggctgttttatgtaatgctcttttttcttctgcaatggatctaaattagttcagtcttaacttaaacaaaggtttgataagcattaataaagctgaaatatacaaatctatgcaacgtgggattcttattggatccggctaaagaaaaaaaataataataatagcaaattattgttgtcttgtacttctataatcctggcaccattatttggcaagatcatctggtcttgtccccagagatttgagtaaataatggaggaggtaacatctaatttaattccctttcttttaagtaagaaagggaagaagcaacaatttcaaagcagcatatcagactttgatggcagcctcttgaagaaatttacaggcacagaaggcattttgctcctaaaccttggatgtctcaaccaaaagagtccaacaagcaaagcaacaacttggaatggtgtaacataaatgaacacagcccaaatcaatgagaagattatgaatatagcagtggctctaggatccctccaactcaatatagcctgagctctttccaattgtgatgccaaatctcccaccactgtttgcactcttccagctacgctccttagccggtcgtacctcattcgaactatgtctgctggcttagaagtcgggaatgaatcgaattcttcatcgagttcatcggggtgtgcaaattcagcttgcgaaagccgagcatccatgtgaggaggatgccttggcctaaaccgatagttccaaattccaatcacaaataggtaaaggaagatggtgggcaatatcaattccgggtaacaaatcagcatcaagaacaagacatgcactagacatgtagtgatggggtttttccaatagcaaatgtcatcaagccatctgcaaaccgcagaaaggcccgagagaacagacattatgcgttggaaattcgccttgcttctcctcaagctccacatatggtaatccacatccaacatgtactcaacattctctaaccgaagcggggctcagcccgagccagcctcatggccacaatctgctgagcttggtgtctcaacatgtcaatgtgcttaaccggtataggattcacataatgcatcttgggaagtaatggtttaccatattgggtaaccatattaacccaagccatacaagtaaacctcaatgccaattgaagctccccatgttttttcaaaccattgggttggagaaccaaaagggggtaataatgtgtataaattcgatctgtttccaaagtcgaaaggcgaatcctaaccttcccaatcctctgatctctagcaccttctttacttccattagtatgagcattgtcaaaaacaccaatggtgataacagtacaaggatcataaacttcccaagtgtactgctcattccacctaggagacaaagtatcaagaagagttctagttcgaacccatttgttaccatacttagctacacaataagcatcagtagtcctcccttctttgctcttcataggaagtaaattcctagcactcaaaatcccaagttcaagaatcccaatattagccttcctaaggtgtttagaagaaggctgaagatcactactaaaatgagtagattcatcaagaacatgataaccagcttccaaacacaacatcatcaaaatcttactagaaaacttctccttcttcttctcagtctcttcctccgccgcaaccgaaggcttatgaagattaaaccatctaggatcaggaaacttactagtctccattctctgagtagcttccctaacaggaagaatcactctccccaaaatctcatctttccctggcccaactctatcctcaacagtcaccataatgaaatcttcaaaaggctcagacacaacaaacataagctcttccttccaaacaggaccacccatacgaacctgtgtaggcctagtaactctaagttggttacctaattgaaccttcacatgagtattagacaatgctcttcctttatcagaagctaaaaggtcttgagcttcaatcacatgaattctaaggtaatacaatttaggagaaaagtaaactttagaacgagtgttagtaagatttacatggctaatattatgagcatcagaatgccaagcttcagggaatgattcatcagcctgagtccccatccaaacagcaagcataacttcaccttttgtcttcatcccatgtttatcttccaatctataccattgaggagccaaaggactatctgggggtactctaagaggaacctccaaaagatcaaaatgaactcgacccacaaaatcatcttttgcaaagtccttatctttaacagtaacttcaagcaaattggactgtaatctttctttggaaaaagcaaaaatctgtttccaaattgggttttgattcttctccaaatgctttgttacccctttgtagttccccaattttacttccacatatgggtctacacttccggtaatgtccattaccggaagatctctggctttcaccacacttacataaaggtaatgcatttgctcaacgagatcgtaagtgctcgaagtcttgtctcctctgtaccttaaccgcgccgccaccggcggcctagtctctactaaagcaaattcagggttctgtcttggtggcatttgcattctcatcactgccgtcgccggtcccggcggagttgcctgagcaaaatctcgcctcatctcgaaacccggtggttttgaagacattggtggtggttgctggtgagcaaaagcagcatggccatggccatggctaccaccaccaccacctcctcctccggcgccggttccgattgagtgaaaggtcttcacctctttctctttcttattctttttcttgaatatcttctcaattactggctcgctctctcgttctcgttctctttccctctcttcttcgattttgttggtgttaatttcttgtaatggagtctgatcttgagtactctcaaccaccggaggaggaggaggaggagaatcagaataagaagaaccgttaacggcgtagattttgagagcaatatctcccttaacaggcgaaaagagatcttttttatcaagtgggcatctctgaatttgggcatcagactcagacatcggaacagaaacaccggagattctgacacggccgagaaagtttttacgggtatggttgtcgtcggagttgctccgatcgttgtaaacaacaacgtctatagtcttgttgggtaaatctccatcgatgttaaagagaagcttctcgttccattgagggttgagatctttatgcttagtctgagtccggtgacgttggccgttaaagtttacttcgacgaaaggactggcggagccatggccgtctttgggcatgaggtcagtggcatcgtgaatctcaactactaacatactcatggcgaagaagaagaagaagaagaaggaattagtatcaaagtaggaagaaaaattgagggattaacaatggtggattgaagaaagagcagagaggtcatgtttgagaagatgatgatgaagagagtaacttaacactttgaagagataaaatgtttggtggtgtggtgagatgaggtggccccttttgataatattaatatcacttttgatcaaattttttatgaaaacaaaaaaatgtgagagagactgttattaagataggtagaagaaataatgttagaatgataaaatgaaaaatgaaaatgatatcacttcattaaatgatttttatgtttttttctaaaaaaaaaataataatgggaattctattaataaatatataaaacttgggtgattgatacaatctaatttgggggaaattacactctataccctttttatattgtcctctttcatttttaccctcttttttaaattctatcatttttatcttttttttttaaacattgtaccaattttgctcctgtcacttcaagatactctccatgtga

SEQ ID NO: 297924 - DNA, 1900 bp, Cannabis indica
aataaaataaaataaatagtataagaaccccaaattgcttaaaagaagaaatatgagatatcattttttataattctatgtatagagaagctaatgatttaaactagcaaatattttcttttgaagttaaatattgctcattaattgttcatctctctaaattgcattaatcaatttaatctctccactacgtacaaaattattacatcaaattaataaacaccagtacatataacataattattattatatgctttcatttaaagattattcttttaataagaccataaaatccaaagcacacacataaggtcttatgatatggaaattaaatccaaagtgagtctaaatatataatagaaacaaacaaacaaatactagagtatatgaaccctagacccaaacaaatgttatacattgaaaccctaattaactataaatatatcaaatacataaccccattaagaaattaagaaaaaaggaatcattttgaagtaataataataaacttttgcttattttttcccctttcattttcatcatcacctaccattgagattagcaaattgggcaaacatcgcagttccagagtgttcatcaatggtcgcttgaacttcagccggactcttgttactctcctctggtaatgacactggtcgattatctgtcgccggagtactctctcctcctccttgctcgttttcattggcttttccttgcgaaaaagcctcttggagttgcaaagcatactctaaattccacaacacatctcccatagtgggcctatcaacaccgtgctcagcgaggcatttttcggctgcctcggcaaacttcttcatggattctggatttatagctccaaccaaaagcgggtcaatgatcttatcaagcaacccttttctcttccattgcatagcccaatcagccaaattgacttgctcgcgtggtagctgaggatttatagctggtcgagcacaaagcgcctcgagcaaaacaacaccaaatgaatacacgtcagatttatctgtaagttgctgacgtcgaaaatattctggatctaaatacccgaaactacccttcacagctgtgctgacgtggccttgtcctaatgccacgtctttggagagcccaaaatcagcaaccttggcagtgaagttgtcgtccaagagaatatttgtcgtcttcacgtcgcgatggatgattccttgggctgtgccagtgtggaggtaatggaggccacgcgctgccccgatacagatctcgaggcgttgtttccatgttagtggggtagtgagggatttcccatagaggtggtcgcggaaggggccattggacatgtactcatagacgagaatcatctcagaattctcgtcgcagtagccaattagggagacaaggtggcggtggcggagtttcgagagcatttgaatttcggtttggaattcagttatgccttgctcagattgagggtttcctcttttgacagcaacttttgttccatcgtcgatctcagctatgtagacatttccgaaccctccaacaccaattatcgcattggcatcaaaatttttggtggcttcttgaagctcagcaaaggagaagtatctgttagaaataaaatattgttgtaatacattaatattatataaaggaaaagtataataaaaatttatcaatttttaattaggactaatcatctataaattatataattaattaaagaatgattaaaaaataaatccaataaatcgagcttaaatgaaattaatacttatatacttatacagtagaacctctatccaagaatacacttgggaccaagtaaattatattctaattgggaggttataactaaatagagttacactagaaaaaaaattaaaaaaccaaaaaatatcaa

SEQ ID NO: 297925 - DNA, 1608 bp, Cannabis indica
gagatttatgaaggaattttctttgccagctcctttgtttctcttataaatgaggtcagcaagttgaggaacataatgaccttcaacaacaataataattataatacatatatttatatagatcattagctagaaattaaagagagtaattaatattttaaggcaacgaatttctcaactacaagtcttacgtacgtacacatttttgaatttaattaatatatattttagtgcgattaattagctagcttaatgtaataaaataagaagttgaactacaattttctttttttatttatttgagaaaaataaatgatttatgtaccagcatagctctctccagcaatatagaaatcatgggatttgaaggctggaaatctttgaaaccatccatttaagaaagcataagaatcttcagctgtgactctatccccaagttcattcaaatcgtttgatttatttgtatatgaaaaccctactcccacaggtgcctccaagaacaacatgtttgccactgagaatatagattaattaattattaattttaaataatatatattttgtaataaataattaataccaattaataatattaacctttgttccatgaatatttgttaagaattagtgttccattttctcggacaagaaatgggcctagctcttgtgctgctccatatgcaatcgatgagcacccaggtcctgaaattatcatgaatttatttatctatttaattattttaattctcatataaataaataattaatggataaatataaagtacatctgtaccttgtattgttttatttttctatttttaataataatatactctgtgagctgtaacttgagttcagacaaactaactatatatatgtaatgtgaaattaaacagtactaacaattacaaatttgcataaataaaatataaattacaaaattcatatttctataaataattttcgtttaaaatataaaatatctttaaaagtctaactaattagtttgacaagtaattgaactaccatatagattatttatagagcacaagtaataattaattagtcaaaacaaatataatattttcccactgaaaaagataaagaaaagaaaaaggaatttctttactttaattttttgaataatattatgaaacgcgtgaggagtgagtgggaccaatgtttatgtaattatgttgagcctttttaggcaaagagctatacacagtaactgtgattcatatatatcttattatggatccaaacaaaaaattcattattctccaattctgtaaaaaagttaaaataacaaactaatatattttttttattcaaaataaaattattcgaaaaagagaaataattatcatgattacagtcaagacaacgacagtttcatcatcgtcaaagaattggaatgcacaatcatcatcatcatcattcaatccaacggttataaacaaatgagtcaaatcagtcaaaaacatatggcccacaccacaaattgcaactttgttgtcatgaagatattttttcattttttttaaagtaccataatcggtggtggaaatttgaaaaaggtggcatatatgcaaaaaaaaaaaaaaa

SEQ ID NO: 297926 - DNA, 2982 bp, Cannabis indica
aaatctgactgctaaatgtttaactaaccaaagagaacaaaagacagaagataaagatgttaactaacctaaaaatttgaagagtcgagaaacttcatgcttccagtatcatagagaaaacatttatgtaacgatgacaaaattgttgctctaaggtgccagtttccaattgatatactggtatcttctgtacttttcgcttctagaattctggccttcttcttccgtgttaaaccagaagtctttgcatccccagatactgtgagaagacggacacagccctcaagcaagtatttgaagtatggaataaacagagacctgcaatatttatgacaactgattttactaaaggaaacgaacaatataaatgtcggtaggttaacaataaaacctagaaacttaaagcaataaatagtatcatgtagcaacagaatttcactactactctttccttcaagagccttgtatggttgggaaaaaacattttctcaggagtgttacaagaatgtatgcagcagagatatgcacaagatatatacttgctttagaacttatatttttatatttcatgtgcaatttaattatttttacattaattcttaatatcaagggttgcattgcatcaacaaaaaagcattcagatttcatgcggttaatgaagtcaaaactggctccctagtttttcattatgtagtaaacaaaatcaacaaataaaagtgcattaaaggataactgactcacctatggttctcagcaagcttatttaccataccatagaatgatactgctctatccacattagtgttccccacaacaccatcttcaacatcagactctgcccattcaatactccttatgaaaaggggcttaaacatagtctccgtcagtttcattgtcagagaaattattgtattggtaacacttttttctacagaatcaatatcctggagggaagctggcctttgacggcgtagatccagagcaagcaagcaaaggtcaaaaatctttgcatggtaaccactaacagatggtctatccattgaaccgatcaagtttgccaacattccaaaataggctgtcaaacttgaatccccagatgaaacagcattttcataaattttcagcaaaggtggcaaagcaagtcgaacctggaaaaattgatacaagtccaagtaaccaaatgagtaataatgtgaaaaaaaaaaaaaagtacaagtcaaggtgtactagtttaacagggcttacaggaattttttccgctattagtctccgtactgtgtcagcctgaaatttgactttttgataagatcctgttgcaaagtcgtgattcagcactataactgttatgatatctccaaggtacggatttagaaaagccccaagctttccaacaacagcctccagaaccagaagaatggacaaaataatattctctttagaagttgatgatgcagtaggtgtgtcatcattactttttatgcacttaacatctgaacgtaaagagatctcgcgagatatcttaattacattctccactatgcatggaagctcaactaacgcccttggcccaagaacattgacaaaagcaccagttgtccgaaggcagccagaagaaacagcaaaattttctggagtaatatttttggtaacagatggcaaacaatcaccaaagatggaataatcaaaaggaaacctattggcaagaacttctaaagctgaaacagctgtcagcttcagagaatctgaaacatcgacagaatcaactatcttcactatttctagacacagtctgcggaaagattcaagagcggtctcttccatatgtttccattgagcatacaaatttctctccttatgccttgattttgttgtatcgctttctctcaacatttcacacaaaaatccaagagcctgcattaaaaattcaggtttattaagttaaacatgccttcaattacatatgacttaaacaaggagcctgacaaacatacaaaaacgaggtaacaaatactccaccaatatgaacaagtaacagttattaagtacctttttccccacatttttatctccgtggtgaagcaatctaatgatgccgttaaaatatgctgatggaatcatgagtgtggtaacagtcctcaagacagctcgaatgcaatcctttagttctttccttataacaggagggacagtcatttgcttcttctttgtgtcaacaagttgagataataagcctatctgctccatgagatcttcaagcaacacctgtgaagttatatcaagcaaacatttacactcacactcagaaaattaacagcacaaacacttgtttcaaaattctcaacctgaacattttctgattccaactttaatgcaaactcgggatcatgcaacttgtgctgggtgaattggataacaaacagcaattccacgaacatctcctggcgcagactaccagtacctacttgttgaagtagcataacaacggagggaagccaaatcaagcatggatattgctcacatatttgcagtgcaaatacatactcccactctttctttgttgaagaaatggagctatctgaagcactcatactatcagagaagagtgacccatttcttgaaactaatgactggaatagaaggacaagtaatgaagtcaagctattagactcccccaatatcctgcacacaagcatatcgaaatcaactacaagtctaataataataataaaaaattaaaacacgcatctcttgacagttaaacatgagtgaacagtgtacctcaatagatatactacggttgacagtcttctatgctcagccatttcaggcaacacacccataaaaatctagagaacaagaaaagaaaaagaaaaaacaagatcagtgcttacttgactagcaagtactcccaggtgatattctcatgcaaatatcaaataatgactagattacctgcaaaaagtttgtccatgttttttgttc

SEQ ID NO: 297927 - DNA, 2343 bp, Cannabis indica
ctaataacaccaacaacaacaagagactgaaaaaagtgtgattgaaagaccttttggtcaccagttttgaccttggcagactggtcgtccatggaatccacaactacaagtgatccatgctgcattccttgaaactaaggacaaatccaaaaagctgcaatcagatacttctgccatttctgaactctctactacaaaatatatacagggcatatttttcttttcttttaacaaaaataatgtttaaacaaagtgaataaattaattactcggtggttaaaagaccaaaaagaaaaattagtcttgtgataaaaacttctgatgaatttatatacataattaagatacgattcccataagagattctgtgaaagccatggcccatgacacagtagtaagtagtactatagtagtatagtactaactctttgcaaaattgggtcccatcatatgaccctctccctgcatcgatcaagtaaaaaacaaatccaagagattttgcaccccaaaataaaacaaattttttgataattccaagttgacccctccattaaacaaaaacaaaataatctaaagattcccactttagtaataaaagatttgaagaacaggggaaggagagaagagggtaatagctaacatggtttctttcatcagtgtcaacatctgtagaagtgtcagtctgctggctattgtctgccatggctgaatcaccccaattctcaaagtgtccgcttcccaaaggcgaaacgacgacgttcgtccgcttctgctgctgctgatgatgttggtacaccacctgttgatgctgctgcagcccttgccctttaccttgtccttgcccttggacttgaccctgccctgtgtccacgcagctcgtccctgtagtcgttggagctatgtccaaacacactgcaccctacaaaaacgacgtcgtttgtcacaacaaagaaaaaagtgggtagatagagtagagaagagatggcttaccgggttgaaagtctcgtgggggtgcaagttattaggtaaaacagcgatgttgtttgattttaaactgaagatggagcctacaacaaaccaaaaaatatccacacacataaaaaggagtagttagagatgtttatgtgttacttacttgcaaacgataatgtccattttatgtatatatttatggaaaagagagataaataagtaaaaaggggatacttgggcttaaatcaacagcatcatcgtgtggaaaagcggctgcggagtgttcaagctccacaagatccgagaaccgtgtttggtttcggctacactcatctcccctgttttttatttttccatatcaccaaacagagaaacaagctttaatatatattaatgaaagttcttagcaagttgacattctggtaaaaccaaccatagaaaacagtaccaaccaggcattaaaataaagagaaaaaaaaatggagtgataaaaaagattagacacacaagacctgaaatagaaggaagagtgagtgtacaattcagggtttgatggagctgctcgaaagctttgcatttttcttttactattattattattattattattataactacaaaatttagtagtggtttaactctcctctctggaacctttatagagaagttgagatgagtttggattacatgtcaaaaggaaaaatgaagtaacaaacaataataatacagcaagctctttggagaaggaaggaagagtagagagatagatggaaagagcaagagcattgaagtgaagaaaatcttgatgtatctttaagaacaggatagcgtatcagtacggctcctttagtatatattaaaataatttaaggaaaagaacaggctttttattattgctttctgacttgggattttagtttcccaatacccccacataggcacatacatactacttctttctcattttcaccactctctcaccctcctgcgttcctttcactcgatcactctttaatattacaaggccttcttttgtaccaatacgcccagtgagggcgacaagtttagtggcagagtaattacttcttagttaacaccttcaggcttgctcaactcaccaccatagaagtattaggtgtatgtaaaaatgcttatatattaaagaaaaaaatactccataatgatttttttagccttttgtcattattttaggacaatgaatggggctcgtgtaagtgtaacgcaccctatcgaaaatggggccaacccaccttagagagtcttaataaatgaacatacataagcatggttgaaactctcgtaattatccaaaaaaaaaaaaaagtcacacctgttaagccctcctctttt

SEQ ID NO: 297928 - DNA, 5460 bp, Cannabis indica
taaaatatattttttagttttttattttattttaaattttttaattaaaattattatttggaccaataaaaaattgacacgtggcactttatttgggtttaacggatccgttagaaaaaggaccaacggacaaacaaaaattgggaccttaggtattttcaccgccaatttttgaggttgaggactaatcggcatcaacctcaagtttttggggacttttgccgcaattatcccaaaataaaaataaactatattttagtaatgcattagggaaggcgacccaaaaaaaaataaaaatcatattttagaaagaagtgcaacgtttgactactcgtggtttcacacatcaaccttacatggttctattgcgttttcttgtaacagcctcttgttcctcaaaaaaaaaaaaaaaaaaaaaaaccttaacatggttgtcttaccagcgttggtgacaaggatccggacaccgccactgaccaaacatttccgtaccctcagaaggcccttaactcctgcccaaacccataagatggtggagattcgagccacctccaagagacccacttgccaaacctgcactaaacctgccaggctctgcctctgctctcggatcaagaccccggagcttgacaattccgtaagtgtgaccatccttcaacacagtttagagcaaaaacaccctcttaattctactagaatagctgtgttaggcctcaagaatgtcactgttgcaactgtttctgatgtgaatttggaagcccggtttgacatttggttactcgactcaaaatctgaactgggttctttctatagatcgaatggaatggaattcgatcatgttttggggtctagagatacccagaaattgattgatgagcattgtgacgggacaagtacaagggaagaaaatgtggatgattttggacacaagctgtttgcgaaatgcccaacagaaaaaagcaatagtatgattggttctcttgagacgtttagcttggggagatatataagtggttatgataatgctcaaaatggaatagaagatctgagtaatgagagaaaatctggcttatcgaagagaaatggaacatcttttaagggtgaagatgaagttgctttggaaactcatcatgagaaactatttaaacaacctgatgttggagataagacatcagctgctatgaagcttaatatggtgtctgatgagagcaagcttgctaattttgattgtagtggaattgaagatgtacaaagtggaaaggaaaggcctgttgtaacggcaacaattagcaaacaaggtgtagttaagcatctttgccatagctggatgctgcaaaacaatcacgagaagccaaagtttgataaaattttagacattgacactgctcgtgatgtgctagaaaaagggtttattgtacaaaagttgcaaaagcggcggcagcaggcgagcttggagttggaagagcatttagagtttgagatcaaagttcccccaggaactgtactcttgtttccaactgaagaagcaatgagtgttgatggactaaggactgctaactttgaggtgaagaatttaattgttttggatggaacatgggcaaaggcaaagagaatatatgctgaaaacccctggttgaaacttttgccacacttgaagttggaattggataaggtaagcttgtataatggagtgaggatgcagcccaaggctggatgtttgtcaaccattgagagcattgtgtatacactaaaagcagtaggagatgataatcttcaaggcttggataatcttttggatgtctttgagtcaatggtagatgaccaaaagagatgtaaagaaaagaggttaagaaatgacttgaattccatttaaaatgagagtcgttttaaaatatgaaatgtagtgctattattgcactaccgctccgtttagttcatttaaagcaccacttgttgtaagccatgtttcattaattatgcagaaagactttttttgtgttgtttttatatcacacagctctcacttctgactcatcatgcaaagtagaaggttgtgttctgcatgttcttatatattttcatatgtaataaatatacgttacagaataataaaaatacgtaatttgaaataaaaatacaggcatcatgccatctgctgcatgcactctatgctctcaccatgatgaatcggttatacacgctttgtttctttgcaggacggccaagcaagtttggaaaaattgccaaattgactttactgttgcctgttataatacatgcaaagattaaattttcatgttacctcagaaaatcatgataagggacctaagccagcatctgttgctcttgggtgtgtgataggaatttcctatcattacagaagcaaaatagaggaagaaagagcaacaacaatggaaaatagctagtatattgatattagagtgataaaagagaacaaattgttgggtattcgacagacccagtcgtctcccaagagctaaaagctccttaactaaatcattcacacccaaacccttttattcttctaatactctcctatatatactctctcaatatctctattacaatgacccatattgatataccctttttatttatcctaaggcctaacaataccgaccgcctgaaattcaccttgtcctcgaggtgaagaagatcaacttcgatgcgtgtagtcctaaactttgctctacctctgtcaaagaaccaagccagcaagttgttcaagctaaaacaccattcaacaagccggccttgctcgaaaactactattgataatcttcatggcagtatgttctcgagaactcaaatatgtcaagctttatttgaatattaccaacttgaagaaatagaagatatgactcttgcttgcgcatgttttgaaatagctggaagatgaccttgagtttccagtgtattactaggaaaataaatctttataagttgcgcaatggttgcagtgtgctcactctcttcatactccctttcattcccttcactgatatcacaaatctttatagccatcttccctagagctaagatttctcatattttcaggtctactaataatttggcaattgaatttagttggaggaaactccctttccaatagactgtctcttatgttatgtatgacttatccggattaatatgtaactgcatctttttctcaaacacaaaaaagttaatcagggcacaataagaaggaacagttacataccttatatcaataataatacaaggactaaaataattttaaaatgaacaatttatcatattttttctgaaaaaaaaaaatgtgccaagacactgaaacaatttatctagctcttggctagtgtcctggttctatacgaacattacactaaacttatgtaaatctaatgatcttgaagaatttaaactggaggttaaaaaggtttagcagaaaaaattaatataaaggaacaaaaattgacgatctctcatttaccaattaataattctgaaatttacatgtctgtattctgtacaattataagcaaaatctcaagacatgattgtgtaaattttcaaaacaaagctatatcataacacaagcagctagtttataataaatgcagagtctcgaatatgtatttttcccattcaaaggcatcgactctttgaacttcttctaccaaactttgcagcccttcagattgaggacttccaagtagatgtgccatgatatggagaagaatttggcaagcatggagttcatctattttttgtaaatcagttaattccaagcagagatccttccatggttggtaaaatgaccttcaaaaagcaatgtgcaagatcaggaaagtattcactaaaaaggtaattgacaggggattttcatgagatttcacatctataaactgatatgcaagtgaaacagaacccagtagtgatcatctatagttcatgatttgtttttaatctccgaaaatatcaatataaacgagaaagtgaaaaagaaaggaaaaatcataatgggcagaaaaataacaatgtattaccatctccatgcaggattagcttcaacagggtagcgtattttcaaccacagtgattccaataacagccgaaccccattttttatgtgtatcatctgaataagagagaatgaaattgtaaataaaattagtgaaacaataaaataagcaactgccaatgcaaaagtaaaatgtcaaatgacagtgtcatttaatcaatgtattgcttacaattgtaaacttcactactaaaaaaaataaaggtagtgcttacaattgaatcaaagttgtcccatccttaagtagttattgtttgactttcaagcaaatggaaagaaactaaaatcaataataattagggacatttgcggtgaaacaccttaacatttacaattgttacacatatgaccctaattaaaaaaaatgacggcaaaagtaccttattttatgattttgttgcagtcgtactattttttggccatcaagtgctagctcagaaacacgtgacgatataattggcacttaacagccaaaaaagaataagactgcaacaaaattgtaagataaggtatttttgccgccactttttttattagggtcatatgtggagatatcctttataattattatttctaacccattcttattgttcatgcattctttttgtggtttctctcttaaggcttgctacctttccaatggtgtgttaagaattaagacttgcaagttagtgagttagattataatctgtcccctagtttagagctggttttccttgagctttaccccgaggttcctgcctaatgccttttgatgaatttcatcaaccctaacccgaaataccaaatccagattcaagtaattgaagtagccaaacacacgaatcaatatacctgcaagacttgaggcatttccaaggagaatactaagagcagatacgacagatggtagaactttgtggttggtgcgaacaagcaattggaggtagagaattgtagaagctaaaaactggtgacgctgaattctatcttctctgccttcttcacattcagtttcagaatgttcaaataaactcaccagatcctttaagttcaaccctagctttggatccaaatctttggattccacattaagtttccctaggattatggaagcagtaagccaacgtagaagttttgatactagggattcttcagattgctcatcctttgaaatagctgagagaatgtgctgaggttctttgttttgatgcaattttgctgaatcagcttgcaaagcagaggaaattgcccatccaatgaactttgatagcttctctagactctggaacacatacaaaacaagtattcattttagcaacagttaaatcagatctagtcagttgaagaaactgggtgaagagagaagataattcattagacaaaaacaaagaatc

SEQ ID NO: 297929 - DNA, 1335 bp, Cannabis indica
aaaatcaagggtctataattaatctacaaaactttttgtggcttgtaatggttatagaaaatcaatcatataatgacttttacataatataattaattaacatgtgtttggataaagataacaacagatcctgaatcaaaataacgttccatattattactattactattactattatttattcttggtattgttgattcttgatcaacaatagcactattacttattgttgttaactcttgttgttgttgttgtacttctagtgacacttgaatcacttgtggtggaggagtagcactactactccgatcgggagccagttgaggtggtggtggtggtggtgacacggtggaggaggttgtcggggcgatcggattagggtttttgtgtttgggattgggaaaaattgaggatctacaaagtgggcaagttgtgtttgtgtgaagccataaatgtatgcaatctatgtgaaaaacatgcttgcatgatgggacttggagtaactcttctttcattatatattcacccaagcaaacacaacatctgtccatattaattattattagtaactatttatatatgaataatgggacaattatatattattagttaaagagtaaataaaggtattattaataaattttttttagcgatataagtactcaatgttagtaacagtataatttttatatgtttcattagtacagattctttagtatcttgaagaggtcattactttctatatcaattgatattattttatgtaattgatcaaaaattatttattaatgataattattgatttgcctattcgtttggctattaattattagataaagatatattttttaaaaaaacaaagtttgaaaaatttagatattattaaaaaaaatatatttttgagtaattatgaattatataatttattctaattttcaaaataatttttcaaaagttctcatgtgagaagctagaaatctaaacttctcccaaaaagatttctaaattaaaaatggaattttcattttttattcactcatgaatggatttttttttaaatctaaaaaactgaagaaaaaaaaactatagaataaactaagtcaaaaaaagtctacaaaatcttgtaatatttcctgggtgtaataaagagttcatatatatataatatggataattatataaaacactaattttttaatttttttttgtcatttttaggtttaattttttatatatatttttacagtattttataaaaatacaagaaaataacaaaaaaaaaatcacatgaaagtaataaaaaaataacattaaaacaacataaaaataatatac

SEQ ID NO: 297930 - DNA, 2108 bp, Cannabis indica
atctatctatctatctatctcatgcatctctctagagattggtgttatcccttatctcaagttatagtatctcattagttaagtacacactgtaacaaaaaattcattcatcttatcaataatggagtttactctgttaagagtgtgtataaaagttggtaatcatgatgatgataatttaggtttctagaagaaattatgacaactcaaggttcccccaagggtgaaagatcttatttggcgatcaatttcaaataaatttcctactaagatgaatctttgcagtaggaaaattcatgttcacaccacttgtccattttgtggtgtttacaataaaacaatgtttcattgtttaatgtctagtggatatggtaggtcgtgagtttcactctttatttgtttcaatagatgttgtgataagtaaggtcgatgaggataagttggggtgagtggtgatactttttgggccatttggaaatctcgtaatgagctagtgtggaataaaaaaagaaaacaagtggaggatatggtgtcattttctttgttaattcttgatcaatagagtggtgctcaaggtgtagggaatatcccttcacttaacctgttattagcatgtgatgggtggagagctggactaaacctgtgatgaatataactaagattaatgtagatgcagctatttttgaagaagatatgcaatttggttatgcctttgtagttcacaattcaaggggagaattgttagcagctactccttcttgttcacaaggggtgaagtctccttctgtaatgatcgcatgattagattatggattagtaaaagtaattagcattaattatcgatatttaatgattatgcatgagtttatatttattatgggtcccatttttagaaatggacattaaagttaaaatttcttaattatagaaattttattacatttaagtgtattatttatgttatatgcaaaatttacagtttttatgatttttgcctagcgatgatggaaaatgtgacggatggccaaattagtcacatgggttactttagaatctttttatttagcggagtattcataagttgatatttagaatatcgagattaggcaggattatgattttggaccacccctaagccattttaccatttaagtaattatgtaagggcattttgggtattttacttcagagtttaggtggttgttttgctagaggacaactggccctaagagattaacttagccgatttccctttgtgtttagacaattaagatttgatcaaaggaaaaagacaaacttgaaaattcttgctctctctcttgcttcgactcaacctaaaccagggaagaactcagatttctttcatcaattcagaggtttctagcaagttttctagtagtgtaatcctaaggtaagccctaactctagttttcttttgatttgtgtatgatttagctaggttcaagcatgcttagttgaggattagttgttgtttaggttagttgagttttgcttcattttctgggtttattttgaggttgtctaagcttgtttggattgaatttgatgattgttggcggagtggaccaagtttgagtttaagaactcaaacttggttcagtaatggtggattgtgtaatttcgagttatacctagttttgttgcttggatttggtttatattgatgatattaggtgttctagagcttatggggaagttttgggttgttttgattcaaaatggtgggtttttgtttttcttcagtgaaaaacggtaggtcgtgtctacagaaacggcaacaacctaccgtttttactggtgcagaacccaaaaaaaatagcttgccatttttcagaaaatggcctactgttttctgggcagtttccctgtttcatggtttttctcgtgttttctcgatatttagagtttcgccatgctatttatcggtaaaaaaacttttaatttcgagtttagatccccgaaagattttagaatgttgtttacccgttttgcgtgattgtgacttaggacctctgttcagtacgtgattttctattcaaatcgactagcacacttgattttaaaaatgaggtaagactagcatagaa

SEQ ID NO: 297931 - DNA, 3833 bp, Cannabis indica
ataattactagagtaaataattacaaacaaactctaaatgtccaaaataatgaaaaatattttgaaatttttatattgtcatgttttactgcagcttttatcatttgcatcattgaagcaggtccaataactcctttagaaagaaaaaaagggaaaatgcaggtccattaatagtatagggcttcaaaaggactacacacgcaacacaatcaagaattgacaaattttccttttggtgtttgtttattggattttctttatggcaaaattcagttgacttttcttcttgaacacaaaactcttgttctaaaggcacatgacatgattattattattattctctttaaaaattaacttatataaaaccataactcctcaagtaaattattcaaagatgtagtgtagtgggatacaacatttaaaggggcatttaatctcaaatgtagttaccattcaagtacgctatctagatagctagagttacagagatgtactgttcatacatgacagagagggccagaggcagataaggtccactattagtgccattactaaatggcactgtgctataaggttggtggccctatcattatgaatttctgtgaagaaagagacttttgtgacaagaaagaatcatggggaccttgtgtagtcagtcctttcattggtggtctcaaccaaaagcttcaaacagcggcataagataaatagatataaagcctttacaaaagctaacaataattcttaattatgttaataacaaaggtgagtatcattcacaaaagaaaacaaatcttatatatattaaaaggtcagagaactacatcttaatcacaatctcaaactaaaaaaaaattagtgaaaactaatacatagttatagttcttctctcttttaagaaaaactaatgatgatactaatgattggtgaagatgtgagtttctgtcacaaaaagcaacaattttctaaaagactaaataaacccgatcgttttggtggggtcagaaaactacaaactaaatcacaatcacaaaactaataaattagaaaaagtggaaactaacaagtgtcgtattaacttaactttcagagctaattaattttacctgagccatcttcttagatcactagttgaagaaggagatatctcaccaccaaagctctcagtgtaacaagatgagtagttagactgttgttccaccccacccaaatgtgaaccacttattacgctcttaaagcttggactcctcaagctattatggccataaccccctcctccatacaccattccaccaccataaggatccggaactgggaaagaaagcctttttttcgccgcagacccacctccccgttccctctccggtgtcgaaggtctctgcctcggagcactctgagatcgaacccgagctttggctgactctgttgcagccatgtaatttggcactggcgggcaaacattaccactagcagtgcttgttgatgttgatccaactcggccattgtaatagtagttggaccttaagcttggtgtttgagatgtgtggaagcttttgtcttctctcccacaacgagggctggctgatcggacttgaataggcctggttttagatggtgaaggcgttacaggggaatgatgatgctgattttggtgagatctatggagaggtgaattgggtctttgtctttgttgttgttgttgatgttgctgctgatgttggtggtaattgggatttgaccttctaagattgggagctaaatatgaataaggctgggaagtatccatttcgactgtctttatggggtctctctgatcagttgaagctcttgctcgggtctcccatggttttgcagccatccaccggtctagccattttggtttctcatcaagctcgtcttcgttccccattgaagggcttctaccatttctccatgccttttcaattgacagttagtaaaaattgcaccaggaatttgaataaaaaagaaacagagaaaagtagaagaaaaagagagttaaaaaataaaaataaacctgttgtgatgaggactgggatgaattcttgtcacgtttcattgcagcttctcttctgtgttgtaacatggcttttacttcctcaactgtgtgaggccgttcgtcccaatcatctgcaacactacttccctctctcgactgtgatacatgacaagaagtaaaagccaaagccaaagccaaaggtacattaggtaaggaagaaaagtactgattaaaactaaaagaggtaccataaaaatcaaagctcatttaagtttgtattgaagagtcagaacacgacattttttactgcttttatcttgaagttgaagagaaggatgttgttggttttccaatgaaacgaaacttaataactcaccatggattttctgtccgagatatcttgaaggtatcgggaatcaaaaacgctagtggtgtcactgaatgctgactttctactaccgtcatgggagagcctcacgcgttgatctaggatccgagcctgaactctaaccagagcttgcatgcatttaagggtcatcttggcttgctttctcacattgtgacccctcaccaaagcctgcaatttcactagccctttaagcgctcgaagagctcttcttgccttcaaaccatacaaaaacaaatcaaatcaatttcccatattttaaaaaccaaaacaaaggtttttagatctatttatttattcacttaccaaataccccctaaaagccgtttgtataacagtggcagcataatgttctctagcttgataagtaggcctagatagccgagctacctctaccgccgcttgagctgtggccattgcagcctcggcagtggccaccgccatagcaagtgcatgcgtttgctgatcattcgaaactgacacatgggccgtcgtagtattattactctgttcctgttgattttgctgtgacactgtttcttgttgatttgttggctttctgaaaatccaccgtcgtttctctcttttctgcacaaaacccagaaagaaaaaagaaaacttcatatactgatctgcaagggtaagttcataagtggtaaccaaaagatattggctttcaacgaaaagaaagataagagatataaaaacaagaccttttctaaatcgtcctctttattaggagatctgaatgctcttttcacagcagtcaaccatgaggagcctcctttcttccccatcagaaataagaaaacaaagataaacccagctgcatttacagctcttaaacaatggaaagattacagaaaaggcagaacacagtatagtaagagtcctgttaaagatatatcatgtagttatcaagttttgtaaggtagtgcacagctcttgaactcagtgaaagagaaagatatttaatacaagtgtgatgagagagataagaagggtgtgacgttcaactgtagagctgtagctaaggtaaaaactataatagattcaatcaaaagcatcaaattttattccctctttgagaagattatatagatatagaatagaaatagaatttaactaaaggctaaactctatggttttgggtgttcttggttcgtatttgtgacatggaaaacagtggtggatggtgtcagaaagtacgtcaaataactattgcttattattaagccttttttaacttataataaaaaaaaaatgaaagagtggagagaaaaatgtgaggcagggagggacagatttatgtggtggggttgggtattgagtcattgattttgatttcgaggtatttgaaagccacgagagagagagagagagagagagagagagagagagagagcgacg

SEQ ID NO: 297932 - DNA, 2542 bp, Cannabis indica
atactctcatatctacttttcctagtttctattgaatttcattgagattttgcctaacaatgcttgattagggtatagttaatgtattgctaaggaatattaggatgatatcatatgaatttatcaatattggaccctcatatattttaatttaataaataacattaaaaataacgagcaatgtcaaataaaaattatgaatgtacattgtgaggctctaaatgctataatctccattcaaactctcacatctatttttcattgtttttagattggaaaaggacaggaaatatagctacacttgggttcgatactcaaagcttatttgtgtgagtaacttccataaaattaactatacataataataatcatatatttttgttgttatattattaggcttataattatataaatatgatgtggtgtttgtataggtaactctgttcacagtccattttgctgggtgcatattctattttcttgcagcacaataccatgatccaggaagaacatggattggaatgaacaatgaacatttcaaagaagagactttatgggatagatatgttacctcaatttattggtctatagttacactcacatccattggctatggtgatcttcatcctgtaaattctggggaaatggtatttgatatcttgtatatgctctttattctagcccttcaagcatatcttattggaaatatgaccaatttggttgttcatggcactgctagaacaagaaaatttgtgagtaaactctctttccttattggaatcttttatgcgaaaattacactgcattttattcggacaaatatagaatcagaatggatagttttatgtgttttatcggttattcctctcgagttgagaccaatcattaaaatagatggcggtaaattacgagtttggatagtaatgaactccatagaagagctaatgtttttatactaggcaaaagtatggtatttctttccaaactctatagaggtaacgtggtaactggttaccttaaactgttttttttttgtttcatattttttaacatttttttgttaaattttcccataacttaaatagctatatttttaatgaaaattattcataacttattaagagatttgtatgtgtaatttcagagagacaccattcaaggagcttcaagttttgcacaaaggaaccagttaccggagcggttgcaagagcaaatgctagctcatttgtgcttgaaatttagaacagattcagaaggattgcagcagcaagagacacttgaagcccttcctaaagccattcgatctagcatcacacatcatctcttctattcgctcgttgataatgtctacttgtttcgcggagtatcaaaggacttgcttttccaactggtaataattattactcagttgtattatgttagaatcccacatcgactaagtcaccaacggattccacactcagtcgatgtgggatcctaacatattagtactcaaatcgaaataattttcacatgttgttttcgatatttttttaaggtctccgagatgaaagcagagtacattcctccaaaggaagatgttattttacaaaatgaagctcctactgacttgtacatattggttactggtgcagttgtaagagctaaaaataccattttctcttctttgtttgaatgtgtttttcgagtttgagtcattagagtttttgatggttttagtttcttggcaggaacttatcatacaaagaagtggagtagaacaggcaagtacaatcaaatttgtcctaatttctcattgaattatgtactagaccggccctgaaattgaataagaaaaaaaaaattattaggcttttatttaaaaattatgtataattttaaacgagaaattttttttaggctcctgggcagggtgggccctagcccgtcttagcccaggctcggccttgattttgtacatattaaaaaatttaatattttctaggtagttggtgaggcaaagaatggagatgttgttggtgaaataggcttgttatgttatagaccgcaaccatttacagttcgaacaaagcgattgagccaattgctgcgcttaaaccggacatcgtttctaaatattgttcaagctaatgttggagatggaacaattattatcaacaatcttcttcaggtaaagtacaatctgttttcgccgattcttcgtgttgtgttttttagttttaaactcaagtttttcattatgttgtgtcgtttaacgcagcatttgaaagaattgaatgatcctcttatgggggaaattcttactgatacagagaatatgttggcccgaggccgaatggatttgcctattagtttgtgctttgctgcaacaagaaacgacgatttgttgttgcagcggttgctaaaccgaggttcagatccgaatgaacctgatgttaatggtagaactgctatggtgagtagtataatgttatgtttggaaattagaattggattagatatagatatatagatttataaattaagataaatattattctag

SEQ ID NO: 297933 - DNA, 4466 bp, Cannabis indica
aagtctagctctcatttactacaaaaaataatcagatgttcaagacggaatcgaaatcatataagcagaacccagcgcaccaggccatacatcaacctgggcgctgggtgctctttggggtgcttcctgagttctcgggactcgttttgatacttctatggcattcaacattgtgaacgaggtctataaccctgctttttaccaaaataagaagaatacctagcataatttgtgtttggggagcataaacatgcaaactaggtttcaggacaacctaggcgtaggtccagtgcccaagtcaacatgggtgttgggttcctgttttgaccctcagatgatctagtttgctccccaagatcacttgtatcttattattttttaaaacaaaaaatatgcatgggaaattgattgaaaatagcccaggttgacaaaatgtcaacctaagcgttgggccaagtgtcaatgtcaacctgggtgctaggcccaactttttatcaacaaatgattctgtttgattttggaaaacacttgtaacttaattattggtgaaaataaagaatatgctagtaagagttcttgggaaaactgtttggaaatagcccaagttgacaatatgtttattgttaacttgggcgttgggttccaattctggcacccatatggctccgtttgttttccgaaagcactcaaatctcaattgttaaagaaaatggagaatatgcctcaaagactttatgtgaactgttgttagttgacaatatgtcaacttggacgctgggacctagcacgaggtcaacctgggtgctaggtcccaattttagcctccaggttgatctatttctattccgaaagcacttaattcctttttttggatggagaagaataaaatgctcaagatacttcttcaatattgtggttagaagcgccacatgttgacaatatatcaacctgggcactagtatcatcaccacgtggcacaggcaccgagtgcccaggtgctccaaaagaacagaataagacacacacttgagaaattatgataatatctctctaccagctcaataaatctccctaaacagaatagaatggctcactgtgttgttgggcaaaactcacaaggaaattttgatgtagcatttttgatttaccttgcaagtcaaatacattcaataaaacattagtaaaataagctaaaaggaaccaaattagaatagaattcaactatctcgatgttaactaaaatagtctccgacaacagcgccaaaaacttgttatgataaattcaacacacaagtatatgtatcattgtaataagtaatactcaagtaagtgagatcattctcatgaggaatgtagctaagtaccaatcaattgaattcttggttctatttggcaatcaaataaatagattttgaaactaaataatcaaagcaaaaattaaataacaaaacaataaacaagatttaatcaataaataaaatataggaaaattaactttaattgcatccacttcctatttcaataatgcaaaacaatgttcttcttctatctagtatgatagcggattataaatttaccaaaattcttttcagatattaaggtactaaattgtaaggataattactgcatgtctgagataattaaacaagcaatctgcattaagcaataacccaaaaactacacaaatactatcatttgtatcgaaacctgtgtttattcaattagagcattcacaatacttacttttcaaattttgttttgtgatcatggatcgtgcataagatggccagtcaaacaaatgtaataagcacaaatataaataaatcatacatcaatagaagaaacaaatcaaaatagcattaatccagaggaagtatcaaacaatctccattaaaatttctaaattggagtttagctaacaatctccatcaactttaacatgttcattatcaaatccatagaaaacataataaaaccagaaagagaagagaagaaactagatttgcggctgccacgattgctccaaagcttgatctccaatctcctttttcatatttttctgagttctaagaagtctcctccatctgaaatttgcaattttctcttttaaaaatgaagccctaagtctatttttgctgaaattcccaaaccgcccttaaaaagctaaaaatttcgcaattcactgtgcatgtggcgccacggctcttagaaccaacggaaaaactcaatctcctctgtagtggggcaccgcgacgctaattccaatagcttacagtatttttttatcttgaaattcatgaacaatgactgatagtattttagccataactctctcaatattgctcgaaatttgatgatgcaagatattttagaaagatgaaagagagatataaaactttaattgacaacattttttctgaaagtgaacacatcatagtcaaaaattggcttgaagtttcagacttgattttcaaatacaaacgaaacgtgttgagcatccaaaacttagaatttttcactcattataacttagaacgccaaatttcatgataaattgatcatatttatctcatttaacatgttacttctcatttcgattcatattatgaattttaccatttaaatctaaaataagaaaaacaagcataattttgttccaaaaatatgtattcacaagaagaaaacagagattaaaacactcaaaaagtaggctaaaactagcctaacaataccccaatatttcaagcctaacccatttaaacaaatccatacaagaactgattgcaccattttgactgaatcgagatcaaaggaccaaggtcgaagcaccaatggcttctatcaaagtgaatcactccagtttccaaaactaaatatctagtagcttcatctcaaaaactcaccagcgtaaacccagaatgcattcgaacaatgctctcaactccaagattgccctaaattcgtttaataaatcctttgaaaacttgaaatggaggattagctcccaagaccacacatatatctgaattcttccataaagaagctttaatctcaatttcatcctcatgaatctttgcaatgagttaatccccatattcaatcggttcagtaaattcaaatttaatggaggggtcctaacctggttagccttgaatttaatccatgcatccaccacataatattaaaaactagctttctcataattattagcccatttcttaaatctaacttgttgcagcgttgagattgacggtgcaaccagctctacaaccaagttttcatgggtatcatggaattcctcataacaacttgtatcttctaggttttcctggatcaaagggagttcctcatctaacagctcctctatcttgacaagcttcacttcgagagagacgatggaaaagacttagacccagacggcttaactttgataatttagatgggctttcatatcacacgcttcttcttcgccatggaagagggagagcgcgaaatacacgccctatatgagtttcttcactcaaaaaaaaattagtagctaccacacttttataataataataataagataagatataaagattttatataaattattttaatttaataataattttttttttaaaaaaaaaagtaagtatatatgtaagtaggaccagcaaaataagtttaataagataacatgacttgaaatctacacgaaagttagtggaatcgggtttgccttaaataagttcgggtcatggggctgactcgtctaacctatttaataaacgggtcacgttcgagttgacacgacttacacaaaataacatattaatgacttatttagagttattttagtactttaacatatcataaatgtgttcaacatgtcattaatatattaatggattgacatgtttaaataaaatttatttttaaacaggtcgtgacatgtcaatccatttataaatgagtcgtgtttggattttatttttgacacgattattagacgggttcgtgttcaaatcaggcatatacttataatacatgagtttcgacacgaccctcgaacacgaattgtcacccctacatatgtaagcaaattagacctcatgactattacaaacaatattatcggataatgaagaaaccatcctgccaattacattttaactaaaagcccatttagccaaattataaacaacaaaattaaaagaggtcataagactcttacaaacaatgagctacataattaattactatagagtactttgcagcataaatacctaagtttaattttcagttgcaaataaatacctaagcttaatttttggcggtaataatacctaagttataattttagaacttctgtaggtacctggttaagtaagttgccatgtagcgatccctgattggtccaagtcattaaattttcattatttaaaaaaaaaatagttcaaatattccaataagaaaatgac

SEQ ID NO: 297934 - DNA, 2508 bp, Cannabis indica
tattatatttttttacattaaaatattaattgcattataaatttttttttttaaatttatctatatatatatatggattgaattggatcagttatttttacatatcaatcaacatacaattcgcacttatgcagatttacaatttttcaatctaatttaatcaacacaagtgtagatatccgcactttgcagattgaatttgatcgaatattttataaacacttgatcctattcttactatatatgtaaacaattttacttttagtcataacaaaatttgtgattaaaagtaaaaaagatgtgactaattataaattatcatttttatgttgtaactaaaaggttcgtgactaaatgtgttagtcacaaaaatcacaatttgttgtgactaaatgtgttttagtcacaatggcttaaactaaattagtaaaaacttgtatctaaatattatgttttagtcacaattaactttgtgtgttatatatgactaaaagtcacacttagtcataaaaaaattatgttgtgactaaaagattgtaactattaaaaatcatttaattaactaagctaggaacaacatatatctcgcactaactaaaatacatattattatgttattcataatttatacacttgcaattttacgaaaatacatatatagagagataatccatacatataaatccatagctcttacaaatatttacatgtgatgttattgttaggattatttacatatggatatatgagaaacaaattaaacaaagttattaataattagaaaaccctaattaattaagctagagagaaaatataaatcaaaaagccattcatggctgaaaaaaaaaaaacataccctcttattcgactaatttgagagtagtacttacctcatgacctgatcatgattagaaaagaacaaaatgagaactagctatcataattataattgagaccaaaccatgcaagggaaaaaccgcaacaaagggcgaaaacaagccctaattggcccaccaacatagatccgccaacatgaacgtaaagataccttgttcttcaacttctcccaaaaagaagagaaacaactttgattcctagtggccaaaatcgctgtggattgaagataagctgaggcagctcgcttcacaaggcgatttttaatggaaatgttattgcaattgaaatcgtttactcctaattcagccatgtctaaatctctcaaacttgtgtagcgatgaatggtagaactattgttatgatcttcgtcagggactgaggccgacacagtgtctgaatccgaattttgagttgttgttgaggaattaggtttaggaaatttgagtgaatgcaacctcttcaatttatgattatgatcacggttaataataagatgatgatcaattttggtatccattaataatggggtggaacatttttgggtgagtattgacatgttagattgaagtgaaaggatcaaagagagttgttttttctttcttttgtataatgatgatttgtgagttttgtgaagagattataattaattagttttctgttggaatattcttatttattggcaaagagaagaaatagtgcatagataatggatgaagaggtttgtaaacaagtaatcaaggtcgtcaattttttgtgtggattggtcaatttttgtgggtttagctttgttatagcacatttgactaggaatgcatattatttgggacaataactaacagccctatttaaatcccaaaacacatgtttccatttgaggaatgatagtatgtacatactagtggcttttttataattatttctaaaaattattaaatttattaatttgaataaattatatgtacaacacttaaatcatgtggcactcacactcaagagtccgatcttagtggataataaaaataaaattaaaccttcacttaaaaaaaatgtaatatgcacgtaacaaaaaaaaaaatataaaatattaagaaaataaaaatattaaccaaacgactactttttatttacttaaatttttaattacaataaatagtaaaatttttgttttaaataaataaaactgcgacgtttaacctactttttgttttctaaatttttaaaaacaagaaaaactaaaaatttaattttagttaaatttcattttcattttaagtttttgattttatttaagtcgggtctggggtctggggccggtgctagggtctgggcccggtgctaggtccgagtctggtttggtggtcggggtctgggttcggtttggtgaccggggtccggggtctggattcgagtctaggtctgggtcccaactgtcggtctaggaccgagattgggtttcgatgctagggtttgggttcaatctggggttcgggccgagatcgggatttgagtctcaggtctgggtccggattcggatctcaagttctaggttggtgtcagtgtccaaaatattcattaagaaaaaaaaaatctgtttaaaaaaattttgaaagt

SEQ ID NO: 297935 - DNA, 1955 bp, Cannabis indica
ttgatctctctcacactaacacaaaattccttcacacttcaatgtttgttcatttcatacaaaataaaacaagtgcttcaatcattctcatatgattcagtgcttaaaatattctgtgaaacatagccagatgcttttagttcaaacgaaagaagctcaagcattgaatatacacactctgcctcatcatgagagtgatcaccagacacaaattcatgaaggttacaatcaatttcaatggaactaaatcccggtgtcttctgtattccccgagccttcatcatcttcctaaccttgcctgcaccgtcccattttccaaccgcggcatatatgttcgctagaagaacatagttagagtcacccccgggatccaactcgttgagataattcattaatctttctgctaatgagatatcaccatgagttctacaagcagccagcaatgatcccacaacaacttcgttcggtttcattggcatagtttctatcacatttagcgcgttttctaatctcccagctcggctgtagagatcaacaagacacccgtaatgctcaatcctatacctaattccatgaacttttttcatattttcgaagagcataagcccttcttcaactagccctgcatggctgcatgcagtaagagcaccggtgaagctaaccccgtcgggcttgaaaccttcgttcaacattaaattgaagaactcaagtgcttcctcagcgtgcccattaatagcaaatccaattattatcgagttccacgaaaccaatgttctttgaggcattttctcaaacacttgccgagcaaattcaatgcatccacacctagcatacatatcaatcattgagttgctaatcttgatattgtccttaaattcacgatttatgataaatctattcatccataaacctaaaccaacagttcccaaatcagcacaagcagcaagaacagagattatggtcacataatctggttcaacaccagagacttgcatctcacgaaaccactccaaagcttcctctgaaagaccccttttcacaaatccaccaatcaaacaagtccacgaaattctatctctctcaggcatttcatcaaacacttcaacagcattttccaccttcccatttctcatataaccatcaatcatagtattccaagacaccgaattcttcaccttcaacccatcaaaaacgactctagcgaaatcaactagaccgcatttcgcgtacatatctacaatcgccgttcccaccatgacatgaccagaatccaacccaagcttacaagcataaccatgaactgaagtaccaaaagacaaactcttgcgaggaaaatgagcacacccagagaaaagggtgatgaatgtgatgtgattaggttcgactccggccaatctcatccgagaaaactgttgggcagcttcagctagttggccgtttcggcaaagagtggctatggaagaggtccatttgacaattgggtcaatgggtttttggttaaggcgtgaagagtgagagagggagcggttcttaggaggaggttgattggggaaagagggttgagtctggggagatgagtgtggaagtggaagaggtggtggtggtgggggtggtctgagtgtgttcgccggtagactcatcttcttccgaacttgactctggaaattgattagcagtgattaaaatatagcatcaacttattaactgctaacattttgcaccaaaaatatcaataaataaaaagtaatttcccaataaatatttaatttttttttttatatatacttttatattactagtgacagaatatagataaaagtttgattccctctctcatttgtctcaaaatcaaataaaatattcttttaaataaaaagtgtcgtttggtaacacttttgttttttaattttttaatcacaaaatgaaagtaaaattgttgtttttaaaaaatttat

SEQ ID NO: 297936 - DNA, 2220 bp, Cannabis indica
tatatgagacctctccacgaagattctgagtgttttgccctagtatatatatatttaatgacaagtgatctaatttcgtggctaagctataactaaataagcacttaaaatgggaactagtaagaatgctaattaaagtttgatttagtgtattattaggtcttcctcggatgctagatttggcacactgccaaagtaataataataataattattatatattaatggtcacattatgtttttggggtttaaaaaaaaattgaaaaatcataatttcgacccatgttctctttcatattttagtttcaagtggtagtactttgctaactgtaagcagtaaaaaacaaaagaaacaaagacaatatggagtgtgttttagcataacaagccaataaataccaataaccaatgaaatgaccaaagtttaataagcttcaaaaaaattacataccctatatagttaataattatataaaatatatatcttaaggcgtgcaatattttccaaccctttttctcataaaaatctaattaaaagggccactaataaaaaaattacataaaaatgttgtataagacaatttatatatacatctaagaatattattttctgtctttttctaacctgtataataggtataaaaagcaataaaacaacaaataagtgcatagtgttggtgctacgtggatgtatggtttccatgtaagacactgttgattagtaaaataattaatcacatggataaaagttagaaaaacagctaattattttgtccataatatataataataatcttaattattattattattaattatattaaaaaaaaaaaaaagaaattaaaaagtaaggaacaatttttgtcatgctgaaatgtttttaccatatataataaaaacaataaatagtgtcaaagactagctagtacatggtaaaaggcaagagaagctcataaaccaatgaatagaactgttggtctctttggccttactattcacaaaacttaattcagatcctttgtccttctatatatatccaaattataatattgcttatgcatctccatttgtcgggaataggccaaagtttggtaatccatgcacttttctaattaattaattaatcaattaacttcatatttaataataataaagttgtttgcagctgctactttgtcaccactaccactagtactaacttaattaactagcttattttttcttcttctttcaaattaagatattatggtcgttttatacatttttttaaaaaaaattaattaatgagaatcttcggctacatagattaattgtcatcattgtctttgtttggttttgataattattgataattgatttatttgggcttgatgatcagttagtggagaggactagattaagctcaccaaaactttgtgttgaagataataacttattaattattgattaacctattcaactcttggcttgctggcaatttaagtatatagatatatatatgccaaaatctgtggagtaattcatttggatcagagtggaagccagtctatagtttcctcataatttgttattatttaaattaattatattaccatattaatcttttttacagcaacttataataaggaattaagctcatcattttcatcccaaccaaattaataaaaacagaatccagtggtatataatgatcatgacatataataatttgttactagctaggaaagttcaatattttgaactttttattattgtaactttacatatatacgcgtatactacacgcacattttgaatcaaagtactctaacaaattattgagcttagtttattctccaaaatctatatatatgttttaagttacatacacatatatcgtgtggagaagatgaatggtttaattgttaatattgtactgcaaatactgtagagaatcatatttgttggtggtctctggctggtaatcatataaattattgatctttttaattgagataagttataaataccaagtactaaacaatggtaataagtgttgtttttttttttttttgataatacgaacaattttgcatatatattcattataaatatgtcaaattcatgtaaattcacacacaaattcgaaaatcaaattattcacaaagggtttcaatttcagctgatcaatatatggatataagagctgaaaaggtaaaatatagcttatttaataaaaaa

SEQ ID NO: 297937 - DNA, 3117 bp, Cannabis indica
taaggacaaaaagtgaaatttccgtttataaattagggtttaggttccaataaaagaaaatgttatataagaacaagggttaaaacgagaaagttaggaggagaattaatttgtcgtggatttccaagactgcactgcattaccaaacaaaagtaaacgatacaagcaaactactactctacgccctcaaaaacaacaactacaaccacaacgagagccaaggaaacaccaaccaaaagttgtacagagagagagagagtgagtgagcctcagagctctgtgtttccttttaatattacccttttgaaccttttgtcgaaactcagtgatgaacaactgagaaagaaaaaaaaaaactagaagaagaagaaaaagtagaagagatgggtattttacacgaggatgtggtgatgatcaggagatcagagaaagaaggagaaccaactgagattaccataaactgccctgataaaactggtctgggctgtgatttgtgtcgtatcattcttttctttggtcttagcattgtcaaaggaggttagtctcatctcatagcaactgattattggtttttaataagttttattagttttctgtttgattctgacaattgggttgccctaaaaatattttatttatttctgtttagtgttttctcaccacccaattggtggttgagagtcaaaatcatttttctttttccttctgaatttagtttcctaagtacttgagtttttttgacttaattttgtcattatttttctcactatatgttaaaccaaaacgtttttaagttatttttaaattttgaactgtttgttgttttgataattatgggggtgaagatgtgtccacggatgggaaatggtgctacatcgtgttctgggtgatcggggattcagagacaagatggagcttgttgaagaggagattagtggaggcttgtccttcttgttcttcagcttctgggatttccttttactgctcaggattactgccaactaagcctcctgaagtgtttcttctcacgttatgttgtcatgatcgaaaagggcttttacatggtaaaatctttgagctaattttctcatctaaatctctttctagcttataagtaaagtattgactcttcatttaatggtatagacttatatgattatcatgttgctttgtaacttattagatccgctgttttagtaattgccaagatataagctctaccaccaaatcctcttacatgttcttgttatataatttatgtcttctatttactgtgaatattttattgtctatttttttgctttaatcctctctttaattcctatgtgagcagatgtgacaagggttcttagtgaccttgagctgactatagagaaagtgaaggtatcgacaaccccagatggaagagtggttgatatgtttttcatcacagacaccaggttggacattcttgactgatttccttgaaatggtttttttatttggatctcttattagttatggaaggctaaggctttacgataacctttaagaacaatttgtaaaatgagagttgacttattgtttatgtgtatcttcatcagggagcatctacagaccagtgaaaggaagaatgagactcgcaaatacttagaaactgttctcggggatgcaatgatagactgtgaaatagaaaaggccggttctgaaattactgcgagttcacaagcaccttcgtttctcccctctgaagtcacagaagattcatttttactcgaaatgcccactcaactaccaagcggatcacttatgtccaatagtgtttctattgcatttgataactccttgagcccagctcacacactagttcaaattatatgccaatatcacaagggtctcgtctatgacataatgaggactcttaaggattataacattcaggtaaagatattgaaattttatacactgcaatttttctctgcatcttgttaaaatctatcagtgtgttattttttacttcatccttgtcctccacaatgaatcaaatacaagtatttgtgaactttgaaaatatgaaagttgattgtaacttttttgcgagcagatttcctatggacgatttactataaagcaaaagaggcattgtgagattgacctgtttattgtgcaagctgatggaaagaagatagttgacacaagtaagcagaaatcattgacatctcgattggaactagaacttcgccgccctatcaaagtagctattgtcagccggggtcctgattccgagctgctggttacaaaccctgtggagttatctggcaagggccggcctcttgtgtttttcgacattacccgtgctcttaaaatgcttaacacaggcatcttttcagtatgtcccaatctctctcattttctctaaatttaactattgactgttgaattacattcagcataaatttgaaaataacactgtttaacactcctaattttattgaaaattttggttaactcgataagtttgactgattgtttctccaggcagaaattcggagacatataattggaggtcgggaatgggaggtttacagagtcttgcttgatgaaggagacatctccattgttccaagaagtaagatccaggaaggtgtatggaagacgttgatgggctgggaatgataccagttgcagatatgaactcttgtacagcatagttatccctgctaccttagtgcttaaattttagatgtaaattattaatacatacacatataaatgttatgtgtcattaaaaggaagagctgtttctcatactaactattggtagtataaactgagaaaaaacaagaagaagaagatagaaaaggtagagtgagttctcatgtaattggatgctaaatatatattgtaaagcggttaatattttcactatttaatttttagtctcctcttctattatagttgaagtctactcggtaaatatttgagcgcaccagtggtgtctagtactttctcgacttgtcgcgttgcgattggctagcgatacctcttaaaagttattatattaaattatatgagacccgatgaaccaatagcgatactgacacataagagagtgctaggcaccaccggtacccttta

SEQ ID NO: 297938 - DNA, 4589 bp, Cannabis indica
atttgtatttggttgaacagaataatgcataatcaaaaaaaaattaataattattcttattttatatttagttgtaagtttaattttttatttaggtactgtattttaatctttgttatagtaaataatgtcatataatttaattaaataaataatgttctttaaaaaaatatttaatgtcattaaggcaactttcatatatagaatgatataccaattaattatatagatccatcaccatattatacatattgtttcactactcaaccaatcaacacaagtaaaattctcattggtcaaaataaaatgcggatagggatgaggacttcaaagtccacatggagtaaattgatattagttatgttgaacttcaaagttcattatcatttgttactccaaatacaaatagactagctaaaaataaataaatataatatataatgtcaaaaagttgtaccatacatgaaaatcttaagaaattactattcacaccaaacagctccttacacttcaaaatcataaaataatacaaaactatctttctatggagactcaaaattgacctgtgtgaatgctttcttaaatttgggttgccaattacaacatcttacaaaatcataaagttgccaaatacaattagtagtttctgctcgactcaaagtccattttagttccctactttccactcttattgtagctgtctctaagcgtcaccgtccgattaaagaccggcttctccggagttgaatccttatcgaccacaaaataccctacaccacatggttaattaaactttgaatcaaacaccttcaattatggttatgaccaactgaaattctattatgcaaattataggtacagcaaagaaataatgcttaagcggcaaaactacccaaaattactaaaactaaaatcttgttactaagaactgttaacttccattaccaccacctaatttttaaaaaatattaatgaggtagccaatttggtaatcacacgtatcatcctaatcaccacctaacagaagtaagcaaacagaaactaaccgaattacagttttaataactttaataagtagatatgccgcaaatatcccattacatattatagcctaaaaatgtatacgatattttattgttacttaaagattaaagtaaagagcaaggatactgttagataaagatatatagcctaattttgtgagcttgtatgacagaacaacaaaaatggggacaagagtcaaaatcattcgatgaaattgttaaaaagtaagggctaaggaaaataccaagccgttcaaactgaaatccatcaccgacagctgcatttccaaccgctgacacagcataagcattgtggataaccgttttggattgcgggttcaaatccgcaagccagtcttcaagttcaccaggattctaatgtgcattgaaagaataaaataaagttaaatttcaatatattttctaaggagaatgaaagaatgagcaagaaagaagctgcatttgtaaagacctcggaaaggaataatctgtcaaacaatctaatttccacattgattgggtcaaccccaggagaaggctcaccaacccagtgtaggacaccctgtaaaatatttattatagagtttcaaaaaaaaaaaagccgttggtcagtttggcaccactacagatctcttcaaacaaaaatgtgacataacaaatacctttggctttgtcttcttagaaggatcatactcggcccgaacttcaagaacagtttccttatcatcggctaggatgacatccgtacatttgatagggaaagcgtatctgaacccaacatcaagaagtattacgtaaaaatctacgacaaaaccacgaataaataacagagagacactattattgtgtaccagtcttacctgagtaacacagatttaccaggagcaagcccatagtaatcttttgaatctttcaaccgaaaatcagagcgttcgatatacactacattggaaaagggaacctaaagagaaggaagaaaagaagttacatattagaaaaacaaaacgccttcaaaataacattaggccaaaatcagaacagccgggaccagtatcaattttagaaagaataaaaaataaaccaacatattgatattgctactaaaattacgtgttatgttacatagatgaaaaactttatcaactgaaaatcacaggagaaaaaatgtaaataatattctagtgagggatatatcaaagtatgtagtactcggtgttaccttgtagaaagcacaggcgtcatcagcttgcccatcgggccatttcctagcgtcaaggtccattgcagtgccagcttctaagttggtaataacaaccttaaaacaacaccaaatattagaatgatgaaagaggcagtgcataacgaggacaacaagaaaacaaagaatacctttagtggatgtaaaacaaccatcattcgaggagatgttttgttcaattcttctctaatatgaaactccagacgatccacacgaatcatgctacaatcactgtaccacaaggaacaataaaagcattaaagaagagagcaataggcatgtagatcttgaatgtttttatcgtgatatactgaaccttctcgtgactccaattcctcgaacaaacgtgttaattgcagttgaagtcacacccctacgccgtaagcccgctagtgtcataaggcgagggtcatcccaaccatcaacccatttttctgtcactaatcgatttaactgcatgcaacagggtatccggtaagtcaggaaaatttgaagatactgtcataaaagtttcatggctacacctagaaatttgttccttaggtttcactcaccttgcgctttgacatgacagtgttactgatgttcaaacgtgaatattcccagacatacggttggtaaatgcccagtgagtgcaacaaccagtagtacgatgcccgtcgtgtctcgaattcaagggtacagagctacaaaaattcttgataaatttaatagaggtatataacacagattaacaagtccaacatggctgtttaaatattaaaagaagaatctttaaatattcactacgatcttttatagcatttaacgtgcgtagtgtatatgattaaccaggaagttggatgaatactaatcaaaagggatgcataccgaatgtgtaacattctcaagagaatcaacgatacagtgagcataatcataacttggatagacacaccacttgtctccagcatgtggatggggagtaaactgtaaagatgaaacaacaacattaagataatatgtgtatatgttcaccttaggagtaatgagaaatgttgccacttgccttgattcgatatgcaataagatcatacatattaaaattatcactctgcatgtcttgcttcattcgaagtgttgcttttccttcttcaatgagaccccgcctcatatcctcaaagagtttcagagattcagcaatgggtctgtctctccaaggactattcatcttcttttccctatactcctttatctcagtaggtgtctataaccaagatttcacaaacaaaagggactttctcagaccaaacccatcatatggaaaattaataacagttactattgtactgataatgatgaagaaaaaattcattatgcatgggagataataatcctagagaaagatgaaacctaaatcacagttcatattggtgtaaattagagatcaggtcatgcagtagcccagtccaaaaatgtgtcattatacattagaaatggtatttcagtggcacagatagaaacaagaagtagaccaggattcagaaataggatgttgaacaaaaacattaaaaatcatgacacatcgaaagaacatatacacatacacattttttatagaaatgtgcagagtactagtatggaactagacctggtgatcaacataagcatgacctcttcgtatcagctccacagctaaatcaaatagctcttggaaataatcgctagtatacgtaatctggaggacaacccaagataatcagctacataaataataagagcaagagagtcaattaatgcaagtcatcagttatataccttaaatggctcccaacccatccatttgacaatctctttaatatgatcaatatattctttcttctcagcttctgggtttgtatcatcaaacctaatagagatcactcaatgaactaagaaaaagtgatatgctgaatttaaaatatttaaagattggaaattcccccacttacaaataatagtaagtacaattttcattatttttttaaaaacaattttttctagcttcgagaatcacaaaactgtcaaatgatacttctatttttcctctgcagtgaaataatgtacaaaacaaagaacaaaaatgagctttttctcaccttagatagcatccaccacctctttctttagccagtccaaagtctataaacattgcctgattaacagcatcaaatgtaaatatttcaagtatatacttcagaacaagaaaaataaccatgttgaaggcataagtttgaagcttaaagcatatagaaattcaaaaaaaaaaa

SEQ ID NO: 297939 - DNA, 3116 bp, Cannabis indica
atatatatataattgtttgatttgaatgaacatatcatatcggttaatttaagttttttttttttgaaatatggtaattattatttcatttttggttagtacctctttttgattaatcttgtactaatttaaggaaaaatgtataattacagattatttatgtgatgatggatactaaatataatatatatatacataaattgtaaactttttgtgtacttattaaatcatgtcccaattattctttttctttaattttatttaatttttctttttcctttttcaagttgtaaaactttttaaaagttttaatattaatcaaatgcataaagatcgtgatgaaccaataaattaaatttaaatatgtgattctttgttttctattttactactttagggaatgtttggtatggaaattatctaaaatatttttgacttttggttcaatttttaaattgggtagtttatagagaaaattgcattgtatactcactttactttatttgctttaatttttacctttatttctatattttttaagatatacctattttatagatgatgtccttattataccccttagattaatgtaaatcatgtgctacacttaagtggagggtaagaatatattaggcaacatactcataaaactgggtagattttaatgaaataaaatatgagggtatttttgattaatagaaacaaaaaagaggtattcctcaacttatatatccctagtttatactacattttgtgggtttacatggtaatatttttgataaaatatatatcaactattttaaaccattgagtttgatatattatttacccgtaaacctaatcccgtttacaaatttaactcactctaattaaaatattaatatatcttttaaatattactaaaactttcacacaaattatgctcgtaattattaattaacgataatatattatgaactagggttggtcggtcgagaatcgagactacatctaatctaatactaatagatttacaataaattaaaatattttacatcctcaatatcattatcatcattattatagtgtaaatattcttattaattaaatactaaataaaattaatatgttgattattatgattaatatcagatttcaagaaattgttccattgaatgctcgaaatgttatagtgaccgaaaacaacaagatttgttcgaagtggaattcttcaatccgagccgctcttaacaaaaacacaacgtcaaaacaagaagaagatgaagataacaacaataataataagtttcaaaaagtgtatccaataaaaaatgataacaataacaataataatagaggtgaattatttggatgccttattagtaaacaaatggttggaatattcataagcatttgggttagaagtgatcttcttcaatgtattaacaacctaagtgttgcacgtgttggttgtggtctcttgggttacttgggaaacaaggtacttttactctatatattttctttttattctttctattttgtttttgtttcagttataatctcgtattgacagatagtttgcttttaggattgtttttgtttcagttaagccttatatgtgccctgttcaaaacgaactgttggacttaattgcaatatggtccgatttagaaaattgaactcaagatactattttatatagcattttgaaaaacataagtctaattgatcatttaataaaatagaaggtttgattgataacttttacaaaatatagtattaaaaatagtatttaaccctatagtttcactgattactattcatatgttcctaatttaaaggactaattaatattcaatattctaacagggttcggtgtctgtacgaatttttgttgcatgatacaagcttctgctttgtgtgtagtcatcttgcttcgggtggaaaagaaggagatgagaggcttagaaacgaaaatgcatctcaaattttgtcacttactacttttacgtctagtaatgctcatcatcatttcccacgaaaaattcttgatcacgagtatggtatttggcgaactagttttgtttttcatttattttttattattatacataggatcgcttcacacaataatagttaaccatgatttaataattttttgtaaaatgttcttttcgttatctctaatactttaatttaatgcgtcgtcgttaacacttttcagaaattccaaacactctatttctaacataattttgcaaaaaataaaatattattaagagaaaactttttcaaaataacatttttttaaaaaaatatatattaataagatacatgacacatatttatatgtatactaatattgttgattacaaaacttagtattataggtactaatatgacatgttttattgattggctaaacctaattaactatataataaattgaagaattttgtgatattattactaattatatcattcaattatatgaatacaatatatcatccttaattatgattatttaattatacaatatatatatatatatatatataaatgcagctgtataatatggcttggagatttgaactacagaattcaattgccagaggacttaactcgacttcttgtagaaaagagagaatgggatattttattaaaaaatgaccaggtaattattaattaataacaattattattcataattaagatgtaagtgttgtattattatttagagtaatttgtagcataaatatttaaatttaactctcagttgtaaataaatagctaagtttaatttttggcggtaataatacttaaattatatttctggaattctataggtatttgaccattaaatatcaaattattatccacgtgtcattttcttattggtatatatatatatatatatttaaattaattttttttgaaaaaagaataaaaattcatgacataaactaattaaggattgtgacgtgagaatttacttaatattaatttaacctacacagttttaaaaatatagcttagattttctcaaaaaaaaaaaaaatatagcttagatattattgtcgccaaagagtaaacttatatattatttataatcgagaattaaacttaaatattta

SEQ ID NO: 297940 - DNA, 3524 bp, Cannabis indica
ttttcataatttttaatttttccataaattttttttaaaaaaaaatcataattttacacaagaaaaatataaaaatacatcaaatttataattttctctttattacgatgacaacataacacatacaaagtaagagatttcagtcttataaacttgatttcacatttttcactatcatatattttcttggcaattaccacccaccaattggaaccttttttttcttttaaagaaaagactaaaagtcttaaaattacaaaacatactagaaaaatcttttcattactaatttatgctaatatttcccattaattactctgttatggtatttttatcatatgtaacaggaaaagataagagtagccttatgtgttcaaaaagcagcattacaattcattgctggtattcactccttaaatcactcaaatcatctaattattatttacatatttttccttgtaataataatgatccaattttcacttcatgtagctggaaacaaagctaaacacaagctctccaaagaggcagaggaagctggtttcggggttgaatcgaatgagctctcgaacatagttcgatcccacgatgaaataactctaaaacaacatggaggagttgaaggcatagcaagacaactatgtgtttcattgaaagatggtatactttcaactgatttaactgtcagacaaaacatttatggacaaaatcgttttgttgagaaaccccctaaaggtttttggatgtttgtttgggatgcttgtcaagatttaacactcataatacttatgatttctgctgcaacatcaattggtgttggtgttgcaactgaaggttggccaaatggtatgtatgatggtttaggaattttacttagtattttccttgttgttatggtaactgcaattagtgactacaaacaatctttgcaatttcgggatttggataaggaaaagaagaacatcgcggttcaagtgacaagagatggttgtcgacaaaagatttcgatatatgaactactagttggtgatcttgttcatctttctatcggtgatcaggttcctgctgatgggatatttgtttcgggatacagcttaactgttgatgaatcaagcttgtctggggaaagtgagccaatgaatgtaagtaaaaaccgcccttttctcttgtccggtacaaaggtacaagatgggtctggtaaaatgcttgtgacagcagttggtatgaggactgaatggggaagacttatggagacattaagtgaaagttgtggtaataatgagactcctcttcaagttaagcttaatggggttgcaacaattattgggaaaatcggtttggtttttgctgttctgactttcttgttctaacaacaaggtttttagttgaaaaggcaatgcataatcaaatgggaaattggtcttcaaatgatgctatggagcttttgaatttctttgcaattgcagttataatcattgttgttgctgtaccggaaggacttcctttagctgtgacattaagtcttgcttttgctatgaagaaattaatgtctgataaagctcttgtgagacacttatctgcatgtgagacaatgggttctgctacttgtatttgtactgataaaactggtactttgaccacgaatcatatggtcgtcaacaagatatggatgtgtgaaaatgttaaagcgataacaaatgatgaaagagcggaaagtgaggtgaaatcctttgtctctcagagagttgttagctatcttttacaatcgatattcttgaatactacatctgaggtggttaaagggaaagatgggaaaagaaatacaatcggtaccccaacagaagctgctttggtagagttcggtttacatatgggaggtaattcaaaaacttatagtaaagattatgagatagtaaaggttgaaccttttaactcatcaaagaaacaaatgtctgttcttgtggccttgccgaatggagacgggtttagagcatttcgtaaaggagcttcggagattgtgttgggagtttgtgacaaagttttgaaatctaatggagaagttgtgagtttatctgaagagcaaagaagtaacatctcaaatgttataaatgattttgcttgtgaagctttaagaactctttgtttaggtttcaaagatgttaaagataattgtgatggagatagtattcctgatggaaattatacacttgtagctgttgttggaattaaggatcctgttcgtcccggtgtgaaagaagctgttaagagttgtttggatgctggtataactattagaatggtaactggtgataacattcatactgctaaagctattgctagagaatgtggaatcttgactgaagacggtttggctatagaagggcccgaatttcgcaacaaaaatccacaggaaatcgatgaattgttaccaaaattacaggttcgacaaatactttttaacttttttatttttagaataattttatgtttttatttatatatagttaaccttgaccttttattttggtagcaatactgcaaaatcaatagctaaggaatgtggtattgatctagataataaaatttgatagaggtcttaaatttggtgacatttctagaaataaggggatattgtcaaagaaaaaaaatatacgagaattttgctacaaattactcttatttgttttttttactctcaattcactgtatgtaaaagaattttctatgaaaagtacaggtaatggctagatcaatgcctttggacaaacacacattagtagctcatttgaggaatagtgtgttaagggaagtagtggcggtgaccggtgatgggacaaacgatgctccggctttgcatgaagccgacattgggctttccatgggaattgcaggaactgaggtaatatgttcattatcattcatatataatagaacaatagaatttatctccctaaattattacaacattcaaatcatgtcatctgaacttttttgcttgtcaaaaacttttcccgaactatttatatcactgagttatattccttttgtcaactttagtcatacaacggtaacaagtggtatacactttgtatgaattttactcagtagtaagaatagttcgggtaaatttttaacaagcgaaaaagttcagggcattactttactaactctttcggtttgtatacactttcttctgtcataactaataaaatatttttgtgatcaataggttgcaaaagaaaactctgatgtgattataatggatgataacttcactacaatagtgaatgttgttagatggggtcgagctgtttacatcaacattcaaaagtttgttcagtttcagttgacagttaatgtcgttgctcttatgcttaacttcatttcagcatgcatctcaggttggtcttttcatactcctataaaccaacaaaaatttgggtggattgaatattatttttctatgcctaagtataactcgaataaattacacaaattatacttagttattttttttttttttt

SEQ ID NO: 297941 - DNA, 7050 bp, Cannabis indica
catgtaccaaatcatgccccatgaccttttaaggtcgttaaaaataccccctcaactattgagattattggatttaataacttttgtctaatttcattcagttttactatttcagtaattgtttatgtactaaaccatgctccccagactttgatatctaccaaatcatgcctctcaaattttgatatctactaaatcatgctccgtgaactttcatctatgttagacttttttttactaaaattggacaaaagtactttatatccaaaaatctcaatagttcagggggcatttttaacgaatcttaaaagttcagtgggcatgatttggtacatgtcaaagttcagaaagttcaggggacaaaaatcctaattagccttataattttaagttgaaattgctatgggtttgggaaccccgggacctttacaattcctaatttcaaacttggttgatcaaagaacccaaatttattcatgtatgtgaaactttgtgtgggagagatgtgatggagatatggtgatcggtacaagttgggttatgagggggccttgttactgttgaggctcgcatacttttgaaatgaccttaatggcgacttaatgggatttaattatagggagacgaatagaagccttcgaggtcaaacttagggttttatttgtttgttgatttacttgggaaaaaggtcggggcatgccgaattgagtaaaagtgaggttggaacgagtcacaacttctcaatcatgggttggtactttttaccgcaaaactatttaatcttgatttctcttcttcggaccattatcctattttccttgatcgatgattaagcagcttttccaaacacctaggcaatttcagttcaaaaatgcatggttgagggagcatctttgtgttcagattataaaggaaagttgggatgatgatcttaatctttctattcggcggaaaattcatatattcaattttattttcttctattatttcaattccatatacaatctaatttaattgtataattattgatagatgaattcgaatcaaaattctaaaaagtggaatttgaacatgttttgattattatggatgtaaattgatttagaacaagagtatctagattatttgtagttgttgcgtttaatgcattctgtgtgattaaactttaccataagaatatagaaagttttcacataaattgggtttgtaaatcttaactagattatgaactatttaattcaattatttaagaagtaaaagaaagaaaaattgaatatttcatttaatcaaatagaaagagaagattaattttttagtaattgtaattagtccttgtgggacaatacttgattttactaagatttattacaaattgtaattgtgtgcacttacatatatagcataaaatttgtagcaattcttgttgattcctgattgaattatagtgtcatcttcagcataggatttcctacactatatattaattttatttatagagtataatataaaaaatttagattttacaagtaaatatttaaattctaataattttaattgtttttttttatataattgtttgataatattattaaaaacttacataaatataattgaaactatagaatatacatatacatatatatatagtttaataattaacttaataattgtaaaaaaaaatatagaaaagtaaaatacgtattcaagtccaaatatgaaaacagactggcttgtttaagaaaaattggccaatacgagcaaagcatagcacaagtcggaacacgacacgaaaatactaggtctacgggtcgtgtcgggcctatcctttgaaaatggtggcacaacacaagactacctatatttttttagggcatggcacaactcttgttttgaaaagtacaaaaaaaatataagacggactagcacaatacacactaatgtacaacattgtatatacgtaagaaacgatattgtaattagttgtaagaatcactcaaaaccatttcaacacaaatcttttatcaacaaatgatgagccaataaaccctaaacacgaactgagcatacgacactaaaaagaaatgtatttagagttaccataaatgagtaaagtgaggaaccaatgattcaatcaagccttgttggcaaaaatgctagagcctagaggtttatgagccatctgagttccctttgcgcgaatgtctttaaggcttgctacttcccaaacagtgacattctttaagaaattttacggttctaacttctaaggcctccaatgtttggagaagtattgtgtggaagaaagagattattttagaacattgttattagacataagtggtgcttagcaccacccagaagtgacaccttatgattggttatcgatatttcctaaaattattatcttaagtttgatacttaattacaataataacaatataacatcaagaaatgtactaagtaccactagtgcattttagcacttctcattattttagaagaatcaaggtggaggattgaaaatagcaatgatgtgagaatcttagatgacccttggattcctcgggcaagcactttcaacatttatgataagtccaaatgattgacattcttaggtaagggcgactctggcccccctcaagttttctacaactatacatacacgataatgcatagtaaatttgattgtccaatacatattttgttaggacttaattaacacaaatcacactgatcaaacaaaacaaaacaaagaataacatataatcaaaatggaaatgtagaaaataaaccaatgaataccaaaattacttggttcaaatctaatctcaatgtgagattagccttaatccaagagtcagcagaacctgagatcaatatactcaaacacagattgtcgatctggtttactctcgagcttcaactctttacacacaatgctctcataacaccaactctcacatggcttgagaacaagctttgtacatagaattctctaacaccctagttgatcatgctagaagtgtacttataggctctctacagaaaaggcttcgagtagagagaggataggattaggtaaatctattcatcttgagtattggacaattcttgaccgtttggagttgttgactaattgttttaacctctttgttcgtttagggtttttcagattctttttatccccttttcatttaattatttattaatttaatacaattagtctaggacacaaagcccaatccaacccgacctcgattatgcacccgcctcaacctgttccacccgaactcaaccctaaaaacaaacaggtttggtatagattatttgaaaaccgaaaacccaaaaccccgctcgatatacaaccctagctgtaattaaacattaaaaaaacaattcaccactcattttaaccataaagaactggccaataaatttgacattacatcgtgataactctcaaatgtaattttacagacaggatttaggctcagtaaagccttgtccatgtgagtgactacttgagaattttggctagttagcaaattagcatggtgaaggtaacaacacaccccccaaccaaggaagaaaaaagaacataacagattaaggacattatcaaaaacaggatatattttctgtgctgaggtagttgcaagttgaataaatggaagctgcagcagcccttacagccaattccctctccgagttatccgatttctgtgatcggaattcactatccagttttcccaacctatgaataccacccattattgtactccagtgaatgtgttgtaaacctttgtcacaatgcatttgcatttcttttacttgattcaaccagctttcctgcaacggaacaaaaacacacgtacaacacatgagacttcgaaagtaaaactagcaactgaaactttgaaagcaactaaccaggtgtttctcttcttcagaaagctctttatccattccatcgaacagtttaccccaccttgctcgatgcacgtcagcagttgctgctgtgcttttcattgcatgcagattattattgtcttcatcaagtgaaaattcctttgatagcaagaacggcaactctgtagtaattacagctcgaactctcttcttactgcgtcgcaaggctgcaatgcaacaacattacagagtaaaattccactcaaggcatgagaatatggtttgtggctatcagtgcaataacactacaaaatatttagataaagggtttaccagaaaggcgtcctttaatgtcttgttgtagaagatccaaccactgagaagcaaccgtggcagctgagaaacattgaacaaaaaatgtcattgacaagtcaagcattcattctatataaatagttttaattgtccaaggaatgaattaaaagaagtgggtgcagaaacaacagatcatacaataaaatgaataaattaaaataataacctttggcagaaagatgtgaagctgaatcctcattagaggtggagttctcattctcagacatcttagttgatgatgatagctttacagccagtgcatcgtcctcatttacaacagtagattgcaatacaccagttatatcggaaaacctatcttccatggtttggtcactttctccttctttctcttgcttaaactgagtacatttaccaatagatatagggtaccctcttgtttgcctttcccaagagaaagcgcttgatggtttatcttcaagggacaagccattgtcttccgttcggtaacaaatttctttagttccgtttttggtatgacttccttgtttgtttcctaaatgattgttttcatgtttctcggatcttacaagtgcctttattatgtcatggacttgttttctattcctcacatggtttataatcccagggttcaattcgttgagcagtccactcggagcagcaatcttagtaaatctgtcaacctgctccttctttgcaatctccatctttttcttatagttgttttcacttttactttttcttcctcgttgctttggaaccggtatgcctccatgagatgaagaaagataaccgttttgtttcatcttttcccactgtttgcgtgaatcattttcttccaatgggccagtacagcttccacactcagacatgtctctcggcttcaaatttttgtatggaaaaaatggatcttcattcataaaactacaaaagtcttcagtattaagatcaatgtctcttgaaggtgccatagctgtatccccattatcagcatcactcatatctatggcaatggtcattcctttatcaagatccataggagtactggaagaataaccaagtaccaaccaatagaattgtcttcccccccacctttttctgctagagaatcgtctgattccaacaatacatagactttgaaaagtcgagactcatctttttcatcaaatatatattcgtcttcacattgatggttgtccaaacttctggagtgatgagaatcaactcctacagtagaaaggcaacattaaaatcaaataattcaatgtcaagacaagttcttcctcctacatgcataagtttttaactaatttcaaaacaccaaggtactaaaaaacataaatggagttactgatgaagggctaagtagagtataattcgtacaatgaccgagtttacaattatcctatgagaaacttgaagaacaaaaacagtgaaccaaattatatagcttatcttcttgtggcttaacagaatattttgaaaaattctattaattttgacagaaacatgtcaaatactaacaacaatgagtaaaccataattgttcacaacttctctaaacaggctattatttggtagctattcaatgaagcattgtccattttaatttaaaacttttctaaacaagtcatctaactattcaacgaagcattgcctattttgcttctcctattaaaacaccagataaaataacacaacattgttgattacaattcaaattacctagaaacaccatagattagattttacttggagagaagtttctcaatgttaccaaacacttcatacaaatgggagggattcacatgaaagcataaaagcatgtatatatatatatgatgacattgtgtagctctaaatatatgttatatgatggactgtaataagtccatatgtccaaagaaattcattgagtagctcaaaattcatgacaatatcaccatcatcatcttttagatttatacaaataaatacacaaattctaaccaacaacaaaaataaatttatacataaataaaagggcagccccattaacagtgtcagaaaaggaaataatcccagcaaagaattttccaccaccattttcatgaacaaaaacggaagagagaaacaaaagattgattttctttttttaattcaattttcgaaaactatctaccaatcagaatcagatattaatatcggccccacatgttttaaaatttcaaatttgaaaaatttgaaaatttaaaaatttgaatttcaaatttctaatcaatttttttttattattattattgaatcaaaatcatcaaattatgaaactttctttggcctgaagcattccgattagaacaaaatctcattacgattcattatttcaaatgataataatatatacacaatttctaaatcttagaaaacctaactattatcaaaaagaatacattttgttttcatatgcctgtcagaaaaactctatagtctatatacaacaaaacagggagagaatttcaaaatcaaaactcaaaaacctaagtacagtaaagtagactacctgttgtgagttgtgagtgaatgtaattggttatccagcaaccaatgagtgaaatggaattgctgctgctctccgatctccgatcaaaggaggttgaatgagttcgatctgtctccttaggtttgaatttgaaaaatcctttcttgacagaaccgaacagagattgattgtgcaatgattttggatgaaatccttatatatgtatttacttttgaccaatttttgtttcatattttaatttttacctt

SEQ ID NO: 297942 - DNA, 3412 bp, Cannabis indica
tatatattaatgtcagttgtttagaggttcccttacgttataacatagccgcaattggtcatagttataaatagaataagcaatgatgccaataaatgtcaatggcatggcagggtacatgctcaaattatgcttattgaggtcaacaaagcattcctcttgtcatgcatcattactacctcctattatttttcatgtgtacaatagtatgtgttgtcatcactttctcatctaaatgaaccattattctatggttagtcaacctttctcaatagtaaatcgaattgcattcctttacattacctttgcttgttggacaaatttatgcataaaatataagaaaattttaggatgcaatcctaaaaataagtgtatgggtgtacctttttgtgttgtatatgtgtctaaatagttacacttctttataaaacttttgaaaaatttaaattaggatttttgctctttgaattttgacatgtctcaaattatgttccccgaacttttaaaatcgttaaaaatgcactctgaactattgagattgttagatttaaggacttttgtcaaattttggtaaaaaaatctaacatggacatgatttagtacatgtaaagtttgaggggcatgaattggtagatatcaaagtctgaggagcatgatttagtacataaacagtcactaaaatagtaaaattgaatgaaattagacaaaaatccttaaatctaacaatctcaatagttcagagggaatttttaactgccagaaaagttcagaaggtatgatttagtacatgttaaagtttaggggaaaaaaaatcctaattagcctaataaaaattagggaattctacacaaaaattcttatagcaattatagaagcaacctaaattgcaaccaaaatctgtataactacttacattgaaaccaccagagtaacccaaaccgtaaatttaaaaataaaataaaataaaataaaaaacagcatataaaataatttccctaaaaattattggaacaaacccttgtaattgtatctaaccccacttcaaaagaattatatttaaaaacttcaatatttttttaacttcataattatacacaaaatgtaaataagtgcccacaaatatttttttaataattgaattccctcaaaattatataaatttagtaagaatggttatgaatttatttaaagtaggcacaagtatatttattataaggccaattagattttggtccctgaactttgacatgtaccaaattatgtcccttaaacttttaaagtcgttaaaaatgcccatgaactattgagattgttggatttaatgatttttatctaatttcattcaattttactatttcagtgattgattatgtactaaatcatgctccccagactttgatatctacgaaattaggtctctcgaactttgacatgtactaaattatgacccctgaacttttatacatgtcagacttttttactaaaattagaaaaaaaaaagtccttaaatctaacaatctcaatagtttaagggatatttttaacgaccttaaaagttcagagggcaaaaatcctaattaatcttattataatcaagctcctttatgtacaacaaaaatcttacatcgtcggttctattcggatgtcaaaactataaaagaagtacatcgatatacctaaaacaattttttgattgtgattttgttacggctagaacttattttgactatggatagttaggtcgaaatttttaaaatgaaattcatataattttactgcaagcccctcagggcagtactaagtaatggagtagccaccaaagtggcttgttaaataacttttagcttaagttagatataacatatttaatcatggattaatttgacataacatcctcacagtcaagtttctccaattggattaccattccgaaattggatagcagtagagctttattgaccttcggttgcgccttttgctcgagctcaccgcaagtacaccaatacccactctattggacaaaataagacctgaattgacatctacaagacaatgatgctctaagtaaatatgactcaaatgtatcttaaaataattattagggacctctctctattttcctttggattataggtgagttggtaatgtgtcattcaatcaagtgatgctgccttagattcaaattgtcacaacaaacattattcggtttatatgttacctcaaatatgtgtcctacacatacaaaccaacccattctaaaataacagtattaagcttctatatggctttcaatgagtgacgatatataattaataattatatatatttaatttaataacacaaaattaattgaaaatctcagtcccatagttccgttctgtcccaccttgattttttccccattagacacacaaaaaagtccaacattgggctgtccttgtctcaaaaacaaagggaaaaaatgttaaaaagcttcaacagagactagtttgaaaagttcttctattaaacaactttctccttttaatttttattaattttctttcttacaaactaataactctattgccttattgtctatttatttgtaatatagttttattttagaaaacaaatagtatattcctctcaaaatacctctataattatgtaactttctaagttatttcttgcaaaacccaaaaccagtttgattagacattaattataagcttaatggataatagtggaacagagaaagtgtatgtagctcttgggaatgatttagaagatgggtttaagaccttagagtggactcttaagaagtggaaatctcaaccaatctccattatcattctccatcttactttcagtgtctccaaggactatgtttacaccccatgtaagttttcataatcaaaacacctaatttttctttctttgatcaaattactttaattgggtattttgcttatttatctatttattcatttttagttgggaaactccctgcaagtgctgttagtgataagaaattggatgttcttagacaatatgagaaagaaaagattgacaagttactccctaaatacacatctttctgtggccaggtttgttttttcaaccctttttttttcttacaaaacaaataaattttaagctctaatgagtgtaaatctgtgtattctccaggtgaagaccgaactacttaaagtggagaaatgtgatgagccaattcacaagatcaccatggacttgatttcaagactcaaaattaccaatttggttatgggtttttcattcttaaagtcctcaccatggtaattaatttaactaacatgtatttctaatactgaaaaattacagggcatgttctcttctctcaatatttaatcttttttttttttttctatttattaggaaaatcaagaat

SEQ ID NO: 297943 - DNA, 1706 bp, Cannabis indica
tctaattttagtaaaaaaagtctaacatggatgaaagttcaaggggcatgatttagtacatatcaaagtttgaggggcatgatttggtagatatcaaagtctgaggagcatggtttagtacattaacaatcactgaaacagtaaaattgaatgaaattagacaaaagtccttaaatttaacaatctcaataattcagggggaatgtttaacggccaaaaaagttcagggggcacgatttagtacatgtcaaagttcgggaagaaaaattactaattagccattataaaatgaggtccacataaatcccccgagcaagtttgatactattgcttgattatggctaagaccaaaagaggcaagtgcttcctggtcctgaacatggtgaacccgaactatagataagccttgagaggaagtaacctttcttctaaggacagtctcggatatgttgaccttttggataactttgctgtccaaggacaaagtaatctctaattgatccaggatgatttcttatgtggaaaacatgttcgatcaatacaacagggattacctcgttacttatctaaaatagaaagacattgtaacttattccttccataaataatgttgacctcaaatttatcaactgacagcggaaccttattaatgacagacaatcataacgtgtaaattgtaaaagtaaataataacggcgacacattaatttatagaggttcgacccccttgttttacggataatgacctactctttttttgttgtattaagtcgagagataacaccacgtagattacaggcttttacctcgttatttttagctatgactctccttgaatgtcacaatggagctgatgtatgacagattttgaacaaatgagatgagaaaataaactaagtgtctagtaaatggaaagtggcgtgtgagatagaaagagagagagagagagtgctctagggcttgagggacatagaattcaggtcccttttcactttgcctaatgccatttatatagtttagggcttacaaaagatctatattcaagtaagtaaattttccttaaaaataggaaaaaccactcttttatcatatattaaagttacaaaaataactaattaatatccctaaaagataggttgacaatttggggttgaatccctactttagtgggttgttggagctgtcatataactgaaaccgagttgtgacccgtctagaaagatggctctggagctcacctttcaacccaaactccctttttatgcccattcctcgtgttggcttgcctacccttttcctaggggctggccgacacatgaactaccttggccggccacggtgtgatccggccagacctccctggttggccattttcctgtaacttgatcctgcctgagtatctagatcccatgtcaattgatgtgttatgcatggtaactttgctcacctattgacacactatattccacgtggccttagtcttgcctacgtggacatgacacgtcatgtgggtgaaaattgagataacattttctccccaagtccctgtgtggacgtctgtgcagatagggatttttcaactctggctctagcagttaatgttgggttttgtgccctaaataaaattcatttcaatataatcagatttactaattaataaagataaaaaattgctttttatgttgcatggttcagatgatttattt

SEQ ID NO: 297944 - DNA, 3386 bp, Cannabis indica
ttaaatttttttttagataccgaaacagataaatgtgcattctcattgtagaattttcctaagatattttaaataaagaaatataataggtaactacactaatgaaacataagacataaaagattatcaaagtggcttttcatagaaaactccaaagcaaggaggactatagtagatacttacaatgaaaattatcaaaaaaggctcccaagcaagggaaagttgtgttgtggccttttaattatataccccaacccaacacacaaccatttttacatcatcatcatcttaaaccttctaacataaattcagctggttccactcctgccgcatagccaaatctagatgtgttgtacttcctttggacccctgtgagcttccctgttcctgctttctgatggaaagtaaccatcaactttgagcattctctgcaaccccacaaaaatacaaaactatcaccattgaaattaagattacactacaaatttcaagccaagtgaagtgaatgtgtatgtgttggtggaatgaaaacttttttgatgttgtaataagaaatgtagttaaatcactcacaagagttgctcctgggaatagccgctgtgacactcactagttgcgctccattgcttaaagccacatatggtgctttgagctgtgtaaattgcagcagcagctaacaaagaagggggaaacttgagcattggatactccactaggcacaattctatcatgaagaacgatagaagctcaagctgaataatcaaagtcagggtatgatgttagaattatggcaaatttaatgaaaatttagactcatatatgaaaatttagactcataccttcttgtcagattgagcagctttgagaaatcttctcataaaaacatacggtgtgggaactgatagattgaattgcagagtattgatcattagcttctcctgcaagcagatattacagtatcactgaaaacattgtacacattaacgaaactgcacacatgatattaattactccattaaaatttaccatgtcaagcacttcttttctgttgtaagctttgtctgaaatcagaatgagatcctcaacaacaggaactgaaacttcttcgtatttgcaggctagaagtagggcagcaaccccaaccaactgaagtttcctccttggcacagattgaacagctaagaatctatcaatcaagttgaccatgagatacaacgtctcatccattaattcaaacttgtagtgaacctgtaatttgcactaaatggtcagagaattccattaaagaggaattcattgagtacaataacaacaggaaagcagcaatttaagtacctctacaagccaatcaatcagaacccctctcatattttcatttatatccggttgattttccatatagtttactggtacacagctagaattctgagaatcaaataaatcaatttcagttacttgtatctataaattagtcatcaaaataattagtaatgttgcattatgatatgcaccaaaacactacacccagtgcttttttaaactgtgagtcccgtctttatcagaagtgattggttaagaaatactaccatatcattgggtgtagtgttctttaaggcatattttgtgtgctagtaattgcactaacttactagcaaggccacatataaaccggagataattgtttcaatggtaccacatcaatcagaaaacatttacagcttgttcaacagattcaaaagtacataacgattagaattttcagcaaaaacaaagaagatttatatccacctcaactttcttgtagtatgcgtatatttcatcaatgtattctgttactgccaaaggattcagcttatcgcagttgtctatgtctatgacaagctcatcagctatatcctccatttctacttcctcctaaaacaacataaaacacattataaatataacaaaactaagcaccatttttctttaaaaggatatggatagataaactaactaccatctcatcagtttcctccaaaattgattctgtatgatgcacaaacatgggtattggaaagtcattgtcagtcttgtagtcttccacatctgttaatgtacaatcttcagacccccttatttttgaacccaattgaccgactttcttagtttcctgttaaaacattcagagataaatcattccaacatccacaatgacatatagtttttcaaaaccaagaaattctgcattaacaatattgtacctttggtaatttttccaactgattgttagcaagctgagcagcaaacttcctaatcaaacataagacagttgaactctaagttcatcttttatacaatggtatatatgtgaagaagccaaaagttataaaatatccaacctagtaatacgacgatccgatggaataggcaaatttttatcacaaacagaatgccttggacgacatataaccttatcaaggctacccctttggtttctgggaaagtgtaaaaaaacaaatcaaaatcagctaaagaaataataattaaaaaaatggatgtgtaaaagagtttagttctaatgtatacgatccaatactaatactaaagtaacccacttgattagtctctttcatttctaagttcttactctgaaaagcctcttttgttaactgcacaagggcacccaggagcttcagtgacattaaggtctatgtcgcttaacgctctcctgctctgacccatggccgtcacaagcttcccacctcccccaagtaagctccctttaatccacaaaattaacaaaaatcagctgttaaattagggggtttagtagaaaagcttactgggtcaaaccagattcgttacacacacacacacacaaacacacacacacacacacacacactcacactcggatcagcaatgtctgatttgattaccttgcagattagacgctggcccaataacccccagattgttctcgtctgatccagacattgtctttaaatctatagacaaagaaaattagcttataagaatcaaaatccgataagacagacaaacagattggtgtgagtatagaacacctctatcccaaacaaaatctagtaagtaaacatagagatttgaactcggaagaatgcatgtagaagaactaatcgataacaaagtaaggtaaaacaagccgatcttcgattttgaaattaaaaaataactcatcaaactaaagtaaataaacctgatcaaagttccacacaaattcttaaaagtgtttgccctcttgaaaccacgattgaatcagagagttagagagagatggattgatcagaaaaactccatgaaaagctccgatcactctatctctctaatggcggagaaaagtaaatggagagagagagagagag

SEQ ID NO: 297945 - DNA, 6280 bp, Cannabis indica
agactaaattttttttctggatgccgaaacaagcagagggtgcatcaatacatccattttaaaagggtgcaatgtagaatcaccgaataatatttttgagagtttagccataaaaatctttttttaaaaatttcaaactagaattccataatagagaggagggagggagagagtagcataagagggacttttgaatagtgactgatccaacactcttttctccttctctaactcttgtctgaactctgaaagtgaaacccccaaaacccttcacaactctcacacccatggctacagcttcacctccaccaccagccatggtggtcaagactcgttttttagggttcctaatatggcaatccattccctcttctctaatctttttcttcttcacaatcttcctataccaactctcttcttccgctgctacttctaaacccaccagggtttccttctttttcactcccattctttcatttttcaccttcaatctagcccaccttcttttctctacttccctctcactcctctccactccacaatcccaccgcccagcctatcctattcagcttgtgctcggcctttttcggcttcttctggttcccggcggctccgatgagcctcaaacttctgactttcggctccgggcaaaggtttcgatcggtttcgtcctgttttctttggcggcggcggtttccgggctcgtggctgttgcgtcggtttgctgggtgagcgcattggctgggtttgatgatggggttgggttgattggaagagttgggcttaggggtttcgtgatgggttttctctatggactgcattatgtttataatcgtcggtgggtcttggagttccccattattcaggttagtcttttatttagttgtttaataggaaaatctgtgaagaaaatgatgatgcaattggtgtaaaaagtattgtttaactagaacacttgctcatgatggatgatcatatggataaacaattacatgttattggactaaagatgtgattttgcactagtttggtgtttcaaatgtatccaatggtttttttttttaatggaaatgaaatgtgtctaatgtttgatgaaaatcatatgctacttactcagcagttgccagttcctacaaattatctgctggtatgtttgggatagctgtatgtgtttcttcatatcacaaacatgaacacatttgttttaagaacttggaagctctatctagtgattgttttcagttttacttgatgaaggtttgtttatacatattttaacgtgaattcttactgttgttattgattattttgttagtattgtttttgccttttctttgtcatcaatagccttgtggctgatgatttaattgtttgtatcaacagcgccgacctatctttagcttcaagatggggctcccttcggctactactcgagctttgaggctttcaagtgctgcttacctattctcgacaggcgtggtagtatttctgccagatcaattaacaggccaggttacggtgggaaagttcatttgtgagcaaatcatatttttcctgggaagttttgcagtgtttctcagctgggaattaagtcatcacttacatcgggttggttcattgatcatacttagttgcaaatatgatttatttcttgctttcttttcttgatcaaatcacatatacaatgattgcaattcatgggtgagaatatctgttagtttgctagttaactgtcttacctttcttaccttaaaccatacatgaagttccaatttttatctatttgcttgatgtgattatctgtttctttgagtgggatgaaagcattgttgaattaaaaggctgatatttttctcttcactttttccaatctaactgagttcgcaagaaaacattttaccaataagggtgattataactggtttgttgttgcatctacattgtatcatggtacggaaattacaggaatattttttcctataaatgtgctcttggctttttagttgtggattatcatatctatcatttaaacgaagttgcgggaatctttattgtgctcataaatatttcttaacttaaatacagttgtagattatcatggatttcccaatttatgtctctatttaataacttgttctgctaactgtgttccctcatctgtttttgtactcatctacaccttataatgctggtacaatatgagtctttcaactaaacaaagacatactgctgaagtgttttatcttaatgtaacagcaggttacgtacaatggataaccgtaatcagatttgaggtccttaaagtgtcattaagagttatatgctttgatatttatttatggaccatgatagatattaggctatgtttggtagaggagaaaattgagaggcgagaaagggcacgggaaaaagtgaaaaatatattgtttgataagaaaaagagggtggaagaggccacaaaaagctagttaaagtggttgggtaggtgagtgtgtgtgcttgcgagttatgcagattcaagtccttgtaatgtgtcttgtatagaagaaaaaacaaaagccaataaaaagtaagtggaagagaagaggggaaaattatgcttgccgtaaaatattttaaattactaaactgtaatttcacaattttttctttacttgctatatgtttggacatcccaagaccaatgtttttccttctttctaattcagtcactcgtataatctaatcctagttttttacattcctcaaaatagtagttttcttcaaaatttagttactcctgtagtcctactttttgttgccccttgttggtttctctcaatccaaaacagtgttaatgttatcgttcttaatacttaacagtaacaactgtcaaggtttgcttgtttgaatgattttgtagttatgtgtgtttagactttagatacatctaagatatgaacatgcatcacgtgctttagttttgcttttctcattttctttgattgtaagtaagtttttctcaagataaattgtttggtgttttaggtgttgcatacaaagaggtttgtatttgcaccaccaaagggatctgcagcagccgaaacaaatccgagtgagcctctccttgcagcactagaagagagcagcccgaggtctcttcttcagtatcttgcataccttgatctctgcatggtttgtgagaataatgttgatgtatggcggcgggctgcctttttcgaggaaagtggtgaaacgtacaaaagagtggtagctgtaggcttgaggcctctggaacagcttgcctctaaactgtctgaagctttggaaagtattgaaaataattcccaaatatccaatcaattactgtctccaaatgatgctcgaccagatccaaattgctctgaattgcttaacaacttccaggtacagtcaaaactctgtcatttactcgcactgatgcacaaatgaaattcttttttggagtggaaagatgagtttcttgattatgaatgtctatgctgtggacatgagttcccaatgccccccgacatcaatgaatttattgtgcatgactaatttaatgtcttattatgtacagctatatttatggtgtgccagaatggttgcatcgctaactgcacgctctcaccaagaggacagatatggcgttgctcagctctccggtagcaatgcagctgtggtctcgaccttgctctcttgtcttcttgccattgaatcattcatggggaggaacatcaatgtacaatcccctaataacttgatgggaccagctggtataaagtgggcaacatcaagcatgagaagaccagagattggtaaccgtaaaaagagaggcggctttccacattcaaaggcatatgtcattgccgacgctatgaggacatcaatctaccacattgtgtcagctttccacgacgaaatggtggctagtgcaaaatcaggtcttctagagaaagattggatcattaccaacaagcctccatttggcagccgtgatctacttccgcagaagctgcgcctcttccttgatttccgagctacctaactgtgaattccctggggtataacttaaaacacaccatgttcttcttttcccttgctccttaacttataggcctatatatgaagatataaaaaagagaaaggaaggggtcttgtttcttacccctgaaaggagtcaaaggttgtaacatgaatgagagactatttcaattttgcttctaaatggaaatgtcaaaggtctaaatttgaccctctgattgtgtgattaattggaattgcaacactacactagtttatttatgaaagtcaaaatgagttttttcatttgtccatccataactttattatcatttattaggtaaattttctcataatatgtataaattacatgtatttattatataagtagttttgagtaagtctccaatgcattacttaaatgtgttttagtagattcttcgtctatttcggtatacaagttttttagtttaatttttttatatgttatagttatttaaaattactgtaaatttttataaaattttgaatagtttacaatatatgcgattataaaaaaattaacttaattttttttagataatgaaacagataaaaaatctactaaaacgaccttttaggagagtttactacaaaaatttccttagtgttgcattttaatattagaaacaacaataccatcaaagaaatattggaatttaaattaataattattacaaaattgctaactattcacaaggaatcatttcgtattaatacctaatagcaatactcatataataaatagaataattaatatttttgtctcttaaactttttacactatcaagttgtacccatttattagtggtggtgaaaaaaattgttataggagtattaatgaaaagtataattttttagagataaaaataaaaatacgtgtataaaaataaaaactttatacatagtaggggtagaaataaaattatgtgagatgaaataaaattatatgggataaaaataaaaagtacaaattttataggaatacaataaaaatatgtaggggtacaaataaaaaattattaatttatgagggtaacactaaaataataatagtaaaaattacacaaattaatttgtaaaaagttgaggtagacaaatgaccccaaaagatccctccctccgtctctggttgtacccttatagtatacggctagttaataatatttttcgaaatataattttcacaaaaatgtgttccttccattatattttatttcattttatcatgaaatgagtaacatggtggatggtaattgataaacagatgcaaattaattttttttttttacctttttactttaaagattaaaaaactaaaagaatataaattattattaaaaaagtcttttattttatatttattaacataaaaagagtgtgaatatttatgttcaagaaaaaagtcttaattaacttaaaattaaataaatatatgatggaagaatactttacataaaaaaattatatttcaaagagtattatcaataagccatataaaatataatttattcgtgtaaaaagttttgagaagtaaaaatatcaattattgctatgaatatttgagctgattacaatgaaatgttaacaaatatgatatttatataagattaattgaaatatgctataatcggactaaaacaacagatgtacaaagtgcctctgcatctatagcaaggtgtttagaagatgcaaattatgtatctagctggaatgaaaatcagagttttttgtcgtgtgggggtggtgaggaaacgttagagcacttatttctcgtttgattggacttttcatttgtggcgttcttccttgtggggtatatttcctatttttgggtctggcatttacttgtgccttgtggaattggatcaaatttatctagggactaggaaaacaaggctttaatacggatgaaagtgtttctttgtgtttcgattgttgtcgatataatttggcggactcgaaatgacaaggtacacaatagaagtctggctaatgttaatcagtgtattgactatattcattactcttaattttaggaatgtcaatgggcgggtcggatctgatccgactatgatccgacctgatccagatcatgtacggatctgccccgcccgccccgctggatcagatactcggatcgaatcagatccgacccgccttataggatcagatcagatccgacccgattatttttttttaaagaattttaatatta

SEQ ID NO: 297946 - DNA, 898 bp, Cannabis indica
caaaataaactgttagaagatattttgtataagaaaatatttatgtaattgttgattgattcctttatattaaaaataccaataataatctagattgtcggaatcgatgtgtgggaagatattgtatctgctaatgattaaaatggtaaaatattgttaaaattatttattgtaaagaaggcacgcctttggtttttttaaaaataataaaataataaaaagaaaggcatgtctttggacgtattaataatattgcatattgcatgcatgtcttgccagttatattagtaattacctccaagaaagaacacctactacctaggttaaaatatcttgaaattaaatcaagttgatattttttttcttttgaaatgatatggttgccggttgtccatttggaccaatgcaaaaccctaaatagattctgataaatatgccttcatccactaccaatgacaatatgacatgatattatatatatatatatatataatatgttaacataatgctttgggattcgtgtttaggtatatttttagatcaaagtaatctatcatgtctcgagtaagacatgccaactctgaaagggaaatttaaaaattgacataatataaaactgttaattattatagtttttttttggggttaaactttctcaattgttattttaatcttttaaatttaaattttagtagtaaaactatccaaactattggcttattagcaaatttaaagtgttatatatattttttacagttaattaactgtcaacatatgctgttgatgtgtaacactcttgtacacgtgaacacgtttatattggtacacttaatattattatttacaaattataaaagaatatttcaaaatttataatattttttatttttaaaatttt

SEQ ID NO: 297947 - DNA, 5578 bp, Cannabis indica
ttaatttaatatttttatcaggtctttatatattttttactatttttttcagaattaataaaatagtataatttttaaaattatttttttaataaaatgggttaaaattttgtattggtcaaagtttaaggggtaactaatttttaacgataaaagaaatggaacctaaccgaaggggcaaaaatatgtaactgttatattttagggagaattttttacaagtcatatattttaagaggcaaaatcagatagtgccgaaagttcagggagcaaaaatattaattattcataattttattcctctctgaattccatgcgaaagtagcattgatggaacttaataagaagtgaacctgagtcagattgatcactaatgtttactgatgtttaattcattaccaaccatcagtgatgaatttaaagtactccaagtcttcttgcccatttgtcagtcttaactctaatccaaataattaagggagaaaaaatgggtcaaactcagtcaagtcagatagatgttagaatttgtagtgaccaaatgagttaagactaatagaaagtaaaatataaaaatttcaattggtgagcagtaacacacatttcattttcaccaaagagaattgagtgacaaagacaagagtactaaattaaacaaactgaaaaagcaaattacagatggaaacttgatactgaaactattgctttttttgttttttttttccttccttgacaaagaacaaacccaacaaagattcaaatccccaaaaaacaagtgtactcattgatttccttttcacttttagataccattcaagatgtgttaagtcacttttgtcccctggtttgttttaccacatcgttcaaatccccacaaatctcagacaagccaaacccactttttccgtttttgctcaattgtgcaaccaagattcctcttttttattttttttaggttttagctacatacatgaagtattcccactcattaagcatgctctctctcattaaataaatattatataatatataatataggtaaaataacaatataaaattttcaacggctaaaaagaaaaagtgaaagtgttcaatgtgtcttctcaaacaatccatcaattcctccataggggatttcaaccattcttgcaagactatatacaatgattaaaagattaaagaacaagatttctatattcataaattgtattgtatctatatctgattttcactaaaggaatgtacattttttttctccctgtatataattgaatatcaaacagctaatgctatggtgctttaaaacttgcatgcctgcttcaaaattgtgtgatgacgtctatcgatgaatctttgcatagttaggaaatctcctcctgtgctcgcatcatgctgtaatcataaatgtacaattgtttgagataaaaaattatgtattcatcaagtcacagagttgatatgtgaaattgataagattacttggaggaaaaaagcaaggcatgtaattcaagtaatctactatgattcatgattcatcaatagtaggaattaaatgggtcaatcgtccatacctttagtaatcttgatctgtataagctctcttatgagttgacgacagatggggcatttattcgatcgaactgtcaatgcttgcgcacattcactgcacatgcactgtaatgcagatttaaataacaagatagtttaacagataagtccagagagaaaaggttgaggttgctgggaaaaagaaatgtaataaactttgtttgttgcattatgaaaagaaaagaagaaagaagcaactttagctcagcatgggaaaattatgtcaagactcataaagaaacacactaaaagaaaagtcattaactacatgaaggaagaaaagggataagcaacaatacaatagcttatgcattttccatttattgtctgtaagtcctttcttacaaactatttattttaccaatacctaggttgaaaactagtaccatagtaaatatggtgacaaaccgagatccaagatcatccgttagaaaaatgcattaggtgggtccaaaatcaagtggaagatcttatagtttctaagacatagcactctagaaaccagagcaaaaccaggaaattaatcataatcaggaatagcttatagtttccaatctatgacttatatcactctagcaacaagtgtgaaatcagttatcaatatgactctagcaacaagtgtaaaatcagttatcagtatgactagcaaaaagtgtaaaaccagttaccaatataactctagcaacaagtgtaaactcagttatcaatatgattatcgatagaatgtgaagcctaacatagtggacatcacaaaacaagggttacaaacaagtgactgttttagttgtgcacttggcactgggttaaaatagtcaaacgaagctcaatttgaaggctaagcaattcttgtgatgttgtttcacaaacactctctgataaggacgtacaattcacccaactcataataacacctatactaccaccaagtaaggagagacattgccatttgcataaataaaccgtagcacatgctaaaggaatgccattatattttattgctttagcagacttagattatttatttatttttatcaaaatttagattatgcaggataaacaaaattggttaaagattggagatcttaccatatgccgacagggcaatacagctacattcttcggctcagtcatgcatattatacattctttccctagctcacccgattcatctgaatttccaaatccataaagttcgtgtagctcataacgaactccatcaatccacaggatctgattgattactttgaccagcaactggccctctccattatgctcaattaatgcttgagtaatctgtgaatggggaggtgcagcagaaagtggctgaatggactctaaatttgtcaagagagatgggaagtctgtttccacgtaaataacaagcgggagaatgtctttggccaaagatgaatttgcaagctcacccattccaaacaaaacatagtcaataaaacctatctcaataccagttccggaaggctgaaaaaatttctgacctagacctttctggaagggaattctcaatggcatataatattgagggtatagtggagcgaatgtgcaatccgatccttccttggcaaagtaaaatatggtgatactgttccccatgattatataacataaataaaagagaaatgcatcagaatatcagatacataaagtatacaaaatttacatacataaaaaaaggttattgcaatttgcaactcaagttttaaattctacatcccactgagtcaaagcagaacaaaattacatattggaagaattcagtagctcccatacatagtatacatgactatgataaagccaattcatgttgatcaagtagtttgcttaatccacacttatcattagattagtctatcaatgaggtgaaaatagtcatacaactgacagtaccttcagagaaaacttacagtaaacaacagtctacagctataaataatgtaaaaaaactataaaaaataatgtaaaaaaactatctgcaatctcagaaccctaaacaaaaacaagtttcaaacaatttgttatgtggaaagccattttcacctttcgaacccctactgcagtcttattttttccccgtaccattgagtccttatcagcaaatctactcaaagactcctatggggcgttaagatgaggtttagacttgatgggaatagaaatgtaaaatttaaattaaatttgaatgacaatgattttttgtttcctagtaggcctcactttttaaattaaaatagtggtaatgttaatcccctcaaacgcatggtgtttcatatttcctttaagtctactgcctccaactcttactctctccaactcaaactcacataacaaacaggtagcgtttagttagaaagaatgaaaacatagttagaataagaatgacattccaatactttaaaataaaaccaaacaaatgaatagaataacagttgtttcctttccattccattccatttcattccctccaaccaaacgctagcctagtgatcttaattgccgggtgattgtaaacgtgatgattaagtggacactagctttaccatatttagcaaaattttccagtgtgaaaatcaacttaatctataattcaacaaaaatcatagcaaaaccaaaccaaactggttaagaaaacgatcaacaatggctcaacatacatgattacattccaccaactcgtttaaattttcagtttcacacctttaaaatggaggaataattgaagctgaaaaattaactgcataacataattgttccatggcaacagttcaataattcaatctaaatcaccaaaagtggcattccaatctgtcattaattactcaagaacctagcagcagacccatttaattatatttatagttttttgaccgaataacgaaattgaattccacatagtagtaacattattaaataaaaacaggcatacacattcattgtttacctgccatcaacgagagcatcaaaagtgaaagagagcaaaaatgagtgagaatgatggacatcggtataaagcttgatggtacccttgtgcacattcacattgttttgtatccttttagcactcgcaaaaggaggcggcagcacagggggattgatcctgggttgagcgttatttgacggaaatggattagggatgtggtggttgggataaggagcaccaaaaacataagttgatagtggtggtggaggcagaatcggagtacgaggaggagaagaagaagattgcgaatttaaggaagggaacgaaaaatcaaccggggcagctgcagaggttgtcgtattagtgaaattcgttgtcgtttgatgatggaatgaagagttgggatgaggaggaagaggagtggcggaaggagatgaagaagaggtgactggactaggtgaagggtcgataatggaagtggaagggctttgatcttgatcttgatcttgatcatgattaccatggacgtggttgaggttaaaggtccttaccagactcaccattcttcctcttcttccatatctgctgctacttcttccatctctgctaaaagagacacccatgtcagaagaagaagaagaagaagaagaaagaagaagccctcctttctcctttctagtgggaaagcgtgcgttttaggggacctatactatgatgacatgggtgggtgacaatttccaacgacaccgtttttgctaaaaatcaaattaaaaaagagaaagattaccattttaccactgatggtgtacggagaatcaataattttgcaaaataatccttaccaagaaaaaaaagaattttcttcaatattatacctaaaattaattttacttacaaaaatacatttaagaaaagtatttacacaaataccaatatgtcacgtcaacataaataccaaaatctaaagtaattaccaaaaataaaataaaatctcgctttaaaaaatttcagtattttgctaagttttttttttttttt

SEQ ID NO: 297948 - DNA, 2095 bp, Cannabis indica
cggttgatgatgctatgctaagaaacttacaatttaaatttctagaactcagtgcatcacgatattatcaagattctgtgacagttaccttgaaaggtctagagctgaagctgcagaagatccttactgtcttcacttccattgatctttcttgcaactatcttgttggatcaataccaatggaaataggcgaactccaagcactctatgttctcaacttgtccagtaatgctttcacaggagaaatcccttcatctattgggaacttgaacaagttggaatccttagacctctcaagcaacaacctcagcggatcaatcccatcaacacttgcaaaccttaacttcctctccttcttgaatctctcatataatggtctgaccggaccaattccatctggcactcaaattcaaacattttcaccacaatgctttgctaaaaataaaggtctatgtggaccacctttgaataactgcaagtccgacgacaacccaaaagagaatggttcaaaacctggaaatgataatgagattgattggaatctgataagtgctgaaattggattggttgttggcttcggagctgtgattgtaccacttgtgttttgcaagagatggaggatgaggtattttgagcacattgatgatgttggtgtgaggctctttcctcaattgtatataaccaattacaacaagaatagaagaagaaggcactcatcatgatattctttctcaaagacatgtaagatttttactttttattgttcactcaagattaatcttgcatgctttctattatgaaatttctgtgatataataaaaataagaattaaaattcagtatgtcttaggttaactcagataagccaagcatgtttctttcttatatataaccagtttcaagaagaagaagaagaagcactaatagctaattcaaattgaaattgtaggaatctatgtcggtttggaggtttgaggaaatggaagttttgaagttgttcatgacatttttgttagattctttcggagtgaattgagcttatcctctgttttcgtaatgttgattttcagtcttagttaaaatattgtgtgaaacttatagaaagtggaaatgtttatcaactttcttccacttctatttagttacatgaatgtgtatatcaattgtcattctggaaagtccctttgcgaaattggattagatttatccatgtctaatttaatatttataggatgaagtttacaaaaataaatgttcataccccacccccattaatttacatattcaaagatattttgagttcgaacatgattaagagttggaatgagtactgtgaacccaggtgttggtggggtgaccatagttttgctctatgtaattcctggtttaatttgcatttctcttttaataaaacgaataatatcttccataaattcccaacaacaactatggtgtggaaaatatcaataagattttaatgatcatatatagtcttatatgaataatgaatgtcaagtggacaatcactacttataatttcaatatgtatatttttagttaggaactatattgtgatttattagactttttgtttgaaagatgaattatcattcaaacaacaaaaaacttacacaaaaattagggaagccagccaataaagcagcacttgcaatagagggcaaagccctatcccaaacagtgttggctttagttaaacaatgagcaacaatattagagttcctgagaatgaaacaaaaattgagcaggtctagtggtctacaatacaacaaaggctcctaatttgtttcacaatatcctcaacttcattaaaattacatcatatttgaggccagattaggattgttatactgtgggaaacaatatttgcagttttgctatacgaggttgaggaaattacattcgttatgagattttaaaagttgtttatacttttaagttttattaatttatataatattttttaaagtattttttttatgctatttaatatgtcatatatatgtaaattagattaggaaatttccatggtatactaacttttgccatttttttacaaaaatactgtcagacggtat

SEQ ID NO: 297949 - DNA, 4256 bp, Cannabis indica
aattactatttttttgtatttaaatattaattgcatatataattttcttaaatatacataaatatgtggattgaattccgcacaagtgccaatatctctactttgtagattggattggattagatcgtacatattgaataaaattgaattaggtattttatgaacacctctgaagcacgtagtgttttgatttcagataagataaaggcagtcccaccccaaaaacctaatattgtactattattactttctctctttgcattatatcattatgttccctaatgctcaacatagaagttaaggattttaataaataactagtaatagattattgtgatgataatgcattgaaagagcatagaataagtccaaaattcagacttcacattgtttttgaacaaagaaaagaacacaacccataaccaaagcaaacaaagtaagaatcttaattacttcttttttgtttttaaggttactataaacgcttacaactgttgttagtgttgtgttggtgagaggtagagggtgattccctcttttgtacaaaaaacttatcaacagttgcagttaaatcaaagtggtttgatcacaattacaattagactcagatcagccattgacaaggaccaaagcttatcatcaagctccttacttggactggtgtttgaaaggatccgtttctcctacttgacagtataagtataacctttatgcacagtatgtttgaaaaggactggaaagacatcttcacacattgatagcaacgccaaccccttagccctaccatggccaatgcaaaaccccaagattgagagctaacaaacttcattttgactgtgattcggcagcaacagaaaacttgctggaagtacggaaacgaaggccggttcctatgtgtcctgatgtaggacaaatccagcagaagatgtttggacctagtacctgaggtactcaacgattaattcagctcatgaaactcagatcagaagctttatagaagggctataagtttatgtaacacttgttttataaaattaagaatgactacaaattatacacatgtaaatacacattaaataagttgggaccaaagttagcccctgcaaggtaacacaaacatttcactgcaaacgctcaaccccatcaatagagttatgccattgtaggggaccaaagaaagtgtatccatcacagtgaaaccaacaattataccctgcatatagctgtatgtatcggacttctggcgtccacagaaccacacgtgggaactgtttaggtcccttgcacaattgtacaaggagactgaactctcaaattataataaaataaattcattcaattcaattcagctcagagtgaatctatttgtgatctgacagttcgttaacgtaaatggaaatcatatattcgtgtcatggaatgaacagaaaagcaaggcaaaatgagaaataccgttgttaaattttcaaatgcaccaacatcataaggatgtgaatagacattccctcctttctctgcaagccacattgctcttactccttcatgatactgtgaaatagtaaggggataaatgattttgtaattagtggatggatcgtataggtaatcaaagagatgtacaatgataacaaacttaattcctaatcacctcaattgtagttttgttttgcaaaactagatagatatgccaacctaagaggacactcagtgctacacttaagggaattagcattatcccagaaattacctggaaaagatagaaaggaaaaggatgagcaaacattgtaatatggtagattaaaacgtaacaaaacatatagcaagttgtcattacatatagtgttctaaaagaacttccacctccatcttcgtccttttgagaatcgtttgtcagactacctacaagcaaaatctaagaatatggaaagtaagatatactagacaattcaaaaacaaatatgtacatattgatagaaaataaatagacaataaaagagtcatgcaataagttttggaattcaaaactaagaagatattgaattagtatcatgtgcaatcaatcaacaaggagataagtacaatcattcaaataatcaaatgcaatttcacaaaaattgtgcagtaaaacactaacagccataagtgacacaagtcagaaattaaggcggcttttagtagcactgttgttttcaaatttttaaatcacaaaagtatttttaattttaaaaacaaaatacaaaagtgttttctgtaaatttcatttttatatttattttttgtttttatttgagggatatgaaactgaggtgagagaatgtgggtcggggtccgaggtccgtgatcgggtccaaggttggatgcaggtttaggggtctgaggtctatggtcgagtccagggtcaggttcgggtctaggtcatgggtatgagatccgagttcaggtccacggtcggggtttgggtctggattcgaggtttgggtcattgtctgggtccagggtcaggtttgggattggggccagggttcgaggtccgggtccgaggtctggatcgagactaggtccaagaccaggtctgggttcgggatcccaagttggggctaggggttggggtccaagactgaagttggggccgggatccaaaatattgataaaaaatacaaatagactataattaagaaaaaaaaaaaactcttcaaaaaaactttcaaacaaatttttttttcaaaattttgattcacattttaaaaattaaaaattagaaccagttatccagagaatgttttttaaaatattttcactattctaattaaaaaaaacaaaaaactgattgaaattatgcatcctaaataatttaaaatttcattgaaaatcaaataatcaaaatgcattttgacaaaaaattctgcagtaactcactagcaagccataagcaacggtagttagaaatagaagcaattcggccaccttatgtataaagattttataacgtaccagggagtatatgcaagcaattacagcatacacaacaaagacgaagaaggctttatagtttgcatggcctacacaattatttatccaaatgcaatgatgatccttgcaaagaagaagcaacactttcacacattaagaggtttttaaagaatatacatgtgcatatatttgtatagtgtaaaatatatatatgagagaaaccgagagattgtgcataccattcgtaaaacacatctttggcaaacacggcaatgatgcgcgcgaggtggtttatagtgacagcacttttggcaatacctcaagtcccctccctgcaaaaactttctaaaagtcacgataggacatgaaacgctaaaagttcctatcagcatggcccttttttatttactttcagaaacctttaccataattgacaggtcttaccaagctcaaattctaggtttattactccaaatacacagttttagggaaatgcaaatagaaaccacatttagacttgcaaacgatcaataggaaacaaattatcaaattgaacttaccagcagaaaatatattattaactaatctataaaagaatcataaaccacagaagacctaagaaagctagactctcctcacatgagtcaaagccaatgaggttgacaggcatacaggaatcgaatataacagtaaattggaccttatccaatccaatttccagataccaggaacaaaacaggaagtattaatctaagaatgtattttgtcagcatcttatatgtagaattccctcttaattctcaactttaaatctagaattattgcgaaaaggaaactagtgcttggctcattttgttaacatttgaacaaggttagaaaatttgaatgtacctcaataatagaggtcaatatttataatgttattactataattagcgacatttgacaagctagatatctacaagtcgtacacagtagaattcattgtggccaattaattcatgctgatgcacaaaatcagggtaatgaggtcaatgatttgtagtgcaggaaataatcaagagagattatgaaagcctagtagtcctgccaaaacgtaaaatggttttcaaacttcatttaattccttgtgtttaactgaatatatcatctccttaacacttatgttagatcataattctagtgaatgtgatatggcctgaatgagtagacattccagttgcaagagcatttaattaaaatatccaagagagatccttttaaacataaaatgacagaacaacttc

SEQ ID NO: 297950 - DNA, 6603 bp, Cannabis indica
gtaaaatttcgtaaaaatataaaaaaatatatatatatattttgaagtataaaaatgaaaaaatcctatttatttttattaattttctgtatgaactatttattttcgtatagacttcatattttcccaatattgtacttatttttttcatataaattccaataattaatttttatttttttgtcaggttccaaataatctagttatttatttattatttattatattttgtatggaacaataaatttaatctagttaattaatcaaataaaaccaatcttattttcagccactactaccagtagatactcatctgatcatcgaaatgagaatataggagcaatctcaatttcatcaacggccaagataataacacgtggcataccatcaaggaatagggcccacacgtgctcacgtgtataattcaaaatcccgggatttacagccactgccgatgaatcgatctcatctcactccacaccacaccacaccactccaccgcctttctctctcatctctcttctctcttcctctcactcttacagagtcctgaaatgtacccaaacatagattcgccccattttcactcctccattcctattggtcaatttattatttatttatcaaatcattaaatcgaaacactgtttctctcttccaccgcctttcaatcgaaacactcttactgtctataaatttctaaaacccaaccacaccagactgtttctctttcccttgccctccaacatttcttctctctctcactcactcatcctttgttagggttttttctctttgtatgcattttctactgacctgtggagataaaagtgttaatggcggcgagttccagaggtttcgcgactcagttcgatttcaaacttaggcggttcgcctttcttcatcattcaccgcatcggagtagtagcaatggtttggagttgaggaagcggaagagagttagttttgaagttgaccgagttggagttactagtcgaatcggatgttgctgttctgactcggtggttccgattaggagagcgaccaggccagggaagagcgttgagaagaacgaagaatggcgatttgatctcaagaaagcccctcgcagagttcgaatccaggccacttctcctgcattgccttttgcttctcctcagtacgttccgatctttcttttctttttcttgttttgatgatcatgattgggattcttgcttacatttaatttagttgatcttaggtattttacttatcaagaacgatatacttagtctagtttgaagaaaatctgtgatcagtttagtttttggatcatacagtattcaatgttaatgctacttttgtctaaaagttcatttaaatagaaacgcagtctggtataaatttcgttttagaaccacaggaagaacattgaagatttgtaaaagtgaaatcataagcaatgatgtaaaccttgtgttgccagcgagggtagttagatgtttctgaaaaagatactttcaagatgcgatttatgaccaatctttattcaattttccatttttttatcccccgtgattactgcagatatcgttttgactctaaacaagaaaaatattatcctcgatgtagcccgaggaattctggtccacagtcccgagacagtccacctaaaagaggtaatttataatatatttcaaaataactagaaatagactttaattactatcagtgtatgctattggacttaaaccctaggaacttatttcatgttttgcatttataaatttatttgatggtcatttgatgcttgctgatgccttccctgcagacactggtattgcaaatgagaaggattggggcattagtttgttaaacgaaaatgtcaatgagactggtacaaatgaagatggcagtacttggtaccgagaaagtggagaagacttgggagataatgggttcagatgcagatggacaaagatgggtggtcaatctaacgatggatcttcagaatggaaggaaacggtatgatttgatctgtcttattggtattattaagctattgttttaaaagaaccaacatccactaacccattttcaagttcaaaattaaatgtctagaggataaattgaaactgataattactaactttttaaagtctacaaatgcaactggtagttactttcttgttagtagataaaaccaacattaaaatactacgatcaatggaacttagttcctagcccctagaagaagaggatattgtttcctaatctgattttggattttcagttgcatatagtttttggtttaaacttccatataatttttttgcacaggtaaaattatcactaaagcttatataagggaattatatttatattttactcccttttgaagttcacagttgacttgttacatgaaattgaagaaggaagttccctgtattctcacttaaaaactgtcttctatggaagaagttttctctctatctctatggaatgcgaaacagtcatttcatttttactcttttttcttcttcttttatgtgggtctttttaagaatttgcatgcttcatgtaatccaagcttttaaaagtttggtgtaatatgagaagatcacattcctttattagtttttatttgtggtaagcattaacttttgttgattcaccagttttcttttcatcgtgcaaatgaaaggttctatagttctaccgatgtgtgtacctttaagaataccattagtcaattgtcatcatactctaatgcttacgatattatgctgtgttcctgttatgaccaagcggttgcaatgcacttaatgtagattgggtaggcatctactgctgatatgtatacctgtaataataagacatcatacctagtcaatcgccatcgcatttctaatgctcattacattaacattgattatatgaccatattaagtatcaccaggtggatgcatttaatgtggatttattgatctcattgacagtggtgggagaaaagtgactggaccggattcaaagagctaggtatttatgcttctcattctatgtgttctggtttatattccatttatttggtagtattgaaactgtgaacgcgaacttgtaagggttatttttatcattttatttatttgcctcttttttcccttttcttttgtacaagcatttgtgtgtcaatatttctgtcggcattttatatgataacgctatttttgtcatttgatctatttttgcctcttttcttcctttttgtacaagcatttgggcatcaatattgcatcccatatatttttatgataaaatctttgacttttttttaactacaattgacgtgaaattttgaacccattgaactaaaatggttacactatggtttatttatgtaagagaagtagagcgtattattactgaaaaattaggttttttcgttctgttaaccatacatttcatatttgaaaatactttaatgcccaagaccacatgtagaaaaatctgttatctatttgcatcacacatgcttgtgttaagtcagttctcagtgatatttatctttttcataggtgtggagaaatcaggtagaaatgcagaaggagattcatggtgggaaacatggcaagaagtacttcatcaagatgaatggaggttgtttactgtatttaataatctttcaacattttgagatattaactactttgtttttgcttttttgcccaatgtaactatttagattacttcttgctgttctatgatcttccatgctctcgaagattggatttgattttctcctttgtcggtttttccggttttccccagtgtaactatgtagtttttgatcttgcaagtactacattatggtattgcagtaatctagcaaggattgagaggagtgcacagaagcaggcaaaatcaggttcagaaaatgctggatggtatgagaaatggtaagcttatgctttagaggatgacatttgtacgcagttcacttgagcaattatgacacgcctaggtatagtaatattgatggaatggaaaatttggatacaggtgggagaaatatgatgctaaaggctggactgagaaaggagcacataaatatggtagacttaatgaacagtcatggtgggagaagtggggagagcattatgatggaagaggatctgttctcaaatggtcctcttttcttctgctttttttcgtttccttttttagtttttttaatttgtttagcagttgtgttgcgtaatcctattatacattggaattattcactgggaaattggtatattgtcagtattaatgtttctgatttttgttcacttaataaccttttcaggacagataaatgggccgagaccgaacttgggactaaatggggtgacaagtgggaagagaagttctttgctggcatcggttctagacagggagagacatggcatgtatctcccagtggtgaacgtatgtcaattcttgtactttcgagcaataatgtttctttcgagcaataatgtttaattatgcttcataatacttattgcatgatctgtgaaacattctctatttataattttaattttctatggtcattaatgattacgttactcactgttagtattaaccacccaagaatatgcattctgaactttatttaatgaggatttacatagggcggtttctgttattggtacttcagcattctttcttgtctccatccgtattttatgctatattgttatgttttttgtcaatatatagatatcttagtagaaccttttcacaaatctctgggattttttctaactgatgacttgtttttacctttctgatgtttaggttggtcaaggacatggggagaagagcacttcggaaatgggtacggaaaccaaactattgtttctattaacttactagtatgaaacgttagtttccatatgaatttagatgattattatgaaatgtcactgttcttattatgtggtaatctcttctcgcttttttcttttcttttaatcagtaaagtgcacaaatatgggaagagtacaacaggtgaaagctgggacattgttgtcgacgaagaaacttattacgagtaagaatttgactttttcttagtcaagtaatgttggttattgggtgacttgtgtcgtcacagttagtaattgtgatttgtgtacttttttttttttgaatgaaagggctgaacctcattatggatgggctgacgttgtgggtgactcgagccaactgctatccatcgaaccccgagaaaggccacctggtgtcttcccaaatctagactttgggccgtctacacctcctgagggattccccccaacatgatgaaatcctttttgggttagattgttaagaaattacttttgccatcccctttgtgtaatcgttgaaattagtgcaattgcaatattttgatctcaattttttcattcttttaattggtcattccttaggatctgatggtaatattctgaacattatcacctgcattatttctttctggataacaatgaagtactttgtgactcaaggaatttcgaaattgttttttttttcaagctttactgcgttaatgtggaataggatgggaggagtttattactttaacaattgttttttatgttgtccactatgggcaagagatggaaatgcccctagtttgtgggtaactgcgtatttaggctgcattatttgttttgggaaatttgagtttccattcctaaatgtgtctcttccctttttcccttcttcccttcctactctctctttctaccagccaccaccaccgctattaccaagagcagcgaccaccaccgctactaccatttactaaaaaatattggagttggttgtttatatgcacgtagtttgtttttaacagatctatctaatttttcagttttttgagatatgtgacgatattttacgatatatttgcgcaaatcaaatttgaggttagagattgtgttttgtgataaaatttgactttttacaatgtgtctaaaaaactaaaagctttgagtgtgatttgttaatacgaggcgtaaaaaatacacaaaaggtttaactttttagttaaacatcgtgaaacatttggaactatcacaaaacgtctacaacttcagatttgaactatcacaaaacattgtaaaatattgcgaaaaattagataaaaaaaacgcagaaaattcaaaattcgaaatgtaatttttggaaaaaaaattaacaaaacataggtagatatgtgtagattgttaaaatcaaacaatatacatataaataatcaatttcaacaacattttttaaattaaaagcacttacttttttttttggcgaatggtggtgatggtggttgttagaaagagagaaaaggttaggaagataatggaaggggtacttttggtagaatgaaaaataatagcataaaattttaaggggtgttctatttgcaccctacaaaattataaatacacctcattattaaaaatatataaacttaaataatttttaaaaaataaccctaaaattttttttaaaaaaaaaaattcttacattattttaagttaatttcaatacttattttaatttcatttt

SEQ ID NO: 297951 - DNA, 7393 bp, Cannabis indica
aaaaattataaatgagatataactcataactcgcaagtgaagctaaatattaacggctcgcactgtatatgaaagtattaaacgagacatcaagacgtcttggaaaaagtacttaaatccaacatatgaataaatgatctaactattcatttaaataatcaaaaatatacaaagtgacaagatcaataaaagtatattcaagtttgcttgaaatggattacaacagtttttacgacacagaattgataactgctcacaaattaaaagcaaggcaaataataaactcctcgccggtatagtagactgttaactacttaatattaaagaaatgtacaaagaatggaaatttccaaaagtactttgtatatgatcaaaatatgattgtttaaattgtgagtaaaacgcaagcaaacaattatttattaaagttcaaacataaaagtgcggggcattaaataaagataagaaccaggttggatggccatccaacccggtacatttgtctttacacaaaaaatagtatcacaaggggcaaaccattgtcttggtcctactaatttctttttctctcttttaatatgtacatgtagtaaataataaactaaattttgattttaactctttttgatgtttttggtgtgttctctctaagtttgtatatttatttggtaatttttttctaaaaaaaagctaacaaatatagataatttttgaatttttttttaataaaaaatattaaatatgcaactatttttaaagttatctatatttaggttattcaatagtgatacgtgttacaatgttaaattattaatttttcatattatcaaatatttttctggaaaaatcaatgcttatacctcttgctagatttttcaaagtaattgatgataaatttttgattttatctcatattttgctacatggtgaacttatttacatattagtgctgagttattatatgtacatgctatttgatttgccaaattgagaattgtcctcccttcaaatattagtataagcatactactctaaaacgattggacttaccaaaataacagctccgagaagtggaactttggtatacaatggcatgtggttgattctcttgattgcttttctaacttaactccctcaagttctaggttttgtttgcttagtagatatttatttaaatttaccttttcaaatgataatatattatttttattatttgtctaaaactaagtatatatatactcgatcttattagagaagcaacaaattaaagctgagagttcataggagtaaaccataaaactaatcactcaatccaaaaagcaatggtcacctctaataacggtagaagaaatagaatagatgaggatccccccaccaatagaggtagctaacatgaatgattatgtcttgtaatcagtgctggaccaagaatttaaagtgagagggagcgtaattttttttttttgtaaaaggagggaggatataaataaattggaaaagaaaaatagaaagtgtagttagtgggatttgaacctttatcctctaacatatttgcatctaccttaatcattacaccaagcttagtactatatctataaatatcattttttaatacaaatatatgttgtaactaattaaaatacatatatattttttttccgatttttttttttagatggggcgactgcccctcgctacaatgtgagtccacccctgcttgtaatgataaataataactatgctttattaacaatctgtctgatattaatgtttaagagtgactactatcttgtgacccattagttttctacatattttatgggccaaaaaatatggttgttaagatttttgtattgattggatacttataattgttttttactaaatatttttcaataaaatttcttgaacatctcatgtaataaattcacttgggttattactgtgtttattgaaagtgataatatggaaaaagtaacgcgcatatttttctttggataaaaatatttaagaccattttattcatctgaatgtatatatatacattgaatatactatttttcattcttgaaactttcaatacactatttgtttcatgtttgaatacattatttacttttttgattatcaggatgattttgaaattaattagaatatttgtttaatttctgatgtggaatttttggactagtaataaatatattctttcctgatttttaattttcattgtttataaaataattcagatttgactgtttacttttgattgtttatgatttaatataacttttgaaaacttaatgatatttccttagaaagattcttttttttctctctctcttcttttttgattttagatttaagggaaaaataaaacaaaaaactaaacttgtttacaaatgatgacaatgacattgtttgaagcgtctcaattttgtagtaggtttaatttttcataatttgaaggttgagtccaagagattgctaagaagataatgtaaagaattggatgagtagagtggcttggctatttattattgttattccaatttttgatatcatgacgtggcatgtttacgtggatgaaaccaatgccatatggtagtacaactaactaaaagaaagaccaagtaagcacctgagtaaacaaagaccccaacactaaaatgaaaatcaagtgatagactagctccctctaaggagctgcctggctagcgcagggacaaaccatggccagccaggctagcaaccatagggacctggccgacaaggggattctctacaagcctaactaaacactcctacacgtggccaggagtaataggctgcaaattgggcctcaaaagcccaacaaaattactgaataatatctagaattaacggcattttggtcttttgcaaatatataacttactataaaatttctaagggatttgaatcataaatcttgggtttaaggcttcctatataaaggccttagcctttgactgaaaatctaagttgcataagttacctctaagtgagaaacatgatctcaaactctaagtatcttataaactctctcacttcctcattctctctcacactcttaccttaggctatctaacaattgagttttgctaggcactgattgatacattgtaatcctaagggtactatagcagatcccacctatattgatcaggatagtacttccctcggtataatacaattaaaagaggagtagttcattactcgttatcacaatgggcccaaacctctatcacaaatccaattgtctattgcttttcattcttatttgtgcacacatatggcaagcatcagatctggatgaccccactctcagttgatccctttttgaggtcaatagcttggtgctttcattgagagtgtgtcaagcatgagatctgatcaatcgccatggtgatccaagaccaacatcttcaggtctcccacaagaccaacagattggagatccaagaactcaagttctagtcacaactggagtccccatgattaccgcagatatggttaatcttgtcaccacaataggcacaataagtctagccaacacagctggccaacctaacacaagcaccccagttgattcaagtggcagcccgatgcctcctagtgtagacccaccattggccccttccactcaaggaagcaccaaggggcaaccacccctagaacaataacttcaccttaaatctggttccacaatagagagaataatgtctaggagtgggtgagccagcaatttgcgagcctcacctgtatctaggagaagaccttgagttggccaaactcaaggaagctgtaggtcgtgcaggcctaactgaagaaccacacactgctaattgcgatgtttatgctcagtagtgatgtaaattcctaagatggatggatgatcaagagaacatccttcgatctcaccaagcagaatttgatcaccgcaactactgcctagttcctcggggactaggacagatcttcccctgccagagggaggacaaacctttcttcaattgacaaatgacaacattagacagaacctgacaaccagcgccttggggggtcagtcagggatctctggctcaacaacaacccccattctgcagccgcttgccgataaaccatcaacaggattacccctggctagctagggtacattacttcttacataaggggagcgagatgcacagagatagaactttgactaaggaggaccgagcgagggtggaaacacccaaaatggcaattcaagaaatgaagttgatcacttcaggcgtctagatccaccaaactcaagcaattggtatgatctacccccaattaacacacagccaacaccggtcggctgtggagtcatggaaaaccagaccctgccaacgtaggtctggctggccaaggaagcgtcacgggcggtcaggccttgccctttgcacgtgtggctggccatggaggagtactgggtagccagaccctgcccaatgaaggtttgttcggccaagcataataattaggtgtaaacctaatcggcctaggccaactcgtgtacttgggaatggccagccagggtctatagggcatggctgatctttaccatacactctcttagggtatggccaaccagtccctatctttctcagaatctacagcctccctaaggaaggccagtcaatcaattccccacagcaagagatccttctgtgcaaccacaattagaaaaacttaagggcatgatccatggcatagctggcccaaagccttcagaccttgaaattgattggttaaggggatcaccattctcggcatatataaatgcctcacccctaccaaagtttaagatgctagtatggaagatgtatatcggacgagaggacctgctagctcacatcaaatacttcaacatacagctcgacctccaaaaggtcactagtgatgtgcgttgttgcatatttcccgccactctatcggtgactttaaactcaccacggggagattcaaatcctgggctgagttgtcacgagaattctacacacaattctcgtcttcaaggcttgtaccatcaaagctggaagaccttttcaaagtcaaaaacaatgacaaggggaacctttgaaggattatatttagagatttatggtcgaggctaccaaagtaaaaggctttactgaagaaggctgatatacaaccatactggggggcattctcccactaagaaacttctaaaaagatatctagaggatatgcaccaacaacttgaagaagtcccttgatataacagatgactttatcaaacttgaagaagtcatacgataggcccacgcaggacatgtcaatagcaggcagtcacgaggcacccagcagcctcatgacccaccatctgcataggcaaacaacagctgcaaacttctagtggtaaaacacttgaaataagcaacactaacatttctgggatgaacactgacaaaaaggggaagtttaacacttatcccacaccatagaagaacaagcaggagaagtatactttcttcacccacctaacaaaaaagactacggacatcttcatggccactcaaggaacggtcccataccaaaagccctttccaatcagaagggagatgggtaagagggacatgttgaagttctgtagatatcacaatgactttggccacaacactaatgagtgttaaaatttgaagagaagatttggtacctagtatggcgtaacaatccccacctatgtcattatgtgtaagaagaccagactcaggcagaaggaggccaagatggagatccaatgccaccacccgtggcaggacatctagtggtcaccataggcataccacacattacaagcaaaactagcaaagctagggagtgctacactcggacactccatcacgagcctagaggcaaagtcctagttgtcgaagaccggagctttaagcagcagaagcctatggaacccacgatatcctttaccaaaaaagatgcaataacagtcagttcccacataatgatcctctggtcattactgtgtaaatcaggaatttgactgtggctagatgtatggtggatgatggagcctcctccaacattcttttcaaatcaacatatgaaaagatggggctccaactcactaacctggcgccttgtaacaaagtgatgtatggatttttttggccaatgcatcgcacctgtcgggtatatcagattaccctcacagttggagaaaatccaaccaaaagaacattaatgcgcaagttattgtgatcgatgttccctcaacttttaatgccattattggctgaccgaccctcaatgacctgaaggcggtgacgacgcctatctaccacttatgcgttacattcctaaaaaggcatggactggcatgcgtgagaggagaccaacaatctacttgtcactgttacagtttttccatccaaggccaaaaaggagtagaagcccgctagaagtctagaagataaaccctggaaggggcaataaagtctagtccatggcagggatacaaacacagatccttcctttggggatcctgcaggaagcttcgaatctatagaagagttggaagaagtggaagttgatcccactcacccaacgagaagactaaagattggtaaaggtttggctcctgaaattaggccaatctcaacagaatttctaagggcaaacctggacctattcgcatggtcacatggagatatagctggaatcgaaccctccataataacccatgcactcaacattgaacccaacatctgacctattcaacaaaagaggcgattgctatacaaggagcatgcccaggcgctcaaagatgaagtcgaatgattgagggcgaaaacttcataacagaagcattctagcttcagtgggtatcaaaacaagtgttggtacctaaatgcaataggaattggagagtttgtatcgacttcaccaacctaaacaaaacatgtccaaagggctgcttcccgctgcccagaattgaccagctagtggatgccacaactggccatgaagtcttgagttttatggacgcatatttaggttacaatcagataaagatgtatccacctgattaggagcacactagcttcatgatagacctaggcctatactgctacaaagtcatgccctttgagctgaaaaacgcatgggccacttatcaaaggttggtgaacatgatgctcacatatcttatcgaatacaatatggaggtgtatgtggatgacatgctcgccaagtccaaaaaggtttgaggcatgttgaggacctaggcgagtgcttcaaaatccttcgcagctacaacatgaagttcaaccccctcaaagtctcttttggtgtaagctcgagaaaattc

SEQ ID NO: 297952 - DNA, 6338 bp, Cannabis indica
tttttacttaaaaagtcagtaatttaatttgatgtgagacatagtatacaacttttagagttgtcaactattgaatatttttctaagagaatataaattatgtgaatgagagaaaaaaaataaaagaaacaatagtttaggataatgtgtgtattttggcaactataagagcatttctaatgggattgtccatctagttatttttgctacatatgcaatatggttattattttcagtgcaattttatttattattattgtttatatttaacaacggccatgtgatattactttaccctttttttttcaaaaaattacattgtggtattattttatagaatttaataaaatttaatcatttaaatgatgacatgtgagactgggcaacttttggagttgtcaactattcgagaaatttttgtaagaaaggttgtcaaattttatgtagataagagagaaaataaaaaaaaatattttagaatgatgtgtgcacttttgacaattatgtattaccagggtcggtcttaggcataggcgggttaggcccgtgactagggcccagggcccactcattttatgagcccaaataaaaataataattttaaaaatatacataatttttaataatttttaaaaatatcatttatttttatagtaaaggtctaatttattttttacctatgacccatttcaactcagggccgaccttgtgtgttaattacctttcattagagatgcttacccctattgaatatgttctaaattgtccaatatcatactaatgtggttcattgtgagtaattaacaatttttacagtataattgttaaatcaaaatatataaaatccaatattaaatggtatcaatgacaatttaacactttttacgatttttctcaccaaatgctccttaataattatatataaatatatatatatatatatatatatgctataatgctatagtagccggctgaacatttatgtcttttaactttttgtgcatgaatcatacttattgttttcatgtttaatataaattatgagtaatgaaatgatacactaaaatattagtgcataatatttaagtgtaataagtagagaaaagatgctttatacaaacatataatattatatttttaggtatcatatcaattaagttgaccatgaatatatataccggcctgctttgtacgtataaatacataaaacattttaggttaatattattattattattatgtgttaataatatcttaattatctaattaagatcatatatacgagtatagacatagtgatgatgatggtgatgagaagggaattagggcattggtggatggtaatggtgttgttaattggtgtaattaaatcatcaatatcaaccattaataatattcctactcaatataacacttgttcactcaatcgttcaagttttccaactggttttctctttgggacatcttcctcagcttatcaggtaataattaacaataaactttaattgatcaaattaatattttacataatattaatcaaacacattttattgatttaattttaattaattaataattagtacgaaggtggtgcccaagaaggtggcaagggaccaagtatatgggatacttacacacacaaacatccaggtaattaattattagatacataatcatctcttaatttacttcccttttaatagtctaatatatatttgcaatatatatttttatgaattctcatttatatatctaaatatatttcaatattatcatgcatgcatgcatatatacatgttttatatttgtataatttatatatattatgcagataagataaaggacggtagcaatggcgatgtggctgttgatgcatatcatcgctataaggtacgttacacttacacacatatatattattgatcatgaaattcaatatttatatttatatatataattaattaaaatttatgcataagtaaatgggaaattcattttattaattaagttttttcgtgttatgtataggaggatgtgaaaattatgaaggaaatgggattggatgcttatagattctctatctcatggccaagattgctaccaagtaagttatagtttgacatgataattaacattatataaatatgtgcatgaattagaaagttaaaatttgatattgtttatatttcttgtattaattattgtgtaattgattatatgtaccaattaataataggtggaaagctaagtgggggagtgaacaaggaaggaatcaaatactacaacaacctaattaatgaactcctagccaatggtatatatacaaacataccatgaacttcaagtataattttttttcttctaccaaggtgtccaacaccacccttgtgcttaaagatatgttatatttttgaaaattatccaaaaaaaaattatatatataaaaggaattgtttttgggctcatatattatatgaacccatttgggttaagataggtcaggcctgtgcctaagatccatttaacccagaaagctcaaaaaaaattgcagctaagtgggccttaaatataggtctgatctctcttagcccaataaactattttcacatattcttataatattagaggatactttttagcaatttttttagtactcaagttactaatgtgcatggttaaaaaaggttttcatatttctctttatatagtacaattttaggccaattaatttaacagaattattaacatagatggtagctagtaagaaattatttttgccaacatcatatatattaatttaatatcaatatatatacatatatatttaattcaatgcaggcttaaaaccatttgtgacactcttccactgggatcttccccaagccttagaagatgaatatgggggtttcttaagccctaacatagtgtaagtacatatagttgataatatgaaacaacatatttatatacttgatttaattggcttcacatgtacctaattgcattttttttaatgttatttaaaggcaccatttcaaggagtatacagagctatgttttaaggaatttggtgacagagttaagcattggatcacattcaatgagccaatagcttatagtgtggctggttatgcaacaggaatgtttccaccaggaaggtgttccgaatggcaacacatgaattgcacggctgggaattctggcaccgagccatatttggtcacgcaccaccaacttctcgctcatgcagcctcggctaggctttacaaggacaagtatcaggtacgtcgaccttaattaatggggtgtttagtatgagagtttgtgttcgagtagagtacttaaaaagaaattgaattaagaaaattatgtgaaattcaaattgtttgaaaggttcaaaattacttttaaataaattagtataaaggtgggattcacctgaaaacaaaaaattttcaatgcatcatattaaaaataaatgaataaataaaaattttatcttccgaactatgatgattagagggtattgtctcctaattttttttgtcattttttaaaaatattccccttgaagtatataggaatacttaacattttgttcatttattgaaataatttattaatttaaccacgagctactcatataattataataagaactaatttaatttaagctggttagctgaaacaaagtataataatcgtacgtaaacattcaaacattaatttcaaaattacagatacttaatcctattgattggacacttaattaccatatagatcattaaccttggattagtctaatatgaaaaaaattaaaaattaacaattatttccataatccgagaattttttttgtacaaaataataatttacaaaacaaaattctataagtgtgatagtttagtaaataaaatttttttattcaaaataaatttaccaaatatgaatctctataacaaacacctcccaattaattattttaactaattagcctctccttttaagattaatatgtacatgtaacattataatcatcatgtttattagggaagtcaaaaagggtcaattggaatcacattagtgtcactatgggtggtaccatattctgaggcaaagcaccacaaaaaagctgcacttctagctcttgattttatgtatggatggtaagtacaatatcatttaatttaatttaagaatcaactaagtaatattataatatataattagaggtggttggtgcaggtttatggaccctttaacaaatggtgagtatcctcatagtatgagatctattgtgggagataggttgcccaaattcaccaaattggaatctaagattgtaaaaggctcatttgactttattggattgaattactactcttctaattatgcatcttatgctccacatcacaataatgatactactcttcaaaatccttcctacttaacagattcttgggcttcattatcttgtaagtatttatatataagtattttcatttcaattataactttctttttgctatagatattagtattattgcaataaattataattctattcatatgatcatatataattaaattatattggatctcttataatattcagaaaatttaaaataatttacaaataattattagttgtacgtgtgtataaatatcaaaacaaaatatgtgtgtaaccagaactggtcctgaaatttagttagtcataggaaaataagtatttttgggttcttattaaaaaaaaagtagtatttttcaaaatttgtatgaaatatattttaaaagaaattttttcttgaactaagtgggccttaaacacaaatctagcccgcctatattcagagttgggcctgaattacattataacaatatatttaaaaaactgaattacaaatttttgtacttgcaaatactaaaattacttagattatctaacaattttcatataaatatttgtatgtacacctatattttatagatagagtaaattaatatggccttcaaaattaacaaagtattttatattttgtggcagcggagcgtaatggggtccctattggtccatcacctaatgtatgtatatatattatatatttactttaaaagtaattatatttgaaataacaattattaatcttgtttatatagttataatttaatattaattcaatataattatattatatatgatagggtacttcaaatgcgatctacatttatccaagaggaattcgagatgttttggtctatacaaaaagaaagtacaataatccactcatttacataactgagaatggtataattattttaatttattttaacttaattaataatcacttcatttaacttatttattgtcataaataattgtatattttttataggcatcgatgaatttaatgatccaaatttatcccttgaagaagctcttatcgattaccaaagaattgactaccattatcgccatctttattacttgcaaaaagccataatgtaagtaaatatttaatttaaacattaaaaataagattaattttaaatacttaactttaacactcggttacagataaatacttaagtttattttttgacgataataatacctaagttataatttaaaattttctataggtactgggtcattaaatgtcaaaacataatctacttgttattttcttatcggtatattaaaattaattaaaaaaaataaaaatttaataacttagaccaatcaagaactgtcacgtggtcattgacttaatagttaacgatcaaatacttatggattgaagttcagaaatataaaagttaggaaaatttacatagtatactaacttttgcaattttttttataaaaatactgccaggcggtattttatacttttttactgtattttgtttataagtttcatactgcagtatactgtgttaagttttcactggtgttctactagtgttttactggtgttctactgttgttttgagttattctgctttgtgttttactggtgttttataaaaacacagtatttttgaaaagatttccgtgtgacagtatttttgtaaaagttaacccaaattccagtatttttgtaagtttctctaaaagttatgtattattaccgtcaaaaattaaactttaatatttatctgcaatcagaaattaaatttatttatgtctcaaattactataaaaacaatcaaaatcataaaacattaattttattattaaattaattaattattaatatatgttaatattttttttatggtatgaatatcagaaaggatggtgtgaaggtgaaaggttactttgcatggtcatt

SEQ ID NO: 297953 - DNA, 2538 bp, Cannabis indica
tctcaagttgctattcctcaaaagaaaattactaaattagcttattttgaaaaagtttttcagaattaaaactagttactaagtagcagcaaaagtgctttcgaaccttcaaaagcctaaaatagctttcaaaagctcaaccagccattccttatttaatattataaatctaataaaacaaaatcaatcttttttttttgttttttgagagaaacaaaatcaatctaatcctatattgattcattatattgttataataaaagcacatgacacgagtactcataattaaatcaaatcactttcctataattatacacccatatccccaatctcttcttacaacaatttaaatcactaattaaaagaacaacaaaattaaaacagaccaaaaacaatagagaaatgtcaactacactactaatgcaaaacaacatgactcataaaggggaggggttttgtgtgagtggctggtactcgaagactatcaattaaatcagaaaaattcatggtcatatccaacattgtagtcaaacaattgatcagtctcctgggaatcgttgggttgctgtaaaagcaattgggaagatggtgatagagtttcatgtagcataggcaactgcagctgatgattgacattaatggcagaagcagaagtagtagtgttaggctgctgcatatgatgaccgtgagatggcatagtagtcatattgaaatgtttgtctgcacttgctccaggtgttgaagaattagtagtagtgtttggttgcatcgtatgatgatgatgaggtggcataggagatatattgaagtggttgctcacagtagcagaggcagaagaattgggcataggagacatattgaaatggttgttgaaagtactagaggtagaagaattgtttggttgctgcatcatatgaggcagaacagagatgttaaaattgttgttgacactgccagcttgcgctggaaaagtactttttggctccatcatatgaggcatagtagacatcttattgttgtagttggtactagcctgcatattattttgcattacaggagagaaaagctgctgattgacatggctgagagtactatgatcagaagcattaacttgcgtatgaggaggaggctgattggcatggttgacaaagctatcactggaagttaaatcttgcataagagactgtaaattgagatcttcatgattattaacagtaccatcagaactagttatttccaactgcatttgaggcatattgctcatacggttactgtcagatgttatagcctgctgcaattgaggtatatcagtacaagtactaccaattggcataccaccaacaaaaccaatttcttcatcatcattattattgttattgttatgcggtcgtgcttcttggttgggaaataaagaagcaaaactaggcagttgcagcaatcctcctttattcatattattaaaaggaggtggtagcaggagagagtttgctctagtaggtgtagactgaatcaatatccaatcagccagtttagtagtatcccctctcaacatctccatcgccaacttaagttgctccaaacgggacatatcatagaaagactcgataggaaactcccaccagtgacgattaatataatcttgctttagctcaaaattctgcttcctcaccacatcccactggtccgttagaaggttcaaatgctggttcataactcggatatcggcgtttcgatgagcttcgatcagctgaaatgtaccagacaaatttgcttgggcagtcatacgactgtagttttctgggttcatataccgatctataatcaaacgaacgttgggatgtccaaacgagaaaacattgtttcccggtgagaaaacaattatagccaactctacaccacaaagggtgcaaagctcactagctttcttgaaaataccataacgcctcttagagaatgcgacttgaagattgctctcgttctctatcctcctcattggcaccttctgccttcccctacaaaccctcctaattggtggaataatattgttgttgctgttgttgatgttgttaatcatctccatggttagctaaaactagattagtataaatgataataataatgtgtattactatacagaggcttatgtttatgttatggtgagtgtggtagtaccattgggtggtatttataggaagggaagagtgttggatgttgatgttttgtttatattttttcattacttcattatgctgataaacatgaactaattttatacagttactacttacctactataggtttacaattcagctttttttttttttgctctattttttatggatttttctatttcttttttaggtgtttagtttatgggaagaattgttttagcaaaattaaatgctctttgtaataatcagttatagaaaatttccagctcaatgtaggctaatatatagctgtgtatgatattaattatatgtttagataattttttaatgaaataattaggcttgtaataatgattaataaaaatta

SEQ ID NO: 297954 - DNA, 1757 bp, Cannabis indica
attttttgatatttatatataaattattcaatattaaatattaataatttaacattcatgcatatatcaaaatatttaacactaattaataatcaaaaatgtatttatcagactttttagggcataaaccctaacagttagatcatgaaggggaagtatgtgccctagtacaatctccagctcaacgtccgcagatgatgaatctacccatcactttcacggaagaggacgcctagtatgtaaacttcctgcataacaagccactagtgattgaagcccaatttgctaacaaaagagtgtccagagtgttagtggacaatgaaagctcagtcaacatattgttcatgtttgccttccaagcaattgggttaactgaagccgatttgatgccttgtcctatccaacttgaaggctttaatggagattctctactgcctatgggaaagattcaacttctagttacagtaaatgagggtataatcacaattactacttcctccgcattcagacaatgtacgttcgtagtggtggatttcccactgcctacaacactatcctagggcacccagtcgagcagttacctcaattagacacttgtgcatgccattcttgtgtgacaatgaaatcattgggggtggtaaggggcaatcaaaaaagtgtaagaaattggtacaatgtctcgaccagatcaatcttcatggtcagagaagagtcgaagaagctcccaaagcacctgtctagcccgcacaagaagtaattcgggaggaagatatgagttagatcctcgagttggggtagaagaatgactgagtcgttagaggatgttgaggaagtcaacatcagtgaaacaaatcccaccaaagtcatcaaagtgggacagaatttgcctccggcggtcaaagaaaaaattgtgtccacggttaagaagaaccaggatgtattggtgtggagccattcagacatgacgaggattaacccaaacaccatctgccatgccttaaacatcgataaaaatgcggcctcggttcgctaaaagagaagaccgttggatctggtccaagaagaggcagtgaaggcgaaagtcgagaaattaacttttatagagttcctctaggcggctctatatccggtttggctagcgaatccagtattggtcccaaagctaaacaaaacgtggagaatgtgcatcgattttacggacctgaacaaagcatgcccaaatgattatttttggcttccacaaatcgatcagatggtggatgacacatcaacgtacgaactgttaagcttcattgacgcatactccagctacaatcaaataaaaatgcatatgacagactaagaacatactaatttccaaacagataaaggagtgtacttctatgttgtgatgccttttgtgttcaacaacgtcggagcaatatatcaaagactgatgacaaaatgttcaagggtgtcctgaaaaagaacatggaagtctatgtgaatgacaaactagtgaagtccaaacctcaggagagcatagcaatgacccagaagaagccttcgctatcatccgaaactacagaatgaagcccaacccaaataatacacttttggagtttcttcaagaaaatttttgggttttatcatcagattttgggaaatagaagccaaattcataaaagattcagacacttctagacatgtatgatttttcatcttatctttactgattatttattggtcattgttcaagaaaaaacaaaaaaaaaaaa

SEQ ID NO: 297955 - DNA, 4933 bp, Cannabis indica
tgaaagcttagatgatgtttgttttttcatattttattaccttcaattctttctctgattcaatcatgggtgagtttcaatgatttccagatctccttctatttgattcttcatctctgaacgcgatttgcttttttgactgaatgttgtttttgagttttttttgtacaacaatggaggttggatgattttttttctttctgtttttgtatttggattttcgggatttaagttgttttcccttgagatctacattttttttagatctgattttcctggttttggaaggaaaatggttgagaatgggttgttgggattcgtccgctgggtcacgaagaagatggaggcttccattttccttggctggtatttttgtaatttaacaacttttagtttctatttttgtttatttccctttttggggtcataaatgtaaacttgttccatttttagtttattatagaaaaaatcccattctataatgatttattagttaaaaataaatataacctgatggctgcttcatgtatatatgttgtttagctcttatatttttttcaaatgggtttttggtgctttttgggtttttatataataaactggcacaatttatttattccattacaatttatgagacaaattcttagtaataaaaaattaagaaatttcaagacataaaattgccaacacatagctcaaatactctccaggacataaaattaacaccttgttttctccattcctgtcccatgttggactcagagaaacaaccactttgatctctgatccaaatctattaggtaggtagtctttcttttgtcctttatcttttcacttctgtgtccgatagataaagctaatactatgctagaaatagagatgaaattccgaatctcttatgaacaaataaacatgttatgtaattggactaaataattaccacatttttttttccaacatgaatgaaaaagcccgcaacggattgaggtcttacaaatgcaagaactctgttaactaagtgaaaaaacagctgtttttcatggaacctagccaaggtacagcaaagaaataagttttagtaattactattatgatcatcaccaagactttgtcaaacataaactggtcattgttgtcttcatggtagcccttgaacactcaacttttctccactatggtaatttctaaagttgtttcattagcattaaatgtcttgtcttctttttaaaatggaccccccaaaaaaatgtacatatgtctacagtgtgattgaacaagccttaatgagcatgaactttttgaacttttattaatttctataagcttgacatttaactgtccttatgtttgttctgggttctatataccattcaactaaaagaagaagaaacgaaagaaaagagaaaagtgcatatatgacaacggatgtgggcacacacaatagtgtttatggcattaatggtgggaatttttctgggttctttttttgtttcacaactacttatagggaagtgggcaccaaaagcaactaatgctttgtctactaaaagagaaaaagaaaccattgagaaccatatattttaagcaatgtttttatcaatacagagaacttcactttcttgctgaagtggatttagagatatgataaaattcatctcttgtttttccttgaagaagtggatgagattgtatagctagatattttcttagtgttaaatccaatctgtccctagcttaaaatgacataagatggtaaaaggcaaccaactctctttattgcctaactacttcaaagtattccaaaaggtttcaatgatagtgagcgcacaagccatatgggctgcactttttgccatcttcatataactttgtgatgactataaatttgtcgattattatgctcatactacttcaatctcaataataacatttgtagaagcttttgaaaagagaaaaaaaaaacaactaaagaaaaaaaatgtatagcaaattagtcctccctggatttattaaggcaaccataggaataagaaaaagtgtaacaagagaaccacttgttcatgagtccggtaagagtagtaaccggtgtgtcttttcccagccagtactagtgtcagcttggtagccaaaacccaagttcaagagtccagaaaaagtgtaagaaaagatggcaatcctattcaaaagttcaggaagagtaacctgcggcgtgtgagtttctcagccaacactagtaatgtcagcatggtggccaaaagtttggaaagaaaagaccatgattggtacgtgttcttcttctctataatatatacttgtctcatatttgtacttgaaggcttgtattgcttgcttgtaatgatgtttttgtaatattaatgatcaagtttattatatggtgtaggtttgttcagtccacaattccaagtgatttgatcatccaagttggtgattcaagctttcatttgcacaaggtgggctcataaactattcacactttaattttattaaaaaaaaaacagtcattgttctttgtctaacacaggcctggatattaaagtcataatttattgaatttcagaaatattctagcatgctttgattgcttttgagaaataaaaccaagtcataggattgacataagttatcaaataattttttataggtatttccaattaaagccttgcagataaaataaaaaaattaaaaattggcatatgtttttctcttttatcagcataaaagagcacaagatctactatttggaaatatttggtcctccttaaacttgtttggttgatttgaccatgatacttgaacgacctaatctaaatcttttcacaatctgaaattaaattttttaattaaaaaaaatggcatactagattttaggtctacaaatactgatatttaccacttttattatttttcagctacctatggtctcaaagagtggatatttgaataaattgattttcgatagaagtaatgggggcagagacaaaagcctcaaaatatctatagacaatcttccaggaggagccaaagctttcgagttagtggtgaaattttgttacgggttggaagttgatattacatctgccaatatttctcccctatattgtgcagctcatttcttggatatgaatgattatcttgaacaaggcaacctcatatccaaaactgagacatttctaagcttttctatattttcctcatggaaagacacatttcaaattttgaaaagctgtgaaaatctttcttcattggccaaagagctacaaattgtgaagaattgctcagaatccattgctttgaaggcatgcacaaaccttaaagacttaagtgctagagaagatggtccacatagctttcaccttccattgaaaagtggagaagagtcaaaacatgagaagcaagttgaacattggtggtttgaagatgtgtcatcacttagaatagatcatttcattgaggtgattcagtccataaaaagtaaagggatgaagccaaatcttgttggctcatgtatagctcattgggccactaattggctctctagtgtcaatctcagtgagcatgagactacaccaaatcccgaaaacatgagttatcaattacaaagagtcacaatagagtgtttagttagagtacttccaactgaggaaaactcagtgtcttgtaattttctgcttcatcttctcaaggcaggtttggcattgcagatcagctctgagttgttggaactgctcgtacaacgaatagtgcctttgttggagctatgtcgtgctggagatctcttggttaaaaactatggaggcaatgaaaatgttcatgatgttggcattgttaataaggtggtgaaagcttatgcttctcttgatcagatcaaccgcaagaagaaaatactaggcgttgggaggttagtggatgagtatcttacactagtagcaagagaagagaaacttcatgtcaagactttccagtcacttgtggaagccttgccaaaagaagctcggttttgtgatgacaatctctatagagccactgacttgtacctcaaggtatgatattcttatttttttcattgtttgacaatttactctttaaaaaaaattaaaaagaaaaaagaaattgtcactgttagtgtttatatagaacttaaaagagagtacaatttccaattagagactggtgaataagaattacttgactcattgtgtgataactcaatatatgtgatttacaggcacatcctggcttaacagaagatgaaagaactagtttatgcagattcttggaataccatagattatcacaagatgttcgagaacatgttattaagaacaaccgtttgccattgaagaccgcaactagatttattcttctagagcaagtgagtatgacaaggtcaatggcaagtagtagtaataataatagtagtagtaataccaaggctcatgcatttgttagagcaaataatcgaagcttggagaaagagagatgttggaagaattgccaaaaggaaataagaaaaataaccaaagatttggagaccatgaatgcacaactcaaggatcttcaagtgtgtaaattaaagatccaaagacaaatgttgagatgtcttaatatttgaacatttcattaattagtgaatgttagtttagagttggtggggccgggttctgtttattatggataattttggctctgttattttattttatttatttatttatttatttattattattagagtaatttgcggcataaatacctaagttttatgtggtgtagcagataaatacctaagttgcatttttgacggtaaaaataccttccgttacactcttggaacttccgtaggtacctctccgttaactgccaaatcagtacctacgtggcaacccctgataggtccatgtcatttaatttt

SEQ ID NO: 297956 - DNA, 13730 bp, Cannabis indica
tttataattatttattattattaatttttttttataaaattatatgaaaataataaataaaattattttaaacacttagaaagaaagaaaaaaatatagaattattagtattttataaaaaaataattattattgtaaaaaaaaaattatcacattccatttcaatgtcaaccaaatacggtaatgctgctttcctaagtttatcattcccttcattactctcaaagcaatgttaaacctattctcatgaaataaaacgtgcataccaaacggccctagctaagtaacattgcactttcttatttaataactcttcttaagaagtagaagttttaataaggaaaagtatattaaatttatcttatagaaactgaaaaccatatacacagttgctcttatatatttaataaataagccagctacactgctctttaattgaaatgcgtaaaaatggtacaaaaaattgtggtagcattgataaccatcatcccctgtgctaacaagcaggggatcaatggactgttacaatcacaaatgagcctactctaatctagactagagaacagaaagaaattagtatacaaagaagatggagatctgataaaatctccagattttgcttcagtgcactgagaatcatttcgataaggtataatactaaaattatataccttaagttgacattcaaagttataccccagtgacatacaagctagctgcaaatacaatgtctcgttttatggcgttagaagcagtttccattttcttgtatagtgcagaattacccataattgacgcggcatttttgaattcacgacatgtttcatccagcctaacgatggtccgcacaatcataccttcaggaacatctgtaagttcgcagatttctgcaaagggagtgccctgccacaataaagaaacagtgattaatgaaacattatagaaaaggtatggttaagtaaaaaaaaaatggcaatgtgctaacctttgcccattcgtaaactacttctacaaggccgaatttgagattttctctggcatactcttcaggatttatctgaagtttaaacccagcttggagctcaccaagttgtatcgcggtattgtacaatctggagtaaacaaaaaactcaagttagatcttaatatacaagataaaacccacacgttctcgcaaattataaaggcatacccttccagttacaaatacattatcttatctttagtagaaaatcatcatcctagaatcattatatatatacagccatttaactactgatatacatgcccaaacaaattaccccatttctcatatactgtttactataatagcgaggattttcctaaaaaaaactgcaacttcactcagcaatactaaaatcataaatggcagcacggtctgataatccaggtttattggcaaacaatcatacttcccaatattcatgattcacatttaatctaaactttcaggcaccaatatagatgtgcacgtcaaagagtaaaaaaagtaagggaagcatgacctttgtttggcctgagacagcttgggagtgagagaagggtcggatgcattcttctgctgaaaaacaaaggctgacattaatgccactgcttcttctggttcgaggtcatctaattgattatcgaataaacactctgtagctattaactcctcccccgaattcatctcacatgcaacacgaccttttatttgaactacaaggtcggcgtcaatacagccaatttccttcagtacgtctatctgaaaaaacacaaatgacttatttaaatggattccttattcattaaacataaagcatctacaagaaatcagataatgcaaaaaaatgtagacgaacccggccctggaaatctggcatttgttgaagtgcttcatctgacatctcatacttcagtgctttaacttcctccttgtgtttctttatctctcttgctaacttaatgtgctcctgcaattttatacacccatgacacttattctttgccatcttttgcagtagatttgtccatttgtgatatgcttggataagatccatgtctttcaacttcaaatctgaatggtattaataacgtaaaggtcaggttacattgtgagtaaaatcccaaacttaaaacgtttctccaattctaataaactaaaagaccaaaataacgaagtgttaaaccaaatgagtaatttcattccacaataatttctcacttattctagtcttcaacaggacatacctttcactggatctaatgctggaggatatttgccatcagattttttatccaacagctgttgaactgtattggagtaagcagtagtgctagcatcttcaagaagccggacctggtcgatctttattttgctattacataggcataagaactcattgatatcaatggctcgaacctcataacccataccagctgcaacaccactgtatggtagctttattttaatagcgcctgaacctttgcgagatgtggcagaagaaaaatactcttcttcctgagcgcgttttggttttagcacataataaccaccactttttgtatcttttaaatcaccactgaccgagggagtaatatatggcaagtcaggtctcagtactaaaacaatgtgctgtttgttgtaattggaaggtgcttttatgacgaccccgagcaagtgatcctgagcctgccattatgacagaatagagatttagcaccacaacaaaatagaaattaaaaaaaaaagcatcaacaatgatggcggtataaatttacaccaatttgcttcagctatccctggcagggaggacgtggaattgttcaacatttaatgtaaaaaataatagtggtgcctctcactttattgcaacactacagaatacgaccagaatagagggaaaacatgtaaagggactcactgattgggatttcacgactaccactcttccaggagtaagaaattgttgggcattggtattttgcatgacagcatctgatattttttggtcgtaactctcagcttctgagtacatctcataatattcctcaatggccgattcacattttatgcatctacagtcaaacaaccatggttcacaacccatcaacaaaataaaatttgcccattttgcacaaattataatcttgccagtatgataatgtataattgacctaataatttagtacatggtccacattaaaatggcacttgaaagtccaaaatgaagcatttcattgagggaaaggaatggaattaattcatttctatcttctctatgattagagactaaattatttcttttttacgacttttctatcattttcgtaaaatggctattctgcccaaaatgaataaaaaggccatttcaatgcatagctcatattaatttttatattatatttctgttcctatttttattcatttgtactcattactcccaacctcagatgaattgcttgcataacttgtatataataataccataaacatagagtagttctaaaacataataaatcactttatcttcacaaatcacttgtaggtatggcataaagtcagcaataaatgactcaaaaacattttttttccaaatcaccatataagaaatcaactataatgtttgcatttgagacgcacaaccctaataaaagttgcagataggactaataactctagagttgcaaatgacacctaatccgttaattatttaacacacatagcaataactactgtatttgacttactctattgctttggtaggctgagcaagctttcgcattagaagttgttgctgttctggtagtttcttttgagcgtgaaattcagcaaaacttctttttaacatgtcttctacctgcagtgatggaccaccaaaaaaattgagacaatcttggactaagacatggccatgaaattttcaacatagtaaattaacgaaattatcaatcctctatctaatttgctctaatctctactttatacttgcaaccaaaaataaggggaaaaaacagtagggagtaaaagagaggaaaaaatagagaagattactagattaattagtaaaggtcttaatacatagtttgtttatttatttaagccccttttttgggttgactgatagttgggtaaacatgtcttgatccatttataagaatttctttcttagtttttccaaatggatcggggagaaattttattgtggggggaaagttaatataattatgcactgttctatttctaaggggtcttttgtcacttaggaaaatgagaggataaattaaattaaactgctatttttttcactaaaacccagtggtatatctttgtggattgttttggtagataataataataataataagcaagtcaggaaagacttctgctgagatgaatacaaaaaaagtacccacaattttactttaacaacacacatagaaactatctaattttttttcattcataatggtaatcaataggttatgaaacttcagtttaaatttctttttagaaaaatgcaaaatcactagaggataatgaatttttactaactagcttcattaatattttctgacaccatttaagttttcttttcattttctttttctttttttttttttcttttgtaaaaagagacagcagctaaaacatcttttacctcctccaaaatttattgagagtcctcactaatggcggaggaaaaccttggtaacatagggaaagacctactacaacaatcaaaactctactagcacagataaaaacataaaaaagagagctagtgcagtaaggttttcccagtctctacacgtctagattcccagcagataaaatcataaaagaaaaatctacaaaatcttttgttttataattgagtttttgatcttgataagctactagccaattacttctcgaaaaaattctcaaattctgctatcatatttttctccttttctaaaataaaagttacttaataaatttaaggttttaacctacttattactcttacgctcaaataaattcaaatagattactagattttaaggatgactacctgcttttatcttaaattcttaatccaatttcttttcttttcttttcttttcttccttttttttttaatgtcaagttcttttatccatttttcttttatttctcgcatctcgaaaataacaagaagtaagaatatcacactaccttcaattcttcaacacgaaggagatgtaggatcataatataggtcagccgaaactgagactccagcttagttgcacttccaactataacatgttttaaatccccctcttctgggatttcatcacgacataatacagcaacagtaccaattttatcaagacctcttctccctgcacggcctgccatttgagtgtactctccaggtagtaaggttctgaatgctttgccatcaaattttcttaatgtatcaaaaacaacctgaaaattatttaagtccaaaatgagaatttcaagtatgcaactatatcaatagttaataatcctcaataaaacgtagtagaaactgctgatggccgcactgcatctgttataatcttgcaccactttaataataacaattgcaagaatagatgcaacaaaacaataatcgcattttatgttccaatgcacacaacaaataaggataacacttactgttcttgctggagcattaacccccattgcaaatgtctcggtcgaaaataaaacctacgaaaagcacaaataaaattatcaacagctaaaaaggcttaaaaacaagtgacataacatccctaaaaacaaagttcagctcatgtttacataaaacttatcgatcgtcctctagtccttttaaaaacatgtacatatataatcacagcactgaagaagtatatttaagtaataaatttaccttgatcacaccacggcagaaaagcatttcaacaacttccttgacaattggcagcaatcctgcatgatgcacaccaatgcctctatgaagaagattttgaactctgacaacctgcatgacaataaataatacgtctacaccttaagcccgagaactgtacccaaaaggaaaaaaaaattgcatgtatgctaccaattagtacacctgtggcaaagtcctgtctgatcccttgagacgtgaaaatgctttgtcacagaaaatacgaatctcgcttttctcagaactactggtgagatcagttccggtcatactatcagctgatttatcacatctgttttttgagaaacaaaatataaccacctaggaacaagttaagaacagatgtttagaagtcaaacaatatgaatttctaatttttaaaagaaaaaaagtttcaattttttaaaggggacaaaataataagaattgctgtacctgtccctgtgtgtaataaactaacacctttcaacaaataaatttatacttacataataataagcactaatttaaaagttacatgcaaaagatcaggtaggaccaaatttcaacagtggacttaattttagtcttttgcttgaatattaacagcacattaaatcatgtttcaataaaaaatgcaaggccaatctttaggttggagaaagcaaaagtgtttcacaatgacaaaactaaataatatcatgtaaatacttaagaaaatcccttattttctggccatgcttctatgttcggtttaagttatcttaaaattcttttgctagcataatctatgaattcttctactaatcatatctaaattagaattaatgaaaataatatgagctccaaacaaagttgcaaagacatgttcaagaaaattatgcttcaacttacaggtaacagagacttctttgagagcttattgataagtgacaaacacaaagaagcatctgatctccttaaaccccaactgttgtagccattgccattattttgactcccaccaccacttccatagtagtttccagaactgtgtgaaccaaaatgtttattctgttttccccgagtaacactttcacgtttctgagcaaaagctgctgcacctccactgtgtgatccggtaggtccagtactgctgctaatcatattttttctcttcaatgtatctttagcagctttcagtccctcaggcataaaaatttctttttcgtcatatcttgtaaagttctccagagtgaaatatgcagtgttccaaaggaactggtctttttgttgtcctaaaagcatagcaaaacaaagtagaaggcataaatttctaatacatcgtagaatacccactttatgctcagcgcttctaaggacgaacgaaacaattgaaaacttcaaaattctcaagatagagtaaaaaacaaatgtattataagaaacaccactaagtactaacccagtaacacggatttgcttctgctttgtccgtccaatccaatccgcaaattcaacagtgttaggtacctgcaaattggtagcaaatatttcatgttcaaaagcagacacaacaaagagttaaaagaggattggccaaatggacccgtgcatagttttataacgtaagtatcttcattgtagctttagttttaacacaaaagggttttattgtagatatattataatggaagattggtaggcaataacacatacagaaaacaaaataatagaaacaagacaatggagttaaagttgaactccttataagtatttgctaaaaaaaaaaaacaaatggctggtattcaagagactgtcgactcttcccaagaagaaaggctccactcaatacaaattctccataatcctctccatttgccataccttttttttttggaaagaattttccataatcccgtctgccaaacctagtctaatagaccctgacagccatattctctaacttattaagttaagccttatgttatatgtatggttacatttgataacaatctaattatgaagatgttataatattaatataacagggtgtatttgaaggaagtgaatgttcagtggaggacctatgggagaaaatcagattttggacagcagcttgggtttttaaaactaaacacttttgaggagttatctttcctagacctgtgtagagagtgcaaaactttgatgtatcatgttttttgagttttattgtaattttgtttttgcaatgttttatgtcttgtgctacttttcattgttaccatggttgtctgccaccacaaatgaggcttttcaataaattagagtgggggtcagtctaagacaagtggccctttctcttttttttttaaaaaaaaaaatattaattactaatgtttgaaagaattactgaatataagtaatgatgttatatttatagtttttgttaagactttcaattaatgtattattgaatatttgtaattttctaaagtttctttcaaaaaatttgtatttctagatgaatagttatgataatcatgaattatcttaaagtttccatcaatataaaaattatatgaaaatagagtccttgcttacaatgtaaatttagtacataagtaaaagtgattaccgtggctgaaagaagaacaatgttaatatgtctcggaagcatgatgataacttcttcccaaacaacacctctttcaacatcattaacatagtgcacctcatcaaatataacctatatccaaatatgcacagcaaaaaaatattaaaaaaaagatttgttatggaaaagataattcttcttattaaaaaatgggaaacaagaaagcgggatgggggtggtaaataacagttagaaaaaaaaatattgcagtacaatccttttttacccattcaatgtcacgtataatatcagcaccccggtacagcattgatcttaatatttctgtggtcataataagacaagacgcttcaggcttcaagctaacatcacctgttagaagtccaacatcaaattttccgcagaaatccctatacttttgattgcttatggttttaatcggagcagtatagacagctctagtacaatgctgcatgatatataaaaacaagtttaatatcatcgaaaagtatgtataactatggaaattaacttgtaattaaagcaactcaagaatgtatgacatacttttgatgccaatgcaaatgcatactctgcaacaactgtctttcccgctgacgtatgagcagctacaaacacagactcccccttttcaagataatagatagcctgtgggcattacatatcaaaagaggaaattgttatttaggttaaaaacaataaatttcaaccacacattgcattattgcagtgattagtcatatggagaacagaaagaagcttagacattgtcattacaattcatataatgcaaactttgatacttcaacattttcaatgactcaactacagcaaaaatagatctccaaaccttgtcaagcctaatatatcatgacaaagagatagaatggcacaatggttaaactaaaacgtatcagttcttccactgaagttgtagaccataagttaacaaaacttgagccaaaagaaagagttctgaagttgctttgtaaaccagcacaaataataaattcttagcacaagcattagtaaatgtatgaactagtaaaacaaaactttatcaaccaatacctctttctggaatgtatccaattcaaaaggaaaatcaagtgccatgtcaggaacaagctcgtgaaagcgctgtgaaatccattcactgcctccactactagcccaggcctgtaaatgtatgaactagttagaatacagattaaaatcatgcagtcaacgaagaaagtcttgaaataaatagatatggaagttttcttatagcagctctcaatgctaattgttacctcttttgggtgctccccaccagcctcgcaattgtccaatattgctgttgattcttctgctttgactgataaaatcgcatccagtgcagataattcagtattagaagcgtttatgggcatatccctttctgctttagctttgggcttagcagactcagcctcagcatcagattttacaggctctgcttcagcttctgaatgaatagactccgttcctggcaaatgaaaattatattaagcactagattatctaaaataaagagtaaaacgagcaacagaaaaacagaactagtttaaatgcagattgataaaccaactaataccaaacccaagttcacagaccactacaacaataggtaaagcaatttgaagtatgaaaaaagctcaactaaatcaaacaagaattttgtcctgccatatcaggtaccattccaaaatccttcacccagaataaaaagctcaaatccaattcaaatctgaaatctcatattgcttaaacaaatcacttctttttttcatacctaaaccttgtaattaagagtgtctatgatttgtattcaaaaaataaacatgcaacctcaaagaaataactaagttgcaattcaagttcttgcaacatgccaaataaggccaagaaggcctgcgctcataaaaaataagccaccttagtattattatttcaagcagcaaagctcatctgtgaatctttttcatgaattaatagtttatgaagagaaacaaaaaaagtgcacatgtgaaacaagtgaaatggcatagcatttgtaccatcttctacaaattcagtgatatcctcttcccaagcctttttgaataagtcatcaaactgtacagataattcagtctgcaaatggcagcaatacataagaaagaagacaaaacttgagatgagtagagcaactatattctataaaactagcatgatctactgtagaaatatagatctaatatatgaacaagatacatagctgacctggttttgttctgtattatttgtcagagtttgatccttgctaacattccatgcacaaggataagccttcaaaaatgttcaaacatcactaggtcagcactgttacactttctgtgatggtatagtatatgacaaaatagatagtatactgcttcttaatctacacacaaaaagaaaattaaccttaagttcaccaaggtctaatccttgcttaaagcccggaggagtagtctgagaagggccaccatttagaagttcatgaacccattcaccattggaagcaccatcaggtagaaccctttctaaggattgggaatcatccaaaccacctggacgaaaagggcggttattaatgcttcctcttagaaaatcctttgcaggaccattcatccggggcaatgaaccagattcttgagcttctactgttaattctgatacatccacctaaaatgaaataatccataaaacaaactacagataaaaataaacaacagagccctagctgattttaattttcaaataagttcatcagagaattcgtgttccaaagaagaaggtattaaccaaaagtaccgctaaggggcaccaaccatactcaacaccataaatagttatatcgttattggtgtaatttaatattagactaacaaattttttttaagcaatcggacccacatatattaatttaataagtaacattgaaaaattgtaactattcattcataaggtaccacttcctgtgtgtctttaaggtgccaaataacaacacttattgtatatttgtctaaacacaaggtctaaactacactcgtccatacctgcactgagcccggttcccatctttcttgctttggacgtctaaagggcaacacccatgtgggaattataaccttgcgcggcaaagatggctccaactgtatctttgctctgtcaaaccagtcaaaatcccactgccttccagccttttccggtgaaaataattcagagtccagccttggcaagagatatgtctcttctatataagattttattgatacaggtgtttccttgggaaaggcaggtggctgaaaaattaacataaagacattttaagtatattcgtagaaattgaaacaactctttgttcaaaaaaaggaaagagaaaactctgctctcccaaacatattataaatctatgtcatgtttggttaggcgtaattgtaattgtgattgtaatggaaccaccattacaattatacttctaaaaacgttgaaatgtctttacaatgtaaccaccattatactatttatccacccttattttatttctttcatctccaaaagaatttaaaacttaggatattattgttttttgttagtacaccactcattcttattaccattagaaaaaaaaacataatatcattcctattacgattcccattagaatccattatcattactaacacaattatcgttcagttacactaaactaaatgccatatgaaggactagtaacatagctccaaaaataacaggcatcacaaagtatcataggaaattctagtatgcaaccaaaaaagtttatgtttttcagcattttcgaaatacagatagttattattctaattttttacacaaaaatattcaaactattgcacgtttttagacggtttgaactcaatattttttgtacggtaaataaaagcatcaaatttgttattacatataaacagttcagcttttttaatgcattacaaacaccaacaatacagtaaaaacaaatcaagtaagaactattcaaagatacggttttagaagccctagagccaaacaaataaaaagaaaaaacatttctttttttttcattaataaataaacaatgtcaagaattgagaagtagagaagctaaccaagatgaaatcggggagggacttgactgggttagaacgctccacagtagagagaggctcgagtctgagatggccgctgtggccggagaatccgacccgataatttagctcgttcgctgctttaatcgggtccatccttcaaaattgtcgctttccagattattatttttttcttgtttaaggtgtttggtttatgattttggaaacttttcgcgggtttggaaaataaaacgaatgtgtgtatgtttggttacttaagttaggaagtaaggtttcaacaagaaaaacaaaaaaagaaaaagagttagaagtaaggaagtgctgtggccccctctcactctctctctcttacttatttcacaatatggagtagccgtatatttttcttttaacgaagattagctaagatctatatctttcaggttttatagtgttttttttaattaaaaaaatataataacaaacttaaacgaattatacatactaatgattatcttttatatcttatattaaatattattatatcctaatcctatattaaatatgattatataatataattatttttttaatattttaatttaaatttaaactcaaacacatatttaagaaaatatctttttattattttattttaacccaatgcaaaatatctaaaaaaaatatatatatttccatcattattttccttttaaacaataaaatataaaaaatatttatatcttattattataaaaagtagtttaatgggatgatatttttaaaagaaatttttacaccaaaaatacaatttacatactttattacaaaaaaactcacacacggttacatcatcatttttacctttcctctttcttttattacacatataccacttgcacatcaattccatgcacagacacgggtggcttcctatcaaccatcaatcaactttcaatcacttccctctcttttttccttttgtttttatttgattttttatttcttttcagttttttttttttt

SEQ ID NO: 297957 - DNA, 4602 bp, Cannabis indica
tgggatatctttttaataaaagtaaaatcaccaaaattacattcttagatttcatgtcaagtgatttttttatatagatatacataatcataagcatacaaaggtgtaataaattacaattcattaagatgatgtccaaaaaagagttaataatacatttaattaatgcaagaatagaaaaatagaaatgactattagtattattttttaaaaaggatgtacatgggaatagtagggttggctttagatctatatagaagagtcttttttttgtaatgaggattatgaatagtaatacatatttttccaggttcattaatataaaaagaatttctaacactgtaattatgaatatgatgatcttcaaacctcttcttatggtgattttgattttgaagaagaatcttataagagccttcatcatcaggaatgaactcttccttatatgatacatcccatccaaccacagtgaaatcccacaccattgttaaaccaacctttataagaggaagaaaatatattcaattactattcatcgataaaatttgtaattttctctttaagaataaatatatataataaggatgttttataatggggcacacaaaaataagtacaatttaatttagacacatcttttttataatggtatttattttgtagtcattattggaaaatttcataagttgaattttttttaaaatttactaagaatttgctatcattttaattatcacattgtgtcaattagatggtgcaccatcaaatgtagagttgtattttaggtattggagacgtacaactattataaatgtgtaattttgtagattaatcgaatggaaaatttatgtaaagcataaatattgggaaaataataaaattctataaaaattatagttcgaagaacaattattgcctcttttatatatgtaatatatggtaggtacctctgagactggaaattttacataaacagttgtgtttcctttaatctttagcactgctgcttcgtctaaaggagagaaatctttatcgttctctcttttaagcccaccatactcaactggaatattctctgctgctataaacctattattattacaacagtaataaataaaagaaataaaaaatttcaagtttaaatttaggtaaattaaaaattattgaagaaaaattaataaataaataaataaaaattgctcacttgagaagggtctttgtaacttctgatgatcttgcaaatacgaacttctgttttgtcttgagagttaagaatcttgatcttagaatgtgtaccacatagtaccaaaatggaacattaattataatctgcccaacaaaaaataaaaaaaaaacacatatgaatattttttacataatattagatacatacaaaacacgtacattaagaaaaaaggtatcattttctactcttattagtagaaattgtttattttgacatagacgtaaattgtagttatagtagatatttcatgatatcaaaaacagagtttaaaataataatggcacgcatatgaagaaaaataaatcatacgaatgtaactgaatatttaaactctatttttaaggctataaattaatcaaaaattttcaaaagtttagtaatgtctacaatgtaaaccgtgatataaaaaaataaattataatttcttcaaataccgaaaatagaaactttcttgccgatacgaaaaaaaaaatagtgtttttgtgtttataaaatttacatttttatgtatgagctcagggtagttatcttggagaagaagcaaagctttcttagtaaacatcccaagctccttcatggctggtccaggagagtttttcaagtcaataatttggagaatagagctcaccccaccattcttaaaactaagcttttcaatgcccttttcaagaacttgaattctccacctcaacaaatcattaaatttctcttgagacccaaaaacatctctacaaaacttctcatctttaaaagcctcgtaactatgataacacaaaggcctaccttgtttatcaacactattgtagtaaaaaaccttattattaccattttcaatatcaacaaaagggcataatttttcatcaatgatttgatttgttttgtactcaattctccatttcaatgtccttcttagcatattaaatgcctcattgactttaaaatctttggcctttaagaattttagtagcacaaaatcagttccttcatgggatttactaggcaatagaggaataccccaaagagtagtttctttaagaatggctctttgtttaatgctctcttcttgagatagagatttgggtggtttttcaatgagataattacccaagattgaatcttcaactctgcatctaaattccaacaatgctttctttttcttcctactcatttgatcaatacaatggtttgtgtttagttcctcatcatctccttggtttatgaattcaaaatcatcatcttcttcttcttctgattcaacagagctattctctaccgagctatcatcctccaccaccgaaactctttgtcgctccaccccagggggtgcttcggcagccattgttggagccgaaccaaagcgagttaagaactcaatggaagaggaagacaagaaatgagagaaggacacagtttgttatgaggtcattttcttataagttggtactaaatttagccctactattgaaaaataacggttttaattttgacctgtaagttaggaggaataaaatagatgagaggaaaatatttagggagtatatatagttaaaatggttggcaatggcatacctatcttttttgtgatcatatgaaacaatcttgtcataacagatttgtctctgtatttgctaaaaagaggcttaggtaagttgtccttattcattccaaatggagtgagattttcaacacacagcacataacaatagcaaaagaggtgattatttaaatcagtcatactaagagaagcatattttcattcctctttaaatatctagtgaagttgagactaagagagtaatgccaccaaaaaaaatatcaaaaagttaaaaacataagcaaattacaaacaaaataaatgaaatgaatcataaataaagttaatttggaagaagcataatggtaataataataataataataaaagaaacccagctccattattatatttccacatgcctaaactagaacaattctaactgattatctttatctgagtgtacctaattaggggaatagttccaaatgctatttacagtaactttttacataaaataaaagaacataaaaatatataaaattcaatgtcatacataattgcaaatccttattactcccgatacttggtaaggtcaaatgtcaacgttctagagcagctgccaatgaaaaaaaaaaattggaaatgtttaacaatggtgaacccttttatatgtgcatggaaaggaaaaaaatgatgttaaagatgcttgcttaccccctttcggagtcccggtaaactccaaccaaagcctcggccttgtcgtagaagctatcttttagagaaatcacgatactctggaaaccgttgcctatatcgggatcctcgctggttctggctccttcgcatgacttggaacggatgaatccggcaaccttggcaacgtttaagttatcgagagcagcatcgacttcgtccagtatgaaaaatggggaaggcctaaaactgaaagaagaaaaaacccgaaaaataagtgaaaagagcaattagctttataagaagttgaaagcgaaatgagggtcaaagacgatgacaagcgagatgaacgaacctgtggatggaaaagagcaaagcaagagctgcaactgttttctctccaccagacagttgttccatatcacgaaaacgctttgttggcggcataactgtatacttggtgccgcttaagaacggatcatcttcgttgtctaagttcaaataagccgttccgcccaatggatgtgtgttgctttttgtaagctgtttgtatatcttatcaataataccctcaatatgtctgaaagcagccatgaacttctcattcctgagttcatcaaaagaaaatttccatcaatcaaataacaatcaacacaaccatatttatattatatatatataggactacctctccaacttgacagcgttaaatttatctgctatttccttttcctctttcctggctgcttcaaactcttcatttacagctctttctttctcttttagagcttcgtattggtcgagggccttcaaatttggagctgttctctcaatttctgataccatggaatctattttatgcttaaattctgaatcaagcttttcccgttcagcggccctcttatcctgcacatatgttctattcaactgactgaaatcgaaagctgggcctggcgttgacgtttcggtatccatggggtcttcgactactggaaggctaatatgttctagttcacatttctctataatttcctgcttcttcgctataagctgctcaatctgattctcctgtagccagagaaaaatacatattgaagattaaaatccatcgaaagcaaggaaaaga

SEQ ID NO: 297958 - DNA, 2407 bp, Cannabis indica
gtgtcattcattaacagagcatgaccattgtggacaggattccttaactggaaagcaaatactgcatcagcctgacggctatcaaattctttcctgagttgttgaggagagagtctatagttatcaaggccgtcattatactttatgggctctaacacttccaaatctccaccgataagccaatttccagcagaagtaataacctcctcaacataaggcaatcccggagctgtggtaccccaggttcttgctatcctttcttctttgttatgcttgtatatttcaatgctgccatcgaagttttaaacaaaaatcaacatattcagtcaggtggtgtcctaatacacaacaatacttgaagtttatgaaggaaaaaatgtgctacaatcacaatggaccctaatgagtactgagaaaggaaattaaagagagtgtttctctttcgtatatgttcatgttcttatttatgcaaccaggaaacaagttttcttttattattttatgtcatctataattgttcttaaacttaaacagcccctcaagtaaccatgtctcatgtgcatatttgacattattattcctatagttcttcttctacccaaataaagtaaagtgaaatgaaattgatagtatcattctctgcccacacaaattagtcaaaaacatcatattagtatgtttaaaatcataatctatattttttgaattttttattggcaatactgaataaacaatttggatttctaaaacattcccccgctgaattgggaaatcttcgaaacaagaactattataaaaagattatagtaggctaagtcatgtggcagtaaaccaatcaattaataggcaattcgcactaaaacaaatatattataacaaaaaatgaaagaagaaactaatcaaacatcaaaacactatcgtctttgataaagtactgaccttcgtagaatcgcaatcaaatctccattagggcctaccaaccccacattggtcgaagacccaattcgctccttggtctcgtcatcaatggccaacacaataggaagcgacatattcaccacagacccatctttcattctgagtgaattgaaatgcaaactctgcaaatactcatcttccctcatgaaccccttcaatgggctagcccatccttcgctgatcacatgaacccattcgaaatcaatcttactgagactcaccttgggtagagcctgagcctctaaaaccctggaagctcgttcactctcgggaatcacaaggtcaacaagcttcccaccatcgggatcaattagagagctcttgatcggagcctgaaccgaccgagacggagaatgcatcctgggtttggtgttatagacgatggagactaatgggtcggaatggtaaatggatttggatcgaatgttggggttaaaagaagtgaactttgttgggtggtggttgagagtatgaaagttgaggttgagatgatgagagtgagaagtaatgagatgaagcttaatggtgagagacatggttgaacttgattataataatatgggtgttaggggaatagagttggtggagaaagaacagagagctccggtacaattgagagagttgtggaggatgacctctaaactgtgcgaacatgttggaaacggttctaatattagtactaatagtaaaggaaacaactgagggtgaggctgaggctgaggctgaggctgtggctgagttcaccacaatggacacaaacacatccacacattagtcattagctaacctggttggtcctatgtggctttcaattcactttcattgagtttgtggaggctactcactgcttatatgctctctctatctatcttattaaagctaccctttcctttggctttggggaatggggaccagtgtaggaaggatagaagtctactactactcttcattttgctttctttgtgggcctgtttgcccccaaccaaagctggtggagtttttgcttacttgtgtctaattttctcaaccctaacccaacctgtaaaaaatcgtgtcatgttagtgttgaatattattgaatatagatttaggttccttcaattgagccttgttatgtttcttgaacctgaaaacaagagttgctattaggaattggagtaagtatagtctgattcggttgttcattatgcttcagttcttttaaaggaagagagattgggaatgaaaagttgattggcgttcttgatttgaaaaacatctcatacaagaacgtcgatgctcgtggaatgatcacaggatttcagtttttacaggtgatcactctcttatattttgatttcactgagttgtaattaggcatggattggaagagaacatgcattgcagtgacacacaattgaaaaacaaaacagttaggtggtgtttggtt

SEQ ID NO: 297959 - DNA, 3433 bp, Cannabis indica
caaactttcttattttcattctttttttcatcaaaattaaacaaatcatggcaaattagattaaattccctgtagcattcgattgatctaccattgatgactacttattacacaaatcttccatttacaaaattggaaatcatcaaaattgaaaatagtttaatttgtttggaatatgttcaagtacactgttatccaaaaatcttagttcaaaagtgccaaaaaattagattcatatatggtgtgtgcacaccacggagtgctaacattaagaaaattgaactgtttttaaagggggagaaaatgagtgttgagtccattaaacacaaattgtgcgttaacatggggcaaattgtagtccttaactaaagcaatgtttgaatgtttaatttaatagaaaattttctatatggatgtgaaattaaacattttaatttccttttgttccattaaattcttacaaatctgaagtacatatagtcagtacggtaggtgttgataagccaacgtcttatgagattacagcctcttccagattcagaatgtgctttcaataggaggcctttgaccatagcataattgtatgtgtctttcagtttttgagctaccttcctccaactcaaccaaataaaaattatctcccactgccttgtgattggaggatgtgattaaccagcttctctggaagttttttcgatgcctgtaaaacgagaatagaagatcagttgagcctaaaacttacaagaggtcttaacaacaatatgctaaaggttgcaagaaagtaacctggaattgtctcatatgcaaaattggttcacaaccaacatctgctatctcttttccatttggagtttggcatttaaatcgctcggcctcatatgaggctaggatgtttgattcatcaggaagatggttgcaaactttgaagagggaactgagagaattcatctgggagatcatagaacaactcatcagaaatgaactcaactaatcaagacacgatcatcccgacagaacataacattgaccataccatcaattcatcaaatgccattgccataaaagacaagaaataatgtgctaaccttcatgtatggacaggatgcacagccaccatgaatggagcatccctccccactagcgactccaggtataacaggtagtatgacctcgccagctttaatggattcggggtctgaggatgaatttgacgatgtgcttgtcattgagtcagatgaaactggaaacacaatctcaacttttactttagctccattttgagatgaatttaacaagctgcggactgctgcaacaattgaggtcaccattcctgattctgttcccaacacaaattggagatggtcactgacatttctatccaaagcctcttgaaccctttgttttatgaaatccaatatattttgagtagaaccaactacccccattcctcttttctttgcttccattgtcaaagaaaacatttccccaggaacctcaaaatgggcagttaaaaatgcatccgaatacatctcatttatcttctccacaacttcatgtccaaaaaggtgatgcactatgcatgttccatcctaatagggtacaacaaaagtggttataagcccatgatcagaaaatgtaaaagtagggcctgaaatgaaaggtgtttcttctcttattttatgacaaaaaaggtgcatgcactcatacaaaagaacacttcttgtgtaacaaattcagatgagctaggtattggaaatgccaagaaccatcagccggaacaaaaacaaataatacctggtaatagtgcaggcgaggtaacaatgatttgatcgaatcccgattatgttgtggatgtatctcagcaatttcttcatcagtcatcttggtcatctgcaagaacaattcagcaatgtttgcacccatgtatgaatcaggcccgtaccatacttgtaaatctggtacttgcgtgaaagcctgagaaggaaacacagtaaagaaagtaaagttaagatgagttgtgtgaaacatgaaacatggatgggaacattatagtaggccgaaatgaacctgtaaaatggtttgcacaacatttgaagaagtgcatgttattgttggcacaagctcatgagcaaaagcttttgtctcgagtgaagtgtttatgtagacaacatgcaatgaaggagaagccttggaagctgattcaagatagctcatataggaaggaccagaggcagcatctgccaaagaacaactaatacgctcatttgacatcctgtatacaccaacctggttttaaacatagtaaaagaaacaaaactaataattagtatgtggttaccaataccaacaaatagttgaccctgcaataaaccatgcaggcttatctagtcctctttaatcaaaagaaaccactaatactagttcataatcaaagccaaaactcattcatcaaaactaatcccctggtctccattgaaaatcaaaatgtcaaagatactataccaccagagtaacaagctatctttttggtataagagtgatgtacagggtttagtttataatactatgccaatcttaaatgacagggacatgattaacaaagaagacccacctcagaaaaaccagcctgatcaagaattgcacgcacattttcagacatgaagtccacacccaaaactgtgatgaatttgcatcctgattgggccatcttcacagcggaatccgccatgactaatgaatcagatatatggatgtgaggccactgcttctgtgcagctgttaggacaccttggacttctgggtccatgtagaaatgtgcaaccacaccaattttcttttctttcaaaacattaaccagttgttgaaccttaagctcatcaggtgacaaatatgttgcctgcaagtgaaaaggacatgagttgccaaataaatagataaagtatttaaatttataatattgtttattccctcgagaagaacaaatctgatttgtctctcaagaaaaggaaaatcaacatgcaactcaaatcactattccataaacacaaaagcaaaagcacacatctaatgaatactattttttctttaatcacaccaaacatagcatttagtgaatactatgttatgatatgaaatatacacatctagtcaaatatatactatgttatgttatgatatgatatgaaatatgcaagtataaaaatttaatcatatgggtaacctgagcttcagcatagctccccttggcatgaatcccatctgcggtgacgatcagtgaagggaaaggctcaaacggaggcttcccttctctctccgccattaaagctctggttttcttctgcatacttatcaaaacattatgccaagtattcgctctagaccgctgcccaccaggcaaccccacgttcaaagcctccaaatcgtcggtcttcat

SEQ ID NO: 297960 - DNA, 1762 bp, Cannabis indica
tttttttggggggggggggggaaatcctaattagcctaatctaaaaataaagaaaaatattgaacaccagtgacagcagtaactggggaaggaccccaaagatctaaatgtattaattcaaagagttgtgaagtctaagatacatagttggaaaaaggtaatctatgggacttgtccagatgacaagaagagaaaaaagtattacatttgttcttagaaaaagaaacattacatagagacgcatcttgagaaacaacatccgtagagagatgacctaaacgagagtgccacactattggagaagatttggtggtaagtataagtttaggtgaagatgagtctaaagggggttgagatgtgaagacgaagatggaagtgaaacacaatagatgccattgtcaagaagacacgtgaggagaattttgtggatgacctggtgcttaacaaaaaaggaagagggataaaactcaacataagcatgattttcatgacataatttcaaaacacttagtacttttttgaaaagaaaaggaaagtgataaacttgacaaaatttaagaggaaaagaagtagatagatatgcattgcccacatgagaaatagagagagacttaccattacccgcagtaattttatcaccaccatgaaactgttgaagggattccaacaagcttaaatccgaaggaaaatgatgggaggctcccaaatccatataccacacatggtttgtaagagtggaggtaggggacaaaggtggaggggtttgacgtgtgagaaaagcattgaaagggttttagtgtggtggaggagattggtattgaagattagtgtgatgataacaggtattagtagtgtgaccaagtttgtaggaaatttggcatttgggtttataaggaggtcgagtgtggaccagagagaggaagatcgtggtggtggaaaaaatggtggacgaggttgatgaaattgatgggtgaaggatgaatttggatggttctggtgcgagtaagaatgattcgggcagaagttatcttggatttgggaagttataaattggctaggttggcttgaagggggctaagttgggttgcagtatgttgtctattcaaactgacatcatagatgagtaacaaagaatgaacctcttcaatagaagttttataggttaagcttgaataggagacacaaaggcattatacttagatcctattccattgaataggtaaatgtgatggtcttgaagagacacagggcctccaatagaggcaagaacattgtataacgattttaatttttgtaaataagccaaggtagacatcccttctttcttaagattttgcaaagtggtttgtacctccaacttttgagcgaaggaagcagtagtatatgtttgctctagtgatacccaaatttgtgcagcagtgctaaacccaacaatttggcctagaatgatatcaaatagagaggcgtagagccaccccttgatcaaccagttgtatatgtgctaatgggtgaacattaggttgatttgagatgaggaaacatcagtatacagaggagggcatgcaattgaaccgtcaatgtaaccttcaaggacatttgcaattataatgttctacactttcatctacctgttacgaaaattctgtttattacgcaagtgtacgtatcaagtagtatctcacgcaagtgaggtcgaaccacagggaattggattaagtactactaaactatacttatgattctatttggtaaaataataagt

SEQ ID NO: 297961 - DNA, 4611 bp, Cannabis indica
agaagatgatgccccatgaaattttttttcctcacactattcacgacgcatagtaatggctctagaaaaattctaaatttttgaaaatagtcacaatcaggtccaacccctaaagcaaagaagaaaaattcatcactattcaaggaaacggacattgtaggggtcatactccgtaagacaagcatttaaagttggtaatttagtcctacaaagagtcttcttcaatatctgagatctcgcggcaggcgtgtttaacccaaattgggagggtccttatgtgattgagacggtagaaagaccaattgtttatacattagtttgaccaaatagatcaccggtaaaaaatacttgaaacattgagcatttaaggccatattttcaatactatatttcaaataaagtgtaatttaaaacacttattattatccaatatttggattatgttaatgaaatatttatttcttctagtaacataaagtttttttactttaaattacttagggggatactattagtaactcatcaaacattaataagcatgaaaaacatggacaaacagttagatattaatatacaatgctaacaaaatttattgcaataaaaatagataaaataatctcgatcaagctggtctagaacagtaaaaattaaaggatattctacttataaagcaaaataacagcgagtgatacaacaaaattttaaagattaattttgaaaatagtacgagaaactaagtatgggcatatagattaactgctcgcatacaataaacaaaagcattaaaatagctaagtttcaaactagttaaatctgatgcataactttttattacttgatggggaatgagtactataattgagatgttctataaaaatgatgagtcttttatcattctaaatagaaaaactcacttagatttttcacaagtaaagtgagaaatatgtttaaacaacatatgcgagtaatgaaatataaatacatgcatcagtgtttaaacttaaaaaaaattattataacctagtaggccatccaactaggaaaaagattcaaatataaaataataagtaacgcttgatcgaaaaccaaaatctctcgatggctgatgggaggtcccctcgtgcaatccctcaattgtctcccattgatgatcactgattacgtgaacaacttgtatgagaagagcttattggccatatttgacctcagacaactctttctccttcttcaagtcttcgagatctctccttagagctttattttcacctagcaggcccaggttggcaacatgcagctgttggttcttggattttacctactcaagttctgtgacaagggtgcctacttctttaacgactctctccatcattaaggccgcctaacacatggagaagacaatacatagcagtaagaacaagaacataaaggtcaaagcttacccccactacttgttgtttgacggcatgggaaagggtgaacgcatcagtgctactgcacgttgcccaagtctccaggggcaactcaaacgtgctgctagatccctggtcgagaagctcggctacgaagggtgcgacttccctccctaccttaggcgccatctacttttctagggcttcgatgttcaccattggcccaagaggagtattagcaaaaagaccttcagaggtttcaaccctcttcacaacaaaagcttgttttctctcattctcaaaatcttccattctttctcgtcccgccttctcagagcatgttcggcctcctttgccctctgcatagcaacaaattccacaagaataatcattgtggggaattggaagcctaccaaaggaatctcagaaagagagttaggtcattggcacaacagttgaaacaattggtgtggaagctgctgcgattgtggacgttgccattggtattactggtgtagttgtggaatagagggtgacaaatcaaatgttgctggattgttggcttgttgagggttggtgtcatgcattctcctctttctcgtggaatctcctctgtgcctgaagcttgtcgaaccagactccttcttagggcctagcattctgactattaaagaggtacctgtgagcacaatcaacacgggaagattacttgacatgcaacaacaaactcttaaacaagtgcacatggaaggattaggttttcctcttggaaggatccacttttgacacaccattgtctgaaaaatgaagggaattggccaatatagtggttgtctagccccatttctaaagccatgcaagcctattcaaaaatgcagcatgaccgtactcagcccatctgaatgaggccgacatgatcaaagcacatagatacacacacagtttgatcctaataatgtgtttctttgaacaagtgttctataagttcgacatgcaataagaatcaaacccaacttgaacttagcatttctatctcagacacgaaattgtgcaaaagttagtagagcattgagttacttaccaaataataaaacaagttaaagaaggatgcggtatgctagacccaagtgtgcaaggcttgccctaatgcccaatcatgatgaattcaacaacctaagtttttgttggacagaatgtaaagtgagttgagacttttgagctttaagttcgaagaagatagaaagacttacgaaggttgaagatgaataaacttttaaaattcacttatacaccggttgaagtccttatcctttgaactgaacgaccccaattatttcaattaaagagtgtcctccaatccaacgactagggagttgaagagttagcatttaatgcacaaccctaacacttaacgttcatcattgcatgcctcgagtaatgcgctcattaagtaaagagtcatttcaatcacccagcgtcactataacttctcttaagaaacatgctcccacacgcgcatgacgccagtaatcaaatttaagatattgcttatgtgccacgctaataatatctacgaccagtgactcattaattgacgattactcttagaacatgagacgatctcaaatagccccacgtgccatgggtttatctcaaaaagttgagaagggctgcaaactctcaaatcgcattgcatctcgaaagcttgggggtaaatgttattcgtgttttatgcaaaacatgacatgttcattaaatggaaaaggttcaattgatccttcatgagttagagtcctttaaagggtgcacaatcgctaaagagtctactcgagcctagagccatccggaggaaaaagatacgcagaagcttacttgcggcagcctctgtttctcaaagagcaagataaaaaatgtcccacctgaacccgatagggcctagtaaggaggctcgttttgagaggctcccaaatacaccctagaaggacctgacgtggatatcgactctcatgggtggtcgtggatattgacttttgccatgtgccaagtcaccatttgacggttacacttttcttgacagaatctgatcttgccccccacgatcaagcatggtagcgcgtgcatcgccaccatctttttaccaggcgaacaatgtagacttctgcccataaaggagcaagctttgagtgacaggtgtccatagcttctaaagattacacctttgcgtgacatgtgtctgaatggtacaaaatagtctccattatccagctgcatcacgcacgggcataatgttacccactggaccgaccattcagcactacattgtatgtaatttaccccaatagtagaacttaagtagagatcctaggcgggtcttgaggcaacccacatccatcatttagcctataaatagctccccttcatttttatgcgaaggggtcaggcctaaaacacagcgaaaattctactaaaatcattattgatcttcttcttctttttagtaaagaaattaaggaaaaagagttaggatttcctgcataatatagtaaattcatcaatattgcccaccgaggctaatagattgacttgtggattaaggtttataacacctgaaccacgtaaaaaatctttttctcttaatttctgtcatttattatttttttagcgcttaaatattttagtttccgaaatctcagtaaacaaaaataattttgaaatctacaaatgcaggtggagaaaattgtagagaaaaatcggttaaaaaaaaaaaaaattagagaaaattataatttttactaacttacacatctacgtcaaactgtaaccgacgaaagaaagtatattcgcactagttatagtttgacacaaatctatatgcatcattatataactgacacgaataggtttttcacttggcactattatttgtgttggttaaaaatgatgcatgaaattttatgcgtcaatttttaactgacacaaattatttatatgtcacttaaaaaatgacgtgaatgagccattttgttatagtgtatacaaatatacaaagtgtagaaataattattgatagattagttaacactcacattaatatctagtatcaagattgaatttcatacataaacatatgtattactataagtgtataaacatagatttaaagagaatatttgatgattgaacatgaaacataaataataga

SEQ ID NO: 297962 - DNA, 960 bp, Cannabis indica
gactaaatgtatttttagtcacaatacttgttgcgactaaaactaaattattagtgacaacttgtaaccaaatactatgttttagtcacaagtaatattttgttgtgactaaaagtcacatttagtcacaaaaaaattatgttgtgactaaaaagttgtcactaaaaatagtagtttttttgtagtgagtagttacagaacgtatttttatttttgaaattagaaaacaaaagtgttaccaaacgacaccatagttatatatattataattaactatagctagaaatattcctatgtgttttatgattaacaaatgatggatacacacttggtgaggaaattaaaaataaaaagaaagactaactagagatagatagtctttatatatgaagtaataatgtattataattggtttggttggtgtgtaatattatatatagtctttatagtctttaaatatataaatatatagatatgataatagattaaattaatatacaaattgggtgcaataattagtgtataaataggtaggaaattaactacaacatttatcctcattagtggcgtaccttccgccactaatgataaaaaaatccacagctaaaggttaatatcggcggaactcgctattaagaattcgtctgtaatacttgatcgcaaataacatgtattagtaaactgataacccattgctaattatagtatcagattattcataaattattattgggaaacttacaaaaatactgaaatttgggttaagttttacaaaaatactgtcacaagaaaaagttttcaaaaatactgtgtttttttaaaacaccagtagaacacaaaacagaacaactcaaaacaacagtagaacaactaaaaaacactagtagaacaccagtgaaaatttaacacaatatattgcagtatgaaacttataaaaaaacatagtaaaaaagtaaaaaa

SEQ ID NO: 297963 - DNA, 1883 bp, Cannabis indica
ggcccatataaggaatctcttcactttggcctttcggcattatactctctaacctaatatggttaccccgaaagaaaaatcaagatgattgtgatgaaattaaagttaccattttttacagctgctatctctaaggccttggacctgcatttttggcatttcatactcacttcaaccactactttttgctgttaaggaaaagcacataaagaagttaggacttgggaagaaaataaattatactcttaaatgatatattgaagttagatcatttttaccttcatcttttctgctccacaaaacaagaaattctctactattctatatatgttcttggttgattgtttgatacggctaaatataagacaaacaaaactgaattgtctttatataatgccaagtgtgaacattgttctatcatagtatatatcaaagtaacttttttttaatatgaactagttgtccaactagtttggttatccacttctctgtttttctttttctaaacctaatattaagttaattatttctcatattattgtactgtatgggtgtttttatgctatgtcattactatggaccaagtcaatatatgctccaaaatagagtaattgactcattaaaaaggaaacttgttgaagaaggcaaagcaagatgggtctattctattttctgttcttattacaagtcaaatttaataagccttgatgggatgaaccctagaaccctaatactggcatggggtctctgaaattgtctaaactatcgaagagatatggaaaaatctccactagatcgttctttttttcttaagcaaataaatgaattagttaatgttgatgtaattaatgcccatgtttagtgttgtactttttatttgctataatgctcaacaccattttgtgagagtttaaatgtattaatttttaatattgtaagttagaatatatgaaaaacccattttaaataagaagatcttaattctatatatgattatgatttgtgttgattaatcaaacaaagctcaagaaatgtcttaatgttcaattctgtgtgagaatactctatacttgattaatcatattaattgattataggctaatctcattgattgtagatcatgtttaatagtcaattagagtacatttcaaaactcaaacccaattatgaaaatctcatcattcattttgacaaactcaataactaaaaataccaccatataataataaaagaaatgttgaaaggtattattggtgcctcggatcttatataattttattgtttttttgaaataaagatactctttattaaattatattatccaaaattatgaatgtcaaaccaaaaggaagagaatcccaactgaagacatgatcagcatcaaaactcgaagtttgcgctaaggcgtgagctacacaatttgttgaacgtttaacaaaacacaaagtaacagacacaagttcatcaatcaaagtcttacaatcagaagtaatatagtcataaggagagaccatatgtttaaaacatttcaaatcattaacaaatgtaaggcaatctatttcgacaaccacatcggaccaaacatgatttttaatccaactcagagcttcttcgagaccaatagcttcaaccatggccaactgcaatcttccctcacgactttgctgaactacttccaacaccatgcccaatctcgatcttgccacaaaatcgaaaccaaatctaccttatctttcgaagatagattcatgaacattaattttgatataaagaaaaaataaatgcagtccaatgctcaatacctccaccatttgattctctggtgggaactttttaaaattttccctgaaaagaagaatattttcaattagggggccatttca

SEQ ID NO: 297964 - DNA, 4445 bp, Cannabis indica
tatatatatatatatgaaaagactgaggcaatggaaggaacgatggttttgaaatatggcactttatataaatttagaagaatgtgatttgagaaagaccaaaaacacgtatgtatgatgagagtagtgaggtttgtgaatatttgtgatttgtgttcggatacaaataccttttgatgtgcactgaaattgattttcctcttgagtgttgctgcaatatcctccttccctgtaacatccgaaacaagcaggagttgcacgcaatccaaaactgaaatgaatattaacaggtggaggtggagatggaaatggaggtggaggtggaggtggaaatggaagcgtgaaattttgacatgtttgttggtattgaaaaggaaaactcatgtttggaggtccgcaatagaagtcgtggtcgtggcacttagtttgattaaaacctttgatagtactaagaccaggatcgtggctgcacctgtaaagggtgtgtgagttatcagctttaaaattataccatgaatcattatcagtggtgggaaaggagtattcattgatatattcacaaggttcttcttgggaagacagcgttgcttcctctttcaccacaatggaaattaaagagtctgggcctgactgaactgagtcaattctataccagtgcccaggcccttcttcttcttttttcaattggatcttaggtccatcttctgaacaactcactgagaacaccccacattttgaaagggttccctcttcttcagcggagcttggaagcagagaatgagtgagaatgaatataacaaacagaggaataatagcagccatgttcaacgtcccccaagaataatttggatttctaatgcataacacaacaggtatgttttacaatcctattttttggctgaggctgaggttgcttgctcctcataataaagagaagctcatcttgttgacctggttgttgacttggaaagtttggatgacagaatactttcatggaaactacatttagaaaaaataagcaaaaggggttggtcagcaaggaggaaccttccttcccatactcataacaatcccctgttgagtattcgattacaaacgatgaggacttgactcaccatggttctttattggaaatattacagtttttagaaagatttataaatatgtaaatacggaaaagataattaattacaaaaatataaattgtaaaaaaaatttataaattcgtaaatttttgttatcataaaaataaacttattgttttttttatatataatttttgcgaatttgtatttttgatatatatatatattttcaaaattttagagattttgaaaattccacttgtttatgtagttttgactgagtaaacagatgtacagcacaaaaaaaaaaatctggctgtatgatgataacgcggttttctacagacttagaaaatgacattaaatggcccccacatgaatttgaatggagtttttttgttgttggattggattgatttgatctttggttgtgaaattgagaataatgaatggaaaacgttgcatgagaaaaagaaagagaaagaaagcattatgacttgtaaacatgaaatgaggcttgtgggtcatattagaacaaacaaagatttttcatcaactagaaatggtctgatattatgaataatcaagataagcttttctttttctggtgatatttcttgtaggagtaggagacgggttaaacaaaaactaagaggattggctaatggcaattatgtcaagctaaggttatataaatgctctccaataagtcaaggattgtttccaattcaacaaaatctattatttttcaagtaatcttctatggattgtagtcaaattatgtattattaataaacaaaaaattcctagtatggaaagagaaagttggtggtggcgtttttccaatgaaaaacaaaatgaaatagtttttggagatggggttttactaataacatcacttaagagtttcaaatttattgtaggcataatctaatattactacacttgttctcaacagtcctatgttacgaataaaaaaagtttcaattttatcttaatgctctttggtttgttaggttcatgatttcctctgtttactacattggagattaaacagatgaaactagaacttaattagtgtgtttggtaggagagacaggtggaagaaaggtgattatagtcaataagtgttgaaaatcccttcccttctttcaactactccctcctgtcaagcaaacagaagactttggttttcaaatcttctctctttcctttcataacaaacgaaaaacaaattccctttcctctccttactaatacatatctcattccttcctattttatcaccttcctaccaaacatagtctaaataaggtgacaacataatcaagtaacataatcaagtaaccttgtttttgtgttgtgcaagctttacagggttcaaataatatgatatccttgtttggttacgtcgttcaagattgtaaaaaattgcttgctgaattgtgcaatgttttattactttttgttaatcggtcagctaatgtacgagctcacaattttgctcgaattactattttgtattctgatcgtcgtttcagtttagggtttctttctaattgagttgttaccatgtttggtaacggaaattaatggttgttaaagatgaatttttcattacaaaaaaaaggtgagaagataaagaagggtaattaatgatttataatatgacttatcaacaataacaccaacactgcaatatgagtgttgaggtccatcaggagcacaaaagcacagactttgattattttgaaatccacatcgaccgcctattgttttgcaattaacacaagtatcaccataagaaccatgccacacaagactaaatccacccatcaataactcagtgtagtttacagtctgtatggtttgattgaatggccaatttccctccaaatcaactgggatagcaacttcagacttacaagaccgatccgagtttgaagtcacacgatttctttcgaagttgttgtcttggaataaagcaacaaatgagtgatgagaagaattggatgcacaaggaaccgaggttgtttcaaaaggaggagaaaatgatttggtacacctatagaagaagtgaagattggcatggcttgagctgaaatcgaatggagaatcattgtcaaaactgaagtagtgtttaggaacaacacaacttgcattgacaacatccaaatcaaccaactgaactgattggttttcatatgaaatactcttaacgaggtaagggcctctagaggtcataaagattgttttattttcttgacaagtaattctaaagccttggaggccacaaaagtctgctccggcaccttcaacataaaaagggtagcttatgttgggaccatctccacagtttctaggcttacatgattcgaaactcgggttcgctgatatagctgagtttattactactaagctgttgaagaggatactgatccaaacagggaagagtaactcataaataatcaacttctgcagcctcatttggttgatgtttcatgaaaggaagacagtactaaaactctaaatatatagctcaatggtcattaaataataactaaagggtagtagctttgttttcttgaaccattcaaatatatactaattgttaattccccaccaagtaacaacaaagagcattatagaatagtcaaatgtttctgttgtgtgagctatttccataaacattaatctagtcagtccaagctatttaagagaataaataaatcctttagaagcatttaattgtcctcttagatagaacaaatagtaaggacaaaaatgaagtttaataatcctgatatatatatatatctagaactttagtccataacagactaaaatagttcactgaacatggaattttaatggttgtgatatttgaagaactctgtttgtcaaaatctatgactacattttacagattattactatgggcagatactgtggaattaaataagaacaaaaaaatctagtattgttggctagtcgggtttgttgggaaatttagttgagagttttagtgggactaatcatttcattcatttttccttatttttcatttcaagatagaaatggcttggtctttcaagggtcagggcactaagggtgttcatccgatccaatccgtacttttttagccaaacaacatccaatccgcactaattgcggatttcatattatggatccaatccgatccgcataacagtttaaatccaatccaatccgcaatagtgcggattggatcggttattttggatcggttatttttttaaagataaattattaatatttcatagaaaaaattaaaaaaaaacctaattgtattttaatctccaataaatcaattttcatctc

SEQ ID NO: 297965 - DNA, 4001 bp, Cannabis indica
ttttttttttttttgagtaataagagttgtccctttcctttttcccgaactattacactgaatttctgcgtacaacgaaagacgagactgtgctatccccaaatactctgactctgaggtgaccagagaacttttaggcacgcctaaccagaattgccacgtaagcacaagcgtacggacacggacggagtcgtactcattccttccgcgttataaaattgggcgggacttgtaataaaagtattatggttcccatatttgatctctctttcttcatttctattttctctgcttttctcccttttctctcagatacacactcactactacgaaaagaggagtcggccacatgggtgatcgcgcgggatcagtgcctcttcctcgttcggtggaggaaatactggacaagatttgcttcactcagcacctgttgaaggcggacgacttggcaaggcaaaagttggctgccgccggagaagaattggcacttgagaagctcaggatactagccactagaaaggttgataacctctctaaatacattatgttcatgttctcacagtctttatctccttcgcgttctcctccttccaaacggaaacttctccttccctacgaacctcattctccgccctcttcttctcccaacacgcgcacggtcccgcttttcaagaaaacgcgaggtgagttgctgagtaattgtgattgattgttttctcttgtttactctgtttcagtgatgttaccgaacggtgtcgtttaatgtggaacaggtattaccggtcgccccattccttgctccctcaatttagagactgggactcccttacaaactgaagcagaggcagcgttagaagctttaggggaaatggagtttaataagcagttcttaatcttaaactacattgccgggtattaatctaaagtttttatttattatcattttccaattaatattatttatttattatttttcaatttttgtataaataactacagaaatgagcttcataaggttaccacggctgaagatattaggagcctgaatcaacttacgatggtgcggtttgaagcagaagtatggagactctttggtcaaagatacgtcaaaaaagaagatcgtcgcatggtgagttatcatttaatcaataaaatttagtaggactaagcttaagattatttttttgttatatgtgtaactgtgtttataatagagggtatttattagtcaccttgtattagttgtaatgcttttcctggttttcttttttggggtgatatacagtatgacgattgggatgttaaaggaagaacgtatatctatgattgctatgtttctacagaaggaagttacaggttcaaggtttgctttctttgcctatactagcttattccacttgcacatacatgatcatatagaattagggacttttattataagcgtaaaagtatttcttagaaaagttgtatcttgatcatttatcttagattgtttttactaatctgtaatgtgtgatgataataaggaaattaaagaaaatgttttattttgtctttcatgattgtgaattaattttcgagaatttctcaagtattagtgaaattaaaaaagactatcaaattttttgttatgaaaccttttttacaaggattagtaaatgcaccaatctctgatctaatatatgtgttgtagaggcctttctctaatttagaaaacttaaataacttgattcaaagttctgacttattctataagataactttttattttcatgattaagaaggcttagtcctgcattattcacttcaatgatgggaagaatgtccttagtgtgggattttaatgtgcaacaactgcttaacttcgaaatatagtaacatcatgaaaaacttgatacagttgctcgattgtaaattaaacttatccaatgaccttgtatctatacatttattctaaacggtattttctgatgtcaagcccatgttggtattattggtttgccacttgaaagactattgcaaatgctgatgattttgacctttaatccagggcccctttttaagcaacacaaaaactcacttacaaaaggttctaggggatgacaatattttgagagtaaagtttgctgaggagctaagtggaaattctggtactgatttacgtgatcattactatgccggttataagaagatagcaagagaagggatcttagttggtttacgccggtattgctttttcggtgagctttgtgtgttggagctctttctgtttcaatatgttatttttttaatttaaattattcatatcactactataagggaactggcgagatcatgtcaatgttagttcaagttgaagttctaattgttaaattttttgttaccatcactacttttgtgttcatttatttttagggtgggggatcatgtacatagtcagcttgttagtttacttaatgtctgttatacatgattaaaaatcacagtgataaaagtgtttagaccatatggtttattttttttaatcttttatatacaattacgaaaatcacatactcccttgctataatcatttttcttgaaaaagaatgtctatgacacttgtttagtctatattggcatgtttctcaaatatattgtccttctcgtgtagattattcaaagagtctcttaggcttctaaagatcttgtgctcttgaccattctaggatgcaccaagagatgttaacatacatccttgtactactaggcttcatccatatatgccaatttagtttcgtttaggaaatcacagtggggtagaaaatcagctattgcttttatcttaggaagctaaatctggctagttattctcactttattcagcatattttttttatcacaaagaaaaatctttattcaagacattattttctttgtatgtggcattttaatctgtattgttgacctttgacagttttcaaagatggtggaaatcaagagaagaggaaaaatccaaattcatcacccgtgaagtgtttctttgttcgcatccattcagatgcacgaattgatcaaaagacacgttactgtttatctaacaaaacaatttctgaagcaagaaagctatttatgcatgcacacaaagtgtctagtgtggccaattatatggctaggtatgttgatttcaatagtttcttgtaaaaagcttcttttatgcacttttcaaggctaatttgaacttccttttggcaaattcaggttttctcttattttgtcaaaaacatacacattaaatattgacctctcttctgtaaatgtcaaaatagttccagatgttcagtgtgcagtaagccattaattcttctttccaattgaattcatagttttttttttttaattaatgcatattctcatttatatgttttgttaaaaaatgcaggatgaacatggtaatcctatgtctagagatggtaaagcactcattcatacagatggaacaggtttcatatcagaggatttggctgtgaagtgtccaaaaaatttacatgagggagacttctcaaaaatgaggatacggaggtttttacctttacactgtttttaaatcatacatgcaagtaaattagtaaaaagtgatgataagtaagtgatcatattacaagtctttatcttggtgtcttgtaaaaattctgatgtagtagtgatatgcctatcaaatttatcaacaatattatatagaatgatgtgctcaacataattttatcgtcattacttgtaggtttagaaaattcaatttcatgataaggtattttttggtcattttgataacttattttctctcataaattgaaattattaatgtcatgcactatcttatctaatcaaacgcaagcattctctttatgaaagatccattaagagcacaaagagagactaaaagtagctttagtcttttgtagggcaatgtaaaacgcaaacctttcaaaaaagaagctaagtttcagttttttttttttttt

SEQ ID NO: 297966 - DNA, 6692 bp, Cannabis indica
cacatcaactgtgtaattggaagtaattgaggggttccaattacactttccaattctcatggcccctatgagaattgaatgtaattacactgtgtaattactaaaaactttccatattaaatattagctactaaaaatattattttcccatctaattagtaactaatttgccaaacaagatattaagaattcatatgtaattaccacctcatatccaaacacaccttgcattttaaaatatagtgtaattactaaactgtgtaattaccaccctaataattaccttacttagtaattacacagttacttccaaacacataggcacaatggtacacctctagaaaaataagtctttttaaaaaataataaatttaaatactcaaaaataaaaagtcaatcatgagaatttaaataaaaaaattctatatttatttaaccaataaaacaatttaaaaacttttacaccaaaacaaggtctcaaccttatttccaaaataaaatacataattaattttatcatcttttctaaatatgccaactaaaaactttacatatgttttgataacacatttccaatcttattaaaggcattttttctagtcatgaaaagaggcataaggcattaagacatattcattaagttattgaagtcattcatgtagttcagagaaaaacctggtaacaaatactggttattagaaaattggggattgttagcaggttgtacatgattgtgtattcttctcccatatgatgtaattacggatcgttgctgaacatccagaacttgtactcgaacctgttgggtaaaactagaaagagttagagagataactataaacttaatttaggccaattaaatataaaagaaaagttagaatttcaagcatactatcaccatcccaacttgggagaaaaacagaactaaacctgtaaaagagtagaaatagaaaagatcatttcaaacactgtatgtaccttggatttccattgttaagcattgtttgaccacacctacgccatcaatgactatcttttaggatattcagttggcaaaagtatatttgatcctccagcagccatcaaggacaaagctgttgtttcagttgagttgttcaatttgttactgtgaaagaggaaaaaacaatgcagaacataattatgtaccatgcaaatacagctttctttctgcttctaagtaaaatataccttctttctgcttaagatttttcacaatcttcatctaacacaaatgatttgtgtcactcaatatttgaagttgatgcatatttgtcctttttatagattttctacggttgtagtcaaaacaaaaatttaaaaaatcggagggagaagaagctggaaagtctggcaaaaaagacccaacagaagtaccaacaacatgttgagtctcagcacggttaggatcatacttaccaatactgtcttcttgagggccaataatggggttaggatttagtccatacaagtgagaattactcaagggaaaataatggtgttaggatttagtccataaagtgagaattagtcaagggaagtgaacctgaaaagtcttgcctcgaagagtctaaagaagtactgctttgttgagttgcaaatgtagatccataagccataaggcataacagatttttcactattgtagtcaaaaccaaaatttggaaaactggagggaaaagaagctggaaagtccagcaagaaagacccaatagaagtataactaatgaaaccctataaaggaaataaaccttcgatttgtatttcctttgacagcttttttaccatactttcgccagcggtaaccaccatcaagtatgtctaaaacagtttcaattggataacaatttttggctcacgaacagccgttgaaggcaaagctgttgtttggatcatacctcctccacttacatcaagcatttattcgtcaaatgaaagcagcttctgatgatgatgatgatgatgatccaagacctgctatacagtttggaagcggttttgcatgattatgattactctcttaagtaatttcttttatttgaccatcatatgatacttccactcttctcttcacagttttgatgagtgcattaacaataactcctctgatattcactaccctttacctgtttttgtccatattttctacaattgtatccatcttctgaagttctagccccaactgagcagttcaatttcttcatgtgaatgagagaggaacaatgcagaatataattatctacaatgaaaatattaccttctttccgcttcagatttttcatcaaacccaagtgagttttttccctcaatatctaaagatgatgccatttttgtcttttcttgtaaacactggtcttgattttgtgattcgaacaaaacttcagagcattccaaacatctctggcactttcattacccgccatttgagcttcagctctccggtcatggaggataacagtaaattcagaagctggttgtcctgttccaagttcaagaatttttggttgatattttccaagaaattcatcttcattattcagaaggttatttgggggtagctgtgcttggaccaaataggtacttctcaagctcgtaacgatgcacaatttctagaatctttttctgccatgaaagaaagttcgaagaattgagcttgacatcaagctcttaaggaaagttttcctccattaaagaccttcagcagcttgtcaatgatcacggcacttcacagccctgataaaataaatgaacgagagaaattttagagaatgaatgatcttcaaaatgtattaatgaaaacatgagtgtgttaaagagttacaagttgtcaaaaaagtacttaggtaagtaacgaaataccttaactgaaatatattccacctgtcttgtccaaatctgtaagaattttcttttttgcttgaaattcaagaaagtgacttgactaacccaaaaacacaaaattcccacaagtatttttttttattcgctctattaaccttaacaagtgaataaataaatgtaaaaagaaatgtacctgtttaaggggagaagaacaagatgtcaaaagaaaaatgtatctttatttatgtcacatgtaaaacaaaacctggtctgccaaagcgcaaagtaaaattgtagagttgagcccaaaattgctatataataatagctcataaaataaaggcttttcgaccaatttttaatgtaatttgtaagcagaaaacgaaaccgaacacagtaaattgctaccatccaaacgccaccacccatgttccatttggtgaattttgaagctccaagaagaaattagaaattcaccggtagacttgacccgaaatcgtatatatttgccttgcctcatttacaaacttcttggagaaaaaaaaaaaaaaaaaaaactactaaaatcttccaacgatccggtcgtatgatgatgatgatgatgttgtattagcatcataaatgatttcatcgtcatttcgttcttgtttaggttgaataaaccttgtgccattttcatgaactgttgcagcaacaacagattttccactgttgtagtcaaaaccaatatttggaaaactgatgggaaaagacgccggaaagtctggcaggaaagacccaacagaagtaccaacaacatgttcagttgcagggcggctaggatttagtccataagtcatgggattttgtaaaggaatgttcatttggtaaaaggaagaaggtccatatctgaaatcactagtactgaaattcccaggaaaatttggcctcaaaaaatcattgttacaaaattctggttttctgtcaaacaaaggcgtaagaccatgaatttgtgtttcagcttttggaatgttggtgtttcttgggtgagaattgataggagtttgtgttataggttgtggattattaggtccagctgagttgatatggttattgctgtttctagcagcaggcacatcatggttgtgttttccctcatatgttgtaataatagcttttagatcgcctgaggctctctccacatgcttccttactatacatccagcacttgtgcatttgtagtagctcctgtgggagtgaaactatattcttatacaaataatttactgggctctataaagtataaagaaaattaagttcttttttatataaagaaaagtacattgaaaacctgtaaaggaagtacaccttggatttggatttcctttaacaactttttgaccatacttacgccaccggtaaccatcttcaagtatgtctgcagcagtttctatttggataacaatttttggctctcgaacagcccttgaaggcaaagctgttgtctcaattgatgagcagttcaattttttcctgtgatgaagaaataaaattatgtgtaggtattttttaccaataccacggtagtccaaacagttaccaactctaaggagactccatatatcttagctaaaatagtaacttttgttcatctcctctgttttaacaaaagtaattgtacaattatattaaagtaattataaaataataagatagctgtccaatatattaaaaaaattataacgtaaaaaagtttattgtccaatatattaatagtgtttcttttcgttctaataatatgaaaatattaaaaagaaaaaaaaaacagaagctccccacatatactacactttgttaagcagtcacttttagtgagcttaatactaccttctttttgcttcaggttcttcatcatcaagtccgtcacccctaagcaacatgttccccttttcatcatcatgactagaagaaactgtagttgaaacctcaggagtattttctcccaattcaatggattttccatgcatacttgataaaggaccattagaaagttcatttggtgttcctgtaatttcattggtaccatcatgatgattgttcttcctatccaaagatgatccaccttcaactttaaccgaaatcccagttcctccacttagttcaagcatttcatcaaaaaacaatgctgctgctgatgatccaactcctgctctacggtttggctgaggttttgcatgattatgattactcttataaatgatttctgttatttgaccatcatgtgatctttccactttcttcttcacctgacaatttggatgtgtacatttataataactcctgggatattcactacccttttgtttttgtccatattttctccaattatatccatcttctgaagttctcaccccaactgaggggtaatagtcgacctggtttctttctgatattgatgaggtggtggtgtattcttctgtcatatcatttttaataacatttgatgaatcgatagagtttttggtgacagcttccacttcaatgctctcaaaagcatcattagactgagaatattcaaaaaaaaaaatggataacaaatgacttttgtattgtatgtacatgtttggattgaaatttaaatttaggttgtttgagagcacatcacactacaagaatcattttttttaatttgttaataactttgcaatagtcttccccttttacctttctctctctacatctcaccctagtttgcttccgccggcgtcttctgttctccgatgttgttcgttttccttgggtgaattcacacttgctttcgcttctgaaccctagtaagattcattccttttaatattcttgtatatcttttgaatgtcttaattttatttcataaaatttgttctaggtatatcgtttgaggtagaacgaaatattgaatcaaaaaagtagaagagaaaggcagtgacttcaatatatatatttttgtattcgtgcatgcaatgcaaagtatgatcatatgtttttctgatccaatttttcatttcaagttagtgttagattttgcctctatgactaacatttctctcttcccaacctcttcaggtttggtcctttcgatctctttcacattctatttgcgttctgtataggtttttttaattcatttctttaattattttgagaatttggtatgtgatattcttgttttgtgccactggtaaagggctttagggattcaaatgctttagtatactcatctaattttctatgaacaaaaaacagagcacaaggtccttgcataagttggaaagtggtgaggaaatcaatcaggtttggtttcttaatttaataagtgattttgttggatttgaatggtgaatgaggtttagaaagcatctttggacattctgatgaatatatactaataaatttttatatgcaattaatgtaggaaatgagaacatcagctggtttttgcatcagtagatggttagctgtttacttatccaaggtataaatttatactctaattcattaagaattgaattgttgaatattattagttcaggtcagtttctgatttgaaaaaaaaatttattcagggagcaatgtttcttgacatgggaagactattcacatgctatgctatgacattggaattctctgtttatgtggtagcttctctgaataccacttaactgttttaataaatttttaagaataaaatatattccaatttaataagattagtaatgtgaaaaaatgaacaggtccctgagatcagtgacggatacagaatttttactttgtggaggcttatttattattaaaaaatatttatacttatatta

SEQ ID NO: 297967 - DNA, 2489 bp, Cannabis indica
tcccataataattggccaccacatttcaattcagccaggctttgatttgattttttttaatggaaaatgcatctttattaaccattaaaatccgctaccaaggatggtaacaagtcaaatggaacagactccatatcgaaagtacaaccaggaaaaaatatagaagctcttgcacaaatatgagctaccatatttgctgatcgcttaacaaataaaacagaaatagttttcaaatcggataacaattctttacaatcatgaataacttggccaaataatgaaatcatgtcaaccgagcttcttattgcttgaaccaccgtaaggcaatcggtttcaagtataacattctgccacccatgtatttttatccaactcaaagcttctcgtacaccaatagattctactaattctggtgaaactatacccgagaagagaagtgtcttgccttcaattagcatgccatgatgatctctagctacaaagccacaaccatacttgttactgccatcaaaaaaagcagcatcgacattgaccttgactctattttcacttggtactggccattgctcagctccgtcacttgtcgtaagtcccgaccatgacgtctctacaagagaattctgagcattactccactgatcaaggaaacctgttgccaacaccacaatcgctgctgcaataacatcttttttttgcttaatgaagtcattacgggggctccaaatcgcccagcacagcaccagcaactgcttctttttttctgcatcagccgcagcaaaacatttgatgcaccagtcaagaaaactgcttacaccagcagctatcaattgtgttccaataccgaccctttcccaaacctgtcttgctcttgtacacaagattaaagcatgttcaattgattcatcagcagcttgacaaattggacaaagtgtttgaacatctaccctttttattcttagctgttgcaaagtgggcaagcattctctacccgcgtgccagacctggtttttaaccttgggagggacttttaatttccaaaaatttcttccagaattttgtttgctcgtcctcctcttggttccacctgccatttaacttttggagaagcttgtaggcacttttaaccaagtaaacacctgaggtttcatagctccagttcagcctatccctgcctcggctaacattcaaagggatgtccattatgagcttcttgtcacgatctacaaacaagtcatttaaaatctcagcatcccaacttccacctccaatttccaacagattacacacctttgttccaatcaaactcgggtgagttgaggtgacgaaaggatgttcttcattcggcagccacggctcatggaggacatcaatatcctcaccattaccaacacaccaacgggttccttttcgaactagatcttgcacttcaaagaggttgcgccacacaaaacttgggttactccctagttcagccgtgaagtaagtaccatgaggaaaatatctagctttaaagattttagcaaccaaagagttaggccgagtgagtagcctccacccttgtttaccaagcatagctaaattaaaatccctcaaataacaaaaacccatgcctcctttggatttatgagaacaaagacggtcccaagagaaccaatgaattccatttttcgctttatttgacccttgccaccaaaacttattcatagctttctccatatccctagtgatctccaatggcaacaagaaaacactcatagcatagcttggaagagattgagcaaccgttttaatcaatacttctttaccagcacgagacaaaaacttattctcccaaccttcaatcctctttcgaaccctttctttgaggtagcctaaaaccgctgacttgttcttgcttaaagtgcttggcaaacccaagtacagactgccttcccccgctatcgacataccaagcatgttgcttatattgtttctagactgatgatctgtattggtacaaaagaaaattgaggattttgcataattcactttttgacccgattctgtttcgaacttgtgcaaaatttctcttattcttgtagcttccaacatggtggctttacagtatagatagctatcatcagggaagagcatgtgagaaatctggggagctccattagccactttacacccatgaatcaaacctcgactttcatatctatgaagtaaagccgagaggccttccgcacataagatgaatagatacggggataacgggtctccttgcctaattccccgagtaggaatgatcggtcccatctcgtgattcccatgaaccaccatataattagccgatgttacacatttcagcagcaaacgaacccaccaatcttcaaaacccagtttccttaacattgcttccaagaaaggccattcaatcctgtcgtacgccttattcaaagccataaagccttctttgcctttcctttccttttcaaataatgtagcac

SEQ ID NO: 297968 - DNA, 3534 bp, Cannabis indica
cagcatacctaccacaaaggttgcacataggatcaatcatcatgcctcggtgcctcaagtttgttttcgccgggagccaattgtgacaaagcttccagccaaagagcttgattcgaggaggtaattgcaattgccacaacatcttccaccaatcatgaattttttctatgtccgagcatcgcgtaggactaagatttatttcacgggccactctataaccgattgtcaccacatattgcccatttgtagtaaatggtcaagccaaagtgtcttccatttgcgtatctataggggtgcccataatccatggtatatcctccttgtgtaagtgaagttgaataagaacttgttccactcaccatcttcattaagtaggttatgaatggtggtattaggttccaaccctgggtgacggtggagaattgttccattggggcgggggagccacttgtcttcccgaatccgaatgtccctcccattacccactttccaacgggccccttctttaatgattttctgcccccaaaagattccttcccacattggcattgaggaaggaggaattgggataataactacttttcaatactcaggccaacaaggagtaagaattatggataagacgtcacccttgtttggccaaaagtgcttggttaaattgtttcaaacttcaaaaccccaagcccgctccttctttcggcttgcacaacttgtcccaagtactccaataaagtttcttattgtcttttgtatcgccccaccaaaagttggtagccaagaagtggaggcttttgataagctttttaggaaggcgaaaacaactcatagagtagctcaggatagcttgaatcacggccttaataaggatttcctttcccgcttgggaaaacatagtcattttccagctctttagcttgttccaaactttatctttaatcacctcaaacacctctttctttctcctcccaacataactaggcagccccaaatacttggcatggtgaggcataagccgaacgcccaatctagaagcaagagtctggcccatgtggttggtaattcgacggcccatactcacttccaattttctatgttgatttgctaccccaaaagtcttgtgtagcgatgcaagacttgtttcattgtgtcacactcccacaaaggaacacgaagctatcgttcgcaaagaaaagatgcgacactttaactccattacgaccaaactgaaccccatttattctaccagcccgctcagccgcatgaataaggcaagagaggccttctgaacaaataaggaaaaggtaggggacaatgaatcaccttggcgaagaccccgagttggttgaaacttccctatcctttccccgttaataagaaccgaaaaggaaacactagtaacacacctcatgatcttctcaatccactcctcttcatagcccaaacccctcatcatggttatcaaaaaactccattcaacccgatcgtaggcctttgacatgtctaactttaaggccatcttcctcccatttctaaatctttttgtcttcatgcaatgaaggctctcaaaccctattatagcattgtcttggattaaccgacccccaacaaaggcactttactcttctgaaatagcttggtgaatgttatttttcattcgacccgaaagacacttagccacaatcttgtataccacgttgcataaactaataggtcaaaattctgacatctgggcgggcttttgtatctttgaaatatgacaaatgagagtatcattcagttcatccaccgtcattccatcattgagaatacccaaacataccttggagaccgcattaccaacaaccggccagtaattcctatagaagaggcttggcattccatcgctgcccggtgctttctgagggtggatagcccgcattgcttgatagacatcttccatggtaaacggttccataagatactcatttgtttcacgagatatcctattagaaataatgctttggaactcctctaattcctccggggtagctgaattagcagtaaacaactgtcagaagtagtcgcacgccacttgacccacatttttatttaccgtaacccacttcaagttcctgtccagcatccattatagtatttttccgcttcccattattagccttcctgtgaaaaatttagtgtttcgatccccctctttcagccctaaggctcggcttcgttgcttccaaaacttctcctctttatccaacaccgcattgtgtttttgctctatttctttcaagtgattccagtcattaggattcatgctcctggaaagagtagatattttatcttcgaattcttttaagtgcctgttcatctctttcttcttagtcttattccacctttggagggcatccccacacttagccaattggctctttagctcataagccgtgtctatatttccaacatccccacacgacttggtcacaatctccgaacaatcatcttccccgacccaagcactttcaaagtaaaatcgagagcgccactttaccacattatccattccctgaatcatatttgaacaagtaaggaggaaggggcaacggtctgaatttattcgctcgagatggctcacttttgctgctggaaacatatcaaaccactccgtattcccacaaattctgtcaagcctttcaaaaatgagattgttttgtctcccattacaccaagtgtattgacttccttcaaaatcaacctccctgagcttacaatcatccaaagctctccagaaattattaattagataccttgattttggatgacctccaacttctccttttgacccaaaatctcattgaaatcacccccaccaaccaaggccccgagtacatcctcccgactctagtaagtagcttccaagaatcagtccttcgacttggatctgggtccccatagaatcctgtaaacctccaccattggccctcctctttcctaatgaaagaatcaatatggaaaggggagtaggagaggatgttgcaaacaacattagaagaccaaagcaaaattagaccaccacttttacccttagcttccatcacgaaacaaccgttaaaccccaacgtaacccgtaaagactccgctcgcattttgttaagcctaaactctgagatgaaaattaagtcaggcttccaatgatcaaccaggaggaacggaccgtcgaagggttccccatcccttgaacgttccaaagtaagatgttcatggatgtaggcgaccctgacccgcagggtgcgcctcttcttcactcctagcaactgtccaatccccattctgagaaactccaattggcataccaccaatcttatcattttttgttttagcatccttcttcacagcaaccttccttctatgttctttgggaatagtcttctggcccgagctaaagacaaatgacgggactccttccatcccatatgtttctattgaataagtaacagggatactgtaaagcccgcttagttaatttggaaattagcagttgtttatgtt

SEQ ID NO: 297969 - DNA, 2700 bp, Cannabis indica
taaaatattaaataataagaaaaaatataacaagatagtgtttagtgttgtggtagagagtcttaagctaacagatcaagggattaattttcaacctctaattttttattgttttctttagaaatatttaatgtgtagcaatggaggattgaactttagaactcttaagaattttaaaaatatttaccacttgataataattaaattttttatatagggttccaaaatttaattttgtattaagtctcatatattttagaaccggccctggcgcgtgttaaaaagtgtattcacatcaccaatcaagacaatttcgaacacctaggaaggaagtccctctaaagatcactccttcttcccttagacttctcaattatgattacaaaaagttacaaacttgatcaaaactaactgaattgccatgtcgtcaaggacagttgtaactggatttagtcttgatcttattgcaggtgaagatctacaatggcagaaaaacattaggacatactctaactgacactaaaacagcagttagtcaagtggacaaacttgtgacagttattctggttgtagtgactattgtagtatggcttatactcatcaaaattgataccacaaaagtactagtttttttctcatctcagattgtagtggcagtttttgtgtttggtaaagacattgtctttgtgttcataaggcatcctttcgacgtcggagatcgttgtgtcattgatggcgttacggtaatttttatttcagcctaaattttttatgtttttcatacttaaaggtaattaggatttttgttcccaaactttaacaactactaaatcatgttctctgaatttttcaaaccgtcaaatatttttcctgaattattgagattgttagattcaaggatttatgtaattcttattttagttttatactttatattcttattcttaattgggttgcaagtccttgaatctaacaatcttaatactttggggaaaatttttaacggcctgaaaaattcaaagttcaggagcatgatttgataaacgttaaaatttagggatgaaaatcctaattaaccttaattcaatcacatctaacacaatgtttactcaatttaacatagtacaaaaccaaaaggacactattcttttgaaatgtttgtttcaatggtttggattcttattaagctctattttttactttgacagttggtagttgaagagatgaacatcttaacaactgtgttcttgaaactcaacaatgaaaaggtattctatccaaactcagtcttgtctacaaaacccatcagcaactactacagaagtccagatatgggtgattctgtcgagttttcgatcgatttcaatacatctctcgaaaagatagcacaactcaaacaaaaaatcaagaagtgagtttacttagtaacactactaatgtcaattttttttgttcatttattgacacattctggtttttgtttatgttatttttaataggtacatagaaaagactccatcacattggggtcctactcacagtgtggtggtgcttgacattgaggatgtgaacaagttaaaaatggctcttaatattactcacaccatgaattttcaagacttcaatgaaaagaatcgacggcggtctgaactggttattgagattaaaaagattttcgaagagttgggtataaaatgttgtgttcaacctgaaacggttcatgtcaaacccattggcttggactcaaatgtagctgaacacgagaattgtgtggttaactaatcgccaattatttttatttgagatggctctcatttagtataactcacttgctatgtatgttcacattgtgtgatttatatgtacacatatcattattcgttatgttttgttaaatttaattttaaattttatattttgtaaaaggttataatttggatctatttattattattatttttaaatgactaaatactcttagttataatgaaatgtatattcttttggattttatattttaataaagtgattctatttgtgggtggatatagtaggctaatgtataatttattttaattatttatttattaagatattgttgtgaatttctagttgagtttttataagcttgaaaatttatttgaattaattttactttctaaatttaaatcctaacttttaacaacttttaatttttttttcctttccatttctttttctctccttcatttatgtagacataagctttctttgattaattttttttctacaatccacaaccacactcatatctttaacattaagggataaaaaattattaatcaaatcatcaaagtgtgttcaataatatacattgttttcatttaaatattatttgatttgatttgaattggttaaaattgtaaagatagtcttgattacatgttttgacttttttataagtaaaattgagttttatataatgacctcaaaatttaaatcgtcttatgcttatgtaatctcagtgattacatgaggccatcttcagtgtaaaactcatatttagtgttaaaatttacaccaaaaagttactatttcaatactattcttttttaattccaatcacaaaactaaaatatattctttatcattttattatttaattaatataataaaaatattttaatattaaatatttattaaatctaataaattatatta

SEQ ID NO: 297970 - DNA, 2619 bp, Cannabis indica
tagggcacaaagcccaacagatccctaccctcctgttgagggatagagcaaattacatcttatcttttcctgtagagaggagagacataccaaggctagcctgtgaggtaagtgttcggatgtatgatttgtatcctcctttgtgtagtgctgaagggagttgagggtcctttaggaggcccagatgacactccgatgatagaggaggctagcctagggggaagacctacacctgagtcaaatgataacgttccccttgccaggttttccaagaatgtggccagaagggatcaaatccttcgacagtgtttagaatgagggggaactgtacagaatgcgtctcttctgattaggtttggaggccaggactttgttggccctattcgaccaaggcatgtgtccgagggcaaagtcaaagctgccgccattggtaatagtttagaagattcatcctccaaggatgactatcccctagagggtagtacatagtaataaattttatttatgcttgcatttagtacttataacttttatactaactttgttactttcctttttgtagacatggactccaagatgaggtacttagtaggagggtcgtttggtggtacttcttcagaccgtcctcaagccaaggtgcttggaccgctagatcatctgatgtgactcagtccacattgcctcctcctcctcatccagggcctgttttggttgactagctagtgattatggaccctttcccgaggagcactccgcccccacaagccttcaagcaaggagggccagaggcctagctgggggcttgtttatctatagtaagaggacgatagatgttgcaaagaattaccttggcaaatttttgccaagcattgacagggcgatccaagagcttgaggccaagaattttgagtagttgacatccacaccttcaaggatctttcatttgtaagttgtttacttatttttacttgagaagttgatttgacaggtgctggctggcctatagaatcttttggtcgaccaaggtgacacaattaagaagtaggctagcccatatactcccttggccgaccagacttgtccaacttctcacttggtttttctttcatttcaggccatgctgaagcttaaccttacccatgtaagggagaaaggctctactgttgttcacaggatgaagttgaaggccaaggaggctgagctcaaggcaaagaaggaggcatgcacccaagtacaggctgacctgtcgactcgcttgagagagactaaaaacttgaatgatggcctaaactgactgcttggtcttcgtaacgaagaggtgataaggcttgctgctatgacctccaggttcgagaaggagctcgagatggaatgcctggagaaacaactagcccttgatgggtatcaagccatcaaggatgaatatttgggcttaacctctgaggtcttgtatgaggtttatctacacaatcccaaggtttatcttgggtacatagggtctccattccgtgatagttcactttgttgggggaaggaaatctatgagagtaggttgttagcagagcaggctgacctggtggtcggccaggttgagggagcactgtctagcaaagttgacgaggctgtggccggctagcctatagagctagtggtcggccaggttgctgaggccatggctgaccaacctgttgaggctatggctgaccatccttttggagaccaggttgtagagccttcttctcaggctccatttttcccggctgatgctaccatccctcgctcagatatttcgagcccacctgcacttgtttatgattagacacttttcgttagtttttcatggttttgttttgcatattatcatgttcttatatgacttgtaggccttttacttttgaacaatacttgtggccttaaggcctttaatttttgatatatgattagccaggcagtctttaatccttgcttttatcttcttttgatagacatgtaagtattcagatttacttcttttatgtctagtcttaagtatgccttttgcacttacttagctttcaaatttttgcttataaaaatctttaaattttgcttaagtttagtcgtgcttgttcgattcttgtacggtgtgggtgccccccaagtgatcaaaagacttatggtgtcttggtcacttgcaattcaccatgtattatagacctttgcttgtgtattttcttagagggacctattgtacgcatgtggaactaaaaataaagaataactctaagaagttatcttgtagcaagttgtttgacacaatattgaactgaaacaccgtttttatttatcaattggtcttaaatatgtgttgttgctatgcaatgtacatttattgattctaaaagcttgcaacataaaaagtatacttctagaactcatatggctactcctactggacatgtcaggcaaggtttgtcactgaagagtgatgaatacttagctttctgtaaactaacccttataaatgagttgacaaaactattactgacgagtagagttcttacaagttggtcactcatagtactttttgagatgttctccattccaataccttggaaggagaactaactctatgttctc

SEQ ID NO: 297971 - DNA, 1233 bp, Cannabis indica
atctaagatcctggtaaaatacttccaacaccaacctaggtgttaggtctagttcttggcccttagaaggttctgtttagtccccgtaaatagttaactcacagaaagtgcaagaatcaagacatggagctcacggaccttgccttttgcagggagaattgtattgattaactcagtgctaatttccattcatgcatattagagccaaattatgatttcgccaagaaaagtgatcaagaatatagaagctatctgtagagctttcttttggaaaggtcaagctatgtttcaaggggctggatctattgcttgggatgttcttcaccaaacaaaggctgttggtggtgttgaattaaaagattgacagaatggaataaggcagctatgtgtaaatatatttgggcaattgcaaacaataaagagagtctatggatgagatggatacatagcgtgtacatcaagggtgcaaactagtggagttccacaacctcagctcaatgcagttggtattaaaagaagctggttgctctaaatgaccagttcaaggtcctgagggaagctgttgatcacccaatgcataaatatacagtatcagcggggtacaaaatgttctgtccccccccccccaaaaaaaaaaaaaccaaaaatacagtggagccaggaggtatgggctaggcttaatactctaaaacatagttttgtactatggttgggaatgcttttcagactgaaaactatggataggttgataaggtttggcctacaagtggaagagaagtgcatactgtgcaaagaacagagagaaacttctagcatttgttctttgaatgcaagttctctatgcagtgtctacaagagataaaaggatggcttataattggagagcaaatgctacctgtctaccccaacttatcagatggattggcaaggctaaaattagtaagttcagaaagcaagtcctggcagcatctagtgcctctctagtctacaacatctagagaacttgaaatgctataatttggaaagaagaatcaaaggctcctcgcaagcttacaagggagatcaaagagagtcgagtaaaaaaaattactatgtttttgcctaaataaatcaaagaagctgataagacttggtttcatgaattgtaaggattgattctatactttgtaaaggaaaaaaaaatagaaaaatgtatagatagaacagaaaagtaaataggagaatggtgtatag

SEQ ID NO: 297972 - DNA, 2326 bp, Cannabis indica
tttccttttttttttttttgtttgccaaatttagtactatatatagatcttgcattggagatggctttaatcccatgtttgatacattttagtatttccttagttgattttttcttcttttttatttttcattccaatatgctaaattataatattgcaacaaagatttaacaatgcattgaaaatactctaagaccacacaacatcctccatgaattttggagtattttatggaagggtatgcaagctcattgtcaacatgtctctcaaaatgaaaaaaacttcattatatctcaaaaaagttagagcattccttgtaaaccatgaaattagtgaaggagaaaacagagcaataactgacctctgcagtagtcccaacagttgaaaactttgttcttccagtatcacgatttctgttagctcttacctaattaaattttattcataatatcatttaagtttcatggagtgattgaaagtggaaaaagtggaaaatgaaattgcatagatagaagagctggataaccagctttataaggagtacacctaccacaccaattgtaaagggtacatcaacttgtgttaaagctctctcaatagcagctacaaaattgccttcaataactctgagaggaagggttgcttcagggaacaaaacgactcctgaatataacacagcaaaattaaaatcatgccgttgtttttttttcttttttgttatgcaagggggaagaaaaacttaaaggataatgaacgcagaaagcaattttcaattgaaagctagtactacagttacaaatgcacattatttctaagtcatttaggaaacatacttaatcaccaaagtggtgagatcagagctacttttgatcatgcaagagtaagacacagatacattggccagttttcaataattccaagatccaaggaacagtgtcaacacactctatcacaccttacattttcttcaaaatccttcacctagtgcaaaaggagtagaaacaatataaaaactgaaatctgaaaaggaatgaattagcaccttcaagatagaagattggaaggttaaagatagcaccaccctccaaaaaggcaaccctattgtgtgtgtcttcgacatctgttaatgatacaagtaaaaccgtaagatctcactaaacttaactgtctagtcaaatataaaacaatttaaaatcaaaacctaaacatgtaatcttaccgccaagatatgtgtgtaacgaagccaaacatgtattaaaggtgaacccaccagatgtgacagcgccatcataacctcgaccactttaattaattgacaaaaagttaggaagattaaatcatatttgatctcctagctaaaacaacaataatgcagaagttgccacactccagttattgttcgttactccacggtagtcatcgtagacacttacaaaatagatcttatgtatcagtgcctccaatttgtttgaaatttggacatgaaaggtaagttcactcagattcaaaccaaatgtatgcatgcgtatgaaaatgtatgtacacaaatacacttacatgacctaaaactataaattctatactcggaattacagaccaaaattctatagacgaaagtactccctgcctcccaatttctaagaaccctaatggaactacatttacagtacaaacaaacatccagttcgttcagcctgtaaattttcaaataaagagcagaagcaataatgaagaaaaagaagaacattacatagcgtgacgatcttcgtcggatgaatcgtgaaggtcatcgacctcttcgacgagcaactcctcgagatcgagctccaaaatctgctcgatctggtgtctctctcgctcgcttatgttttcgtccgccattcacgttagggttttacagggaaaggttaccggcatggcaatggggacattacgcctccgccgcaaaattttcagctgagacagtctccgactcccagtcccagtcccaccctaaaatcaaacacgcttattatttacccatataatatttctgttagctattacagatcaacagggtaatgatttttttttttcagaacaaactgtgtaatggtttatttacgatctaccggtaaattttaattaaactgctgtgttttattaatataaaattactgaaatacaaaatattttaaaatgtcaatattatgaggggtgtacagatccaatcccaaccgacccatccaatcccaaccgatctaatagaatcgtatatccaatcataattagatcggatcggatacaaatttaaaaaatccaattggatcggatcggatgttgaatg

SEQ ID NO: 297973 - DNA, 1606 bp, Cannabis indica
tatatatatataaaaacatatatataaactgcaaaaagacaaatataaaatcatctctattcaaatatataattcaaaattttaaaatgacaactatatattaatattatacagctttcagcagatgatgatcacaatttcaatttcaaattcaattttatatatacataaatatatatatatttacatacaaaaattattaatcaaactctgacgtctaatatataaatatactcaattctcataattctcactataaaaaaatataagccattcagcttattctagatattactatttataaataaatagtatttaaatctcttacatatgccatagaatcaaattacactaacaactaataattaataataagttttaaaaatcataacatatcatgatttacaccaatccattataatttattttggaagctgggggagcaagaagtcatggacttgggtgaatataatcaatatatatatttatataatttattaaagaatggatggatgcttactgtccaagtgatgagaaaataaattgggtttgtttttaaaataagtggggaatatatattatatagtatgaatctgttgaccatttcatcaaattatatatatggaaaaagggtcaactaattttgatcaattcatataaattaatatagtgcaccaattttcccggaaactttagcatataatataaatatacataatatagttataggtagtgatgagaggatatgcatacaaaagaggaatgctttgcttagctggattggccatcaaatgaggtgtacatattataaacatatactatatatactaataagactattattataataattttattattgtagcaaattaataagaaccacttaattaattaattaaactccctaactctctctttctctctatgaagtttaaatcatatgccaaagactttggactaatcaacatgtcaatatcacttctccaatgcttgaaaacgaaattaataataataataataataaccttgaaacttatcaatatataaataaattcatgaatgaaaaaaaaaattaaaaaagctttattcctatttttgcatttaaacatttatttatttatttatttagagaaatttgaaaaactatccataaaacactctaaaattatttccctaaatttatatctattaaaattacccatatatgactacatttaattttttcccataatacccctcccatttgaaaaacaaatcccaacattctttcgtcattctctctctccctctcgatgaccacgcacgcacgaccctctctctccctctcgctgatcacggcttcagcgctcgaccaccacgcccgaccaccgacgaccacccaccaccaccgacagcagcccccgaccatgcacgaccaccacccgcactcacgaatatgtcgaaggttagtttttcctcagtcgatgttgggctttttcagatttgaggttgaagacatcggacctcctattggtccgatgtcgtccgatggtccgatggggttgtgggttgggtccgatgggttgtgggttgggtccgatggggtatgtgggttgggtccgatggg

SEQ ID NO: 297974 - DNA, 3352 bp, Cannabis indica
aaatcaaagactgggaaaagtttgaagaaaactggaaaaaactgaataaaaaccgttgtaggactataactgccacagagcacaactaaagggcagacgctctcatttttataaaatatcttaaatgattataatatgcatgactataaaaaaaatttgtcaagtgccaaaacaatgtattaatgtattgtaaaatttctcaaaattaaattcttaatttgataaataaatcaaataatataaatatataaatattaccatatgccctgtactgcagtgtaacattaacctcaaaatgcaatctttcataatatctcattgaaacaaaaaggaacgagatatatataaaatgctacttccttggaaaagccttaagatatctagctatgtaaataaaattatattgctgctcaagtttttttttagtttatttttttttttaactattgtatggggtaactatgaagtagacatgccaaatggactagatgttatatttttatgattacgttttagttgattatggcgttgttgcatacaacattgtttggaaaagattttataggcattttttataagccaccataaaattttgatatttggataaataatttattattattaaaatcttttttaatttcattaagcaaaaaataaaaaaaaaaaacaaatcttttttgatttcctttctctccatctcagtccacaaccagcaaccacgtgtttcaattttttttttttttgaaacaatgtttcaatttattttaaaaagttattattatatatatttttagttttgagatttaattaatttgggtaaatatcctaccgatatttggttttgaatatttagaaaacaactaaaataaatatctttataatggcagcaatcgaatgatattaaaatatatttaaaaatgtctgaatattgaaaaagatatataaattaccaaatttaaaaataaaatgatataatctatttctcatattatatggattttataatttgaaatttaaaagagcaactatatatacaagagatataacgtgagtggtgagtagttgtattttatagctagggctttcaagtttgacctgagattgagagatttgagagagtggaaaatcagaaaagtaaaaagagtgagaatattattgagtacgtagtatctactatggctgattcaagaagagaaggagttgaagtttcaagtagagaaagagttaataatgttgatgttgttgaaaataataataagcagaaatcaatcgatgaatggttaccaataacatcgtctaggaatgctaaatggtggtattctgcttttcataatgtaactgccatggttggtgctggtgttttgagtcttccttacgcaatgactgagttaggatggtacgtactttttattaattaattcatcaaattcataatcactgttataatatatcttatgagatatttagagtttattattattttgagtagttataatgtagtacatatatgcagttatgatattgagaaattatctctatataaaagagttttaccaaaaattgatgcacgtataatggtagatgtatagttatattacacacacttttacattgtacgtagtagttttagacggattacatccaggatttttactctatttgttataaaaaatatttatacttgttatataaaacgtacaattattaaattaaatgatttttttttgtaagggattcgaattagggaggtgtaaaccattagattatatatgccaatgaacactataagatttttttagtgggtgttatagccccatacgctttgtaggatttttattaatcattacttataatatatggatgcactttaatgaatagtactaggaaaattttagttgatatgttcaattttttttatctaattacaaaaacctttaatttttatattatatggattcaagatgtttcatcgagtaaaaaaaaataaaaataaggtttctggtaaaaaatagataaaaaaagtttagcttaagcatagagatttaagcttctcctatttagatttaatatttttaaatgaatatttatagttaaattagtttaataagtatgaatacttaatagctattgagaagtgtggtgtatatttatatgtaaatattttgattgattaaactttgaagaatgatattgagttaataacttgtttgaatatatatatgatttaattacaggggacctggtgtggctattctaatattgtcatgggtaataacactatacacactatggcaaatggtggagatgcacgagatggtgccagggaagagatttgacaggtaccacgagctagggcaacatgcttttggtgaaaaactagggctttggattgttgtgccccaacagctgatcgttgaggttggagtcaacatagtctacatggtgactggtggaaaatccttaaagaaagtccatgacactgtttggcctaactccaaacccattagaaccacttatttcatcatgatctttgcttctcttcacttggttctctcccatctccccaacttcaattccattgccattgtatccttagctgcagctgtcatgtccctaaggttacatacttatattttaattcattcattgattaatcctatgttgtatacaatagagtaactaaatgttatctatgcatatatttcagttactccacaattgcttggtcaacttcactacacaaaggagtaaaacccgatgtctcttatgcgctgagaggatcaaacatgggagttaaaactctcaattttttttcggcattgggagatgtggcgtttgcttatgcaggtcacaacgtggtgcttgagatccaagcaacaattccatccactcccgaaaaaccttccaaaaaaccaatgtggaagggagtgcttgtggcttacgccgtcgttgctctctgttatttcccagtcgcattgatcggctactatgtgttcggtaactctgttgatgacaacattctcattactttggagagaccagcttggcttattgctacagctaacttgtttgttgttattcatgttattggaagttatcaggtactactaacaactatatgttatcaatggttaattttcactcatttatatagtcttgtttttggatactaattaactttttaatatagatatatgcaatgccagtgttcgacatgattgaaactgtgttggtgaagaagttgaactttacacccagttttcgccttcgatttttcactcgaaccacctatgtttgtgagtatacattattttgtgtttttttttaaatttttattatataaatttctata

SEQ ID NO: 297975 - DNA, 5244 bp, Cannabis indica
ttcctcttcttcaagaagaacacggtagaaatgagtaaaagtccatggtttttgtatttgtaaaaacagtcatcggtcgaagagcctaataaaatggactgtagactaaggatagttgacgcctgaaccacgtaaaaatctctagtttattattgtactatttacaccttcattactttcttaaactctaaaaaatattagcttgcccaaaaaattggtaaacactatgtttatagattgtgaaaattcaaaaaatactataacctaaataattaaataaattagaaaatatcctaaattcaaacaataataacaaaaaataatgagatagatcaatatcaaaaaacctaatttaatagggaaaaaatcacttaattaatagacaaaaatcaaaacctaatttactcatattatcaaagacatgacattggctttatatgccagccctttgctgcctatcaaacgttcccatagccatccactacaacccaaaagagtgagtgattgtgagagatgaagatgaaaaaaaaatgtgagacccaaacgaaaacaaacttacaaacaatcgaccggtgagggatatgcttcgacggtgagggcttcgaggttgatgggggcgccgatggtgggtggcttggaggatttgggaaaataaaattttcttttttttggctgagaaaatgggttacggtgggttggaggattagtttgatgaaatgaaatgaaataaatgaaatggaaaaggtgaggttgctgagttttgttttttgaaaatgaaaaatactgggccgacttgttcgtgcctattgttgtgccccttgcaatcaaatggcacgccatgtcagggcagggggcccgatcgtagtcatgcacacattaaacatagggaaaattctcgcgttcagcaacgggcaaatttcaaagctgatggggcacgatattatcgtgcctagctccatgtcgcgcccaaatgcctcaaaattaaaaaaaaaaaaaataaataaaaaaaaaataagagccacggccccaagaatactagaaagattggcatcattttaagtcgtcctctacttagacttgccaatatgctactattattgtagtgacatatattgatacctccgtaccgggtttaattatggtgtgtcaaaaaattccattcatatttacaacaccaattcggattgaaattttggctccgaccacttgattaattattaacaatattgtcacatggcatgtcgagctgaaaatcagtctgaatttgagtaaagtgttgggagaaggtatagatgaattgattggcaatttgaatatggactataattaaatgatagttataaatgatacacaaatggatgattcgctgtacccttatgatggaaatatatatatctatatatatataaatatatataattataaagttattacttaatttaattgggttattaacttaactttcaaaatggcaaaatactcctaaaatatatatcaacaaataatttaaatacagtagcatcttttcgtagtttcttgtaattgtgattataagatatttggagccgttgttctggaataatgatatctatagtgctgtatttatcaacaattaagttgatcaatcaaaattttgtgtggttcctctgttgaatctttttccactgagctttgctactgagacgttcatgtccacttaaaataaattattgctatattggaaggagaacagccacatattctctccacatactgtttacgtctgatcgacatgccttcctatataagatcacatatatgcgcatggagtgtacaagtaaattataacactgcacaaactgcttattaataataatggcaaacacaacgaccagcaacccagtgatgattaagacctcatcaggaggaatctggcaaggcgataatcctcttagctacgcctttcctttgctaataattcaaacccttttggttctcttcacaagccgctcccttactctcctcctcaagccacttcgccaacccaaagtcatcgctgagattttagtacgtttaattaattatatatgcatgattttttttattattattattggagaatcaattttgtctctagtaggaccattttttgttttcattttttaataaaacgctgcacactttttattagaaaaatgctgaatatgtagtttacggttattaaatacagtataataaaccgttatataaaaaaaaaattctgaaggtaggagaaatgacaaacgcactaaagaaaagtgatgatgtccctaactaactattatatatatgctaattaagagttttcacatgagagctaaatgttttgcgttgcactttcagggtgggattttgctcggaccatcggcaattggacgtaaccaaaattttgtgaaatggattttcccatcatggagtactcccattcttgaatctgtggccagcataggtctcctcttttttctcttcttggttggtgttgaactagacttgtcatctattcgacgtagcggccgcaaagctttcacaatagctctggctggtatctcccttcctttcatattcagtgttggagtcaccgttctcatccgccaagcaataaagggacaggaaaaagtcggctttgcacagtgcctcgcgttcatgggtgtttcattctccattacagcttttcctgttctggctcgtatcttagcggagctcaagctcctcactactcatgttggagagacggccattgctgctgcagcctttaacgacatcgctgcatggatattactggcttttgcagaagcactctctgagggaaatgagggacacagtaataataacaagacactctccttggtcccgatctgggttcttgtttctggcgtagtgttcgtggcctttatgatgttagctgttcggcccttgatgagctgggtgtccaagaagtactcgtcgaagcagcagaagtctatggacgaagtttacattttgttgactttgggaggagtaatggcgtcgggtttcatgactgacttgatcggaatccattccattttcggagcattcattttcgggctgactattccggaagggagtgtgtttgcaggaagactgatagagagaatcgaggatttcgtgacagggttgctattgccgctctacttcgcgtcaagtgggctgaagacggacgtgactaagataagaggggttgaatcgtgggcgctgctggtgctggttataacaacgtcgtgcgttggaaagattctggggacgtttgtggtggccatgctatgtatgattccagcaagggattcgattgttttgggcgtgcttatgaacaccaaaggtttggtggagcttattgttctcaatatcggcaaggagaagaaggtaattataacatgtttatttatttatgtgctatttcttttttctttgcatgcagttttgagtacagtattataaaaaagtatttaaaaataaattaatgtgtgaccgtcagtgatactttgttttttattttaatggtttttaatatgataaggtaattaattcataacaattacagttgaaaaaataagataatatagcgtgcttctatttttttaataagaaattatttttaatgccataaataatttagagccaatataaaatatgtattataaatacaattcatattgttgataaaaaaaaattgagatataatgtttcaaattctaaatgctaaaaatataaaaaccaccaaaaaaattaaaggtaatctatttaggtaaattttcgtataaatagtggccgacccataattgaatttcttctattttagtggtcataagtttgatgttattttgaactttatacttcatttattttttaataaataaaatgtagatacacttaaaaaaagagcaaggaaatttaaaatatgatctccatgtaaatttaaagtattttaactaattgttctacttaattaccacgtatatattaaaataaaaattacatattaatatatttttaaatctgagagtgggctttagccctccatgaatattcctaggtccgcctaagcctataaatatatatttcctgtacaagtttagagtaacttgatggtatctttccgtccccttacaaacaactctactaaaaattaaatatccagttaatcaattcagtgaacatgtaaaaatcccgaagaaaaaagagaatttaatttaaatagatatgttcgaaccaatagattaatttatatttatatatatctacataataatttgtgtttctatttacattaatgtgaaccttataatttaaggttgaccatataaattttgagttagtagtatacttagtgttttaaatatcgaaaaataaatgtaaattagttttaaaatatatatagcttttattttcttattaaaatttatataaataaagtatatatcttaaatatattgggtggatccttcatccaatacatgcatcttggaattggatcaattacgtcaaatgaattagggagaattattagttttaaaattcattattatcactagttaacagcatgatgtactaatggacatgttgactataaacattggatgtgaaaattatatactcctaccaccataatatatggtaaagtaattattagttttttttttcttaacaatactagaatatttgtccttttagaaaattaatagtagagtttaatcatttattaagtattttgtttatatgtgttttctttcagtatatccaaaaaaaaaacctcttgtccgtttcgctttgtaaacttgacatttattgttctaaattaagtggatattatttaccaaaataaaaacggtgcatattgtatttatgcttttgtatagcgttcataccctcaaatcaatcaatcataaatcaaaaatatattgtatgtaatttatgctttaaacaaaatttaaaaagattatatagtcatgtcgatcggaaaatcaaatccttctactcaaaaaacaacataagtataaaaaatatcgggtaattaagtacatgtttggcattgttttgttttttagaaaaaaataaaatgtattcccatttatgttttataattccatgtaattgtttttttttacggttaccagttacaatttaaaaaactttccaataggtatagtattgaaaataaaaactcaaaatattttatttacactattttatattttttttatatattat

SEQ ID NO: 297976 - DNA, 3169 bp, Cannabis indica
acctaaacctaaacaaacaaacagcccattacaatcttaaaaagataaaaaaatataattaataaggaattactaaacaaggaacctagtatactaataaaatatacatggcttccatattaaatccctaatatataatattatttaatatcataatccattaataataattaatatagagaaacgactcaagccaaattataattcatgcattaattaacaaaaccacacaccacacattcccactcaaactccaagagccacgccatgcagtggacgcttcatttcacaagacagcttcagaacctcatcgagatcaacaggctggatcgggtcctgggcccacttgaaatggcgaactagatttgccacccaaagggtaacggtcaccagcccgagattcttccccggacaaacccggcgacccgccccaaaaggagccagacggagatcgcagccgcggacgtccacgtcagcaccgccctcgctctccatgaacctttcgggtctaaagacaagtggatcctcccacacgtgcgggtcgtgggtgatggcccacatgttgaccatggctacggtgttggctgggatgagcatgccgttgctgagctggacatccgatgtggacagcctggcccaggagagtagtgggcctggagggtgcaccctcaaggtttccttaaccaccgactgtaagtaaggcaagctgctcaactcggcgtctgtcacagctcttccgtcaccaaaggcggcgttaatttctcttcgaagcttttcttgtttatcggggtttagaatcaactcggccaacacccactcagtcaataaagctgtcgtatctgttcctctaaaaatcatttccttcatgacccaattaagcaaaattaaactcatcactattaattatcaaggtaattaagtcggtcgttataagtaattaattataatttgaattcttacccacagcacagcgatcatgtcatcctcttgaagcttctcatccccatccaaagagagcaatacatcaacaaaatcgccgtgatcttgaagctcaccgggattgttatcatttctacggcgtcggtgttcttcgatgatgactcggacgagtttcctcactcggggaacgagtttagagcatctttcgacaatacgaaaagggtcgtagaaataactgagccatggaagatggtcagtccagttgaaagcacccaatagatcgaatccttcccttaccatatcctgaagctcacttagctcttcgctgtctatgttaggatcatatcttttaccaaacacacttcccatgatgttgtttagggaagcagcttggaggtgcttccttaaggagacgacaccatttttcttttgctcgtctgctatgttacgcagcatggcggcgcattccagctgacgaccgggttcatgggctaaaatacgcctgggagagaagaggtgcgttgaagcgattctcctcagcagtctccaataagtcccgttaggagcgaagccgatggctcgcccgaacataagactcttagctgactgcttcagtggccggtcagcgaaatgaggagaggtcagaatttctctggcggtatgagggtcgaaagccaccacgatcggggtggagcctaggctgagagccaaaagcttaatgttggctcgactccaagccatgtaagccaaggtgcgatgagctaagccacggctgagtgtgaaaaggctcccaaaaataggtaatccacgaggtcccggaatggaggtaaggcctctttggttcctcccgttcttccatgcaaggccgccgggtgtgaaagcccacgttaggagcccagccgtgagaaaagccaagccgaaagagagcaaaacgtagccgtcaagaagggtttccgagccaagaaaggcaggcaaagtaaacatccaccagctagtatccttagtaaccaggttgttcatagtctccattgtttcttatttctagcagagagaagatatagagaaagagagatttttttatcaagtgtagttggtgaattaaaagaagctgagcgagcaagacttaaatatatagaagggcagcacaattacgtgtccttttataaacattaaaattattaataataataataacaataattttcatatgaaaaaaataataataaaaaaaagaatgtaacctttgttatttatttattttatttaaataaataaataaattattgtggggtataaataatattgaaaatggtattaataatagagagttgatgttgcaaaaaaataatatagagagtggaagtcacatgacacgtggcaggagagagagaagagtatggttgtacatgaacgaaaggaaagggggttgctcttttgcatattgtgtggttggggtgagaactgagtactgagtagagtgcgttatggatgatgatatgcttgaagagggcaggttcagtatgttctgcagtgctgggatagtcattaaatgccaacacatttttttagactgaaaacggcgaaccaatcgccaccaaatattttcatcataaaaattaaaataaaataaaatatagccactaatgtaaatattttatttttctttatttttttatatgttttctgagaaaatgaaatgaagggaagaaataaaacaagtaacgcttgttgttcaagcaacgccttgagagatgtgactgattctgaaattgaatgtgggaaaactgaaaacagagagcccctgatagagacttaagagagatctatttctttcttcttatttttctctaattgtttttctttcctcttttcaattagggagaaatatgtatttaatttcacttcttgtaattaaatataaatcttaattattgtcccaaaaagaatctgaatagtccatactccataccttatatttactccgcaataaatgctctatattttacattttcttttctcgttctttttaacatttactaattaatactgtatttattgctcgaccttaagctgatcttgtagtaccgttctcattaaacttccactagctggtaccattatacacagtctccattcatttttcattagtgtcatgtttggtttattattacaatgtttgatttaattttaaaaataatatattaaaattacaatataataataattacat

SEQ ID NO: 297977 - DNA, 2821 bp, Cannabis indica
ttgtatatttatttatttattttgaggatttgtgattgatattaattcaatcaacaaatcaattaggaaatgcattatgtccattgtccatgtccaacttgacccttccatgttttcatagaaacgacagcaagaaaaatgtgttttattccgatttttacgttgcacgagcaagtctacacaattggaccctccactgtcaaatcttatcctcaccttgtctccaaagagaatttttttttctttttatttatttattataactatacgaagttggactaagtttcatgcttccaaaacaaaccaatttagttaatgagttcgagcttgatgtatatactagttcagtctggttactaaatttggcaccaaagaataagagacgataactgtatcaagtgttactgatgccttccagacttgaaggaggaaattgaatatgaaaatcattacatttcctaataatgcagaataagtctgtcaattcgaaacaggatctctaacttgcaataattagagcagagagactaaaagatacaaacatagccaatgtgtatactttcatccagggtaagaatatgaaatttctagcaattaaccaagtatacatcatcaaatgaaaaggattttaatactgaattttcatttatgttcccttttctcgtgtactttaccatgatcaatgacacctttattccttacattggtggaaacaggcttcgccctatcctcaacagcaaagacttctgaatggattgatgttcgagaggactcagaatttgcaggacttgcttctgggcaacaccccgttggtgttggaactgacgtagaatccttttgtgtgctgggatttgaaaaattaggaaagttaaggcgagcaccagaaccatacatagcccttgcagcttcatcataggcaagtgcggcatcaatggctgttgaaaatgtacctagccaaagcctactacccctatttggtgcccgaatttcagaaacccacttgccccaagtcctctgcctcacacctctgaagttacatcgagaattctcggggcccctttacctttcatacaacctttctttgatcccttggctggaactctacatgttgttggtttaccatcatcctttgatgaatcatgaggaccattgcattccttccatttggccagtgtcttgatggcaacagatttacatccgtcccgtctagattggttttcctccaacatgagcatgcaaactgataattgggtttagtgttagttttagaagacaaatgggatagcctgtatcacccaaatgaatcgccaacttttccaagaagaaagttcttaaattatgcatataatatcaggttgtacatacatattcttagtaaattagtaaagacagatactcaaaaagggaaactattacagtccagcattataatttcttctttttgagtttctgtcttgacatattgaaaattgctcgctcaaagaaagaagttgtcttaagattaacagtcaacaaacacttaaagaagcaacccatcaaactaaaatattgtaattcccacatggcagagtattacactggaaaactcttctttcagtgagccgtagaacaatacttcatctaacttcttctgaaactactagtcctaccactgaacaataaaatcttcaagagttaagaagttctagtgtgtgtagctcccactggaatcaaacctcacaaacctcaaactaaaggcgtgaccactcagcttatcttttctatccttatcttttctacttcttttacacaaaagaagaacgttaaatatatgaaacataaccataaaaaattttacttgcttctggcttaaaattgtaatcattatctcattcatatcaatgtgatagtggaaaattccaaagaaggaaaaaggttcatcaataacgcaattcctagtgttgccaatttcaagaggtcatacaagtgaaaagaaaacaagcaaggagaccaaaggagataggagacaaacaacggttatcaagctataaataagtacataagtgagaataaagccatatagaaacgaataactggttcagcaattgaattttacaaatggattggtatcagtttaccatgttaaagaacagcaaaattgagtaaaagatgcaaagttttaaggaaaaaaaaaactaaaaaactaaaaactttacctttccttgaagagcaggaccccaaggcttgagttccaatctcgggtattcagaatggaaactaattagagttagggtttcattgaaacagaaatttggcgcccaaggttggcagggctgtcgataatgacaaagcacgaaccagaaaatgcctctttggctattttctgtttattttatttttttattattattatttttcttttttttggttacacttttttttaaacatttgagttagcttagtagtaataactttactccaccaaaccaagtacatctctttaagtacattttatttaatctattttatccaatgtaaagcatggaatgtgtgagttacaaaaattttaatggaaaccatccaaaatttaataaaaatatgaaaaaactttaatcaggttaattagattagtttgaatttattgagtagattgactttatttttaactcgtccaggtatacaaattatgcgagttatatttctattgaattttccgattttgtttgtgcgaatcatttaggttgggcagtaaatttatgtataattctacttattccaaaaatatcaacttaatggccccacagttcaagtctaatgaaaatgtaattttcatgttacggac

SEQ ID NO: 297978 - DNA, 3755 bp, Cannabis indica
agatcctggtaaaataattcccaacattaacttagtcaaaaagcggtactttatattttgaaaatgaaatatgagatatttagattttaaaataataaagatgataattgtctcatcgactcaaggaaattgactcaatagcaaccctaggacagtaattaattgtgaagagtgttatcgtggaataacttaaataatattttatgtgttttacttgtatgcgctcatgaataatatgtacaataattcttaaatgatattcattatccaagtataatcattacgtcactttatttgtttttaaaatgtctactatgccaaaatcacttaattgctttactagagattaaaaaaattgaatggtgaatatttccttaagtggaaatcaaatattaatatgatgttggtttatgagaaccacaaaactttatcttagtgagtagtgtcttcgtaagaactcatatatagcacatgattgcacttatacatgagacaaagacaaatgggcctatcctagacaagaggactcaaggcaatattattcttgagtcgctcactcattgcttcagtgttcaagacaagctatagtttaacatgactcaataattgaccgacttgatactatatttgaaaaccttaataagaataagtctaatgaaggtgagtcaaacaatgttgaagcaaagtccatctctccttcttattcggataagaaaaggaaattggacggtaaagatagtagtggcaagcccaagtcaaaagccaataagaacaaagtcagtcctaagtccaaagaaaaaaaggcaaaaggtaagaatttccattatggcgtaatgggacattggaagagaaactgtaacaggtatctctctgaggttaagaaaggtaaatgcaatttatttgttcttgaagcaaacttggaggatgataaatccttaaggatcgttgatcctggagccactaattatatttgttcttctatacaaatacttgaatcatcaagagagctagccgatcggaaggtggctatgtgcatggggaatggagcagaagtgttttccatgtacgttggaagagtccatttaaaatttaataataaatctttgctattgaacaatatttattttattcctgaatgtaccaggaacattatttctttgtctcttttgcataaaaaaattttcaatattggttttattaataatgagattattatttccaagaattgtacccctatttttttgcaaaatagagtaacggactttgtgtgctcaagccatgtgagaaattaattttaattaatgaactatttagagtaggattgcctcaacaaaataaaaagataaaggtttcttataatgatgaaacgtatttatggcatctacgtttaggaaatattggcttacacagaataaactggtcaacaaagggtggtcctttgagagaatagttgaaactattggtatgtgaatcttgtatagaaggaaagatagctacaagacctttttttgcaaaaaagtaatagagcctaagaactacttcagcttgtacacactggtgtgtgcaaacctattaatatttaagctcaaagttgttatgaatattttgtcactttcattgacaattattcaagatatggtcatacttacctaatgatcaagaagtctgaaacttttggaaagttcaaagactttaaagctatgcctgaaaagtagctaggtaaatcattaaaaaatacttctatcaaatcatggtggtgagtatttggattgcaaattaaaagactatttgctgaaataaggggtcttgtcccaacttacaacacctgggacaccttcgcataacgatgttgttaaaagaagataaaaaaccttggtagacatggtcagatcgatgatgtactactcatcactacaactaaacttttggggatatgtacttctagcggctaccaacattttgaatgtagtagccttaaaaagcataaacaatactccaatgaattatgtaatgggaccaaacccagtttgaaatatttccatatttggggttatcttgctcatattcttaaactcaggatcgggaaacttgctcctaggactgaagtgtttatgttagtaggatattcaaatgaaactcgcggtcactacttttgtagtcatcaagacgaaaaaagtatttatatcaacaaaggctacttttcttgaacatgactatatgaaaaaaaaaagccaagttgtcaagtggttatcaaggagatcagaaataataagatatctgaatcaacgattttcgcaccattagtcgaacgacctatagtaattaccatagttcttaaaaacgaaaccctggtacatcgttgtagtggaaggattgtgagacaacttgtctactatgaacatgaagcacatgttcttgtctctaacatagacaaggacgatccattaacttacaaagaagcaatggaagatcccgaattagacaagtggaacaatgccacggatcaagaaatggattccacacacacaaacaaagtctgggaatatgaaactccacctgagcatattatgcccattgtgtgtaagtggattttagagatgaagataaatgctaaagggaaggtagagacctttaaagctaggcttgtagccaacggctacacacagggagaaggcgctgacaatgacgaaacctactctcctatggcaatgcctaaagctattcgcattcttctttccatagctacaacttatgattatgagatatggcaaatggacgttaagaccgcttttctaaatggcaatcttgatgaagtcatatatatggaacaaccagaaggatacgtgttaccaagggtagatcgaaagttgtgcaagttgcttaaatccatttatggacttagccagccttagatcttagaatgtcacctttataagactattaaagagaatggctttaaagaaaatgaagatgaagcctttgtatacaaacacattaaatctaatattgtggtattcctagttccatatgttgatgacattctactcattagaaacaatgtagaaaggttattggatgtgaagaagtggttagccaataacttctaaatgaaggatttgggagaagcaagctatgttctcgggatcaaaatctatagagatataatacagagaacattaacactttctcaagaaacttagattgataaggtgctagaaatattatcagtggagaattccatgaaaggactaccgtctagacattgaattactctatgtaaggatcaatgtccaaagactcctcaagaggaagaggaagaggacatgagaaagtacccttatgcatcaataattgggagcttgatgtgtgaaatgttgtgtacaaggcatgacaaaagctacgctgtagggactattagttgttaccaatctaatccatgttttgaacactggagaatcatgaagcacattctcaagtatcttcaaaaaaatgagagatctcatgcttgtatattctactagagagtgaaaccctactagatataatgatttagatttcaatcagacaaagatagttaaaagtcgacatcagcgtcagtatttactcttggtggagcatctatagtttagaaaagcattaagcaaattagtattgtggattcaaccaaggtagtccaatatatagtagctcgcgaagtagctaaagaagcagtttggttgaagaaattctacacatctctagaagtagttccaaaa

SEQ ID NO: 297979 - DNA, 6451 bp, Cannabis indica
ggtattaatataaagtgtgcctttttttttaattatagtaaatttgtactcaaatttaatatgtagaaaatgtatatatataacttcaaatttcccttcaaaattggaggtttgagtgaattctcttctctctccttcaattcctcaaacaaaggaatttctcatctgctcccacctctaatttccatccttctatttctcctactaaacatagtgaatgacgtaagagattacgtttaatttgagtattgctttcagcaattccgtctaatttttttcaatttattttgaacgcttaacttcaattatatatatatatatgtcctttaaaccatgacaactcattaggtgtttttttcttgcccaacttgactatgtctatgtcgatactgttaacacactgaacaatgtcatttaagtatcacaaccatcaattaaattggccaagtcatttcaagtctattccttcctcgttgcaaatgagaattttgctgcttcatcctatgtattcagctaacttgtagagaaaaccaattaatatgggaagcaaaaaccatgatcatcagcttcatgtagtcttcttcccttttatggcgcaaggccatgtcatacccaccattcacatggccaaactttttgcttccaaaggtaccaaagtgaccattctctctacttctcacttcatacctttcatatccaaatcaatcgaaaacaacacttcccaaatcgacataatcaacatcaaatttccagctgctgaggttggattgccagaaaatgtcaatagccttcacacaatagatcccgaaatggtacaaaagttcttccaaggttgtggaactcgcccctcaactcgaccaaatattggaaaaacatcgtccgaattgtctagtggctgatatgttcttcccttgggctaatgatgttgctaccaagtttggaattcctatgctcctcttccacggaacttgttattttgctttgtgcgctcttgcaagtgtgtttttgcatgagcctcataagaaaatattatctgattcggaacacttctttattcctgatttcccagacaagattgagttaacagccagtcaaattcctgaccctctaaattacgatgatgagagtgaaagtacaaagctgtttgtcactgcaagaaaggtggagagtaggtgctatggggttatagtcaacagcttttacgagctcgaaccatgttatgcagagcattacagaaatgttgtcggaaggaaagcttggcaaattggcccacttttcttaaccgaacgtaaaacatctaattatgataatcagcacgagtgcttgaaatggctcgactcaaagaatcccaactcagttatttatgtgagttttggaagcatggcaagtttcaacgatgaacaactcatggagattgcaacagggcttgaggcttccgggcaacaattcatttgggtggtgaagaaagaaaagaaagaagggattaaagatgagtggcttccggaaggatttgaagaaagaatgaaagaaaaaggattgataataagaggatgggcaccacaagtttcgattctccaacacgaagcagttggaggattcgtgacgcattgtggttggaactcaacgctggaaagcatctgtgtcggggtgccaatggttacttggccagttgccgccgaacaattttataatgagaaattggtatgtcaaatactgaggattggagtggaagttggagctaagaaatggaagagacaggtgggtgattttgtgaagagggaagctattacaaaggcagtgagtaaaattatggaaggagaagatgcagaggaaatgagaagaagagtgaagagtcttgctgaaatggggaggaatgctatcaaagaaggaggatcatctatgttagatttgaatgccttgtttcatgatttgaggtctgctcgtattgcccccgattcaactcatcatcagcagaatttactataagaatattgttcgatttggaaagttcttaacactttgcatgttcattgttatagttgtacgttgaatttcttccatggaaatttcctctttaggtggatttttgttattataaatgaaaaagtgtttaaatgtacatatatataccaatactacattaaatttttgattagactaggaaccaactaaacattcaaagaatttttgaaattttacactaaaaactcgcagtaacaagttcgtcacacaaaaataatatttgtggtatcaatattttttccaaagcatagatcatcaaggattttgccttgaaagtcaaacaatgcaatttttatcaaattcaaactcttataccacaaaccctagtcaaacatatataataaaattcaagatatagcatttgcaatattaaaagtttctcacaaaacttttcaattaaactctaaaacaattaaaccaagtacatggttattaacaattttcttttttacaagtaaagcaatgcaatcatagacaaaaataatggcttaacaactactaattaaaaataaatactaacacaaacgaataagcaacacaaatataactgactaaaaactatacgtccctcccttaaattaaagattcacattgtccccaatgtgacataaaaacaaagagagaaaacttatctcaaatacatgctacatcaatgagcggttgacgcccataataaacatcatgcatgaccacttcaaagttttcattgtgaatgctcacaagattgacatgatatgagtttataccatgtttgaaccaacaacataagatatcgaaggatgagcttgcggagaaccctttggtagctcgtagagaatgtaatatggtgagaatagtattgataaaaaatatagatctattggtggtatataagtcaatattatttagattgagtttatcagtcttaaccagattataaacaaccttagtcaacttgttaatttaataggaagaggaggaattgggtaaactacattaggaagtaaaagagagaatagttgatgatcataattgacctaattaaatttttattgttattttcttatatttttattgttatttgttattatttttcttgttcaaaatcctaaaaaaataaattatatgatcaaatagaatcaaaagattgattgattggtaattgataatcagttttgtgggacaatacttggtcttaccaatatttgattacttaaagcaatatatgtgcacttgtgtagcattatttctgcaacactttcttcccaagtttggactcttatgagtttttcctgtctctttggaataattttcatgtttaactcttgagaaattttttgtttgcctatgaagaatttggtttaggctaaatatccttattaatgagaagaaagtgatccacaataagcttgtttttgagcggagtcttcagtgcattgaactgtatcacaatgccaatagtttgcattctcatatagctactgatggctttaggtcagttattacccacaggtattgaaatgaattatggcgttggtttggatattccaaatgctagagctagttatggtgtggcgttgcaggattcttctggtagtgttttagccacaaccatttggatttttggtggtgtgttgactcctgagatggtcgaaactatagccattttacatggtattgggctttgcgttcggcttggctatgctcatgttatggtggaatcagattgcgtctctttgtcatcaatgtctcaaaaatcattcgttggatctttcttatttttaggttgtattattattagaaatactttagcttattataaccactctaatgatttttttttttgtttaatgttctaaaattgctaatagtgttactcatatattggcaaaactagttctttctctggattattattttgttcagttgcttagcagttatatcagtgtctctcttattgatcaatgttattgtcttgagactcttttctattttgaagtttcttccactatgtttaaggccaaatttttttaataaacaataaataaaaaaagcaaagtttgaattaaaataatagttggtcaagtaatatatatttactttggccagaaggaatgtaaatgggaattaaaaaaaaaaaaatcactagttatatagttgagcaaaccactgtcgccaagaacaccaatcaaattagatggagtaacaatatgacatatgagcttacgttaaactctgtaatatcagaaagaaccaagtatctttcctctccagaaagacaaaaacaaataatatagtatctttcaacgactctgtcctatattgttcttaaaaatatatatgcactcttgactagacatgttgtttataataaaatcacagaaaatagaataggtcttttaacttttgtatgtatcttgccttggtgcaaaagtaggagaagaaaatgatcccaaccattcatttgtcaaacagtaaaagactcctatatatactacaaccctcaactccattgccacagctattactttcccagtacatatatagatatagatatagatatattctggtcagccatgggaagccaaaccaacgatcatcatcagctccatgcaattttcttcccctttatggctcaaggccatgtcataccaaccattcacatggccaaactttttgcttccaatggctccaaagtcaccattattctctctacttcttacttcatacccttattgtccaaatctattgaaaactatacctccatgattgacattatcaacatcaaattcccagctgccgaggttggattgcccgaaggggtcgataaccctcatgcggtggccaaccccagtggcgatatgatacagaagtacttccggggttgtcgacaactcggccctcaactcgagcaaatattagaccaaattcgtccagattgtctcgtggctgatatgttcttcccttgggccaacgatgttgctgccaagtttggagttcccacgctcctcttccatggaacttgttgtttcgctttgtgcgcttctacaagtgtgtttttgcatgagcctcataagaaggtgtcgtctgattcggaacacttctttattcccgattttcctgacaaaatcgagataacaagaagtaaacttcctgagtttgtgagatacgatgatgggaacgaacttacaaaggtgtttaaagcaatgagagaggtggagagtaggtgttatggggttctaatcaacagtttttacgagctcgaacaaggctatgcagatcattacagaaaggttttaggaaggaaagcttggcagattggcccacttttcttaaccgaacctaataataaaatggttgattctaataatcagcacgagtgcttgaaatggctaaactcaaagaaacccaactcaattatttatgtgagttttggaagcttggcaagtttcaacgatgaacaacttatggagattgcaacagggcttgaggcttctgggcatcaattcatttgggttgtgaagaaagaaaaggtaaaaggggttgaagaagagtggcttcctgaaggatttgaagaaagaatgaaagaaagaggattgataataagaggatgggcaccacaagttccgattctggaacacgaagcagttggaggatttgtaacacattgtgggtggaattcaacactggaaagtgtctgcgctggggtgccaatggttacttggccaattgcggcggaacaattttataatgagaagttggtatgtcaaatactgaggattggagttgaagttggaactatgaaatggaagatgaatgttggggatttcgttaagagtgaagccattagaaatgcagtgagtaaaattatggaaggagaagaagcagaggaaatgagaagcagagtgaagagtgttggtgaaattgggaggaatgctatcaaagaaggaggatcatccatgttggatttacatgtcttgtttcatgatttgaggtccgctcgtcattaaaagaatttgcactgaaaacatattttacggtttgggttacttacgtgaatttctgtttaaatgttagaaaaactgtttttaaatataaaaataaaaaactttatataaataaaaatttatatatgtcatgttaaaataagggatgtgtaatagtgagaagatatgttaaaatatgcttttttaaatgatcaggttcctgttgcatgaaaaaatattacattggaattgaaaggctgctgataaagttggtggtgatattcagatgtgggtcaagaagaaggatatatcaaatcctctattggtttggatcgaattcttgattgagtgtttaatcgtgggtgatttcgttcagtttggtgcagggccgtctcaaggtgtgaagaggcctggggcaaaatttaaaaataggcctttttttatataaaaattaaagataaata

SEQ ID NO: 297980 - DNA, 5103 bp, Cannabis indica
aaaataacatttaatttacctttttaaaaaaataaatatttaaattaaataatataatatataaattaataaatatataatttaaatcaattaaattaaattaaattagctgaaaaaaaaaatataattcattacagatttggcgtcagttgtccgggggtaaatggcgtcggtattgagtgtatatggcgtcggttatttgttatgaaccgacgccataaggcacatatggcgtcggttactataaaataactgatgctatataatacatatgatgtcagttattttcgaccctatagcgtcatctgaatcagcatcgagagcaaattttaccataaacgacgttgaaagggcttaaaaatcgcttctaaaaagatatttttgaagtagtgattgatgctaaatagggatgctaatatatatccattggattacaaacaaattaagctttgactgagcggagcagcctgtggaagtgttaattttcttattattattaatgccaaaacttactgcgcatgtactcacaacttcttccacacgcctcctacctcaattttctttgttgataccctaattttgctataaatatcatccttattcttcatcaagttaaccaaaagaaaatttgtactaaactcattatggcaaaccaaaaccaatccttttcattcctactaattttccttatagccatttccacattcaagacatcaaaggcagctggaatagccatttactggggccaaaatggaggggaaggaaccttagctgatacatgtgcctcaggaaactatcaatttgtaaacatagcttttctcaacacttttggcaatggccaaactcctacgctcaacctagccggtcattgtgaccccgccaacaacggctgcactggcctaagctccgatatcaatgcttgccaaggccaaggaatcaaagtcctcatttccttaggcggtgcctcaggtagcgccatgtccctcttaatttttttttacctttttctctttcaaccaagtatttttgaaatatatataaaaaactaattatgatttttaccccctaaactttaacatgtatcaaatcatgtcttctaaacttttaagatcgttaaaaatgccccttaaactattgagattgttggatttaagaacttactattgagattgttggatttaaggattttttttctaattttagtaaaaaagtcaaatatgaatgaaagttaggagctatgatttagtacatgtcaaagttcaagggacatgatttagtagatatcaaagtctggaacatatggtttagtatataaacaatcactgaaatagtaaaattgaatgaaattagataaaaatccttaaatccaacaatctcaatagttcagagagcatttttaacgaccttaaaagttcaggtgcatgatttggtacatatcaaagtataagggacaaaaatcctaattagcctatataaaaatgcatgtaatgaaaaaaaaagctatgtttagggcgattctatcctacaagaaaaaaaaaattatatatagactattgtagacattgttccacggaataaatggtagagtattgagtcatatataagaacatgagctactcaacttatcactaattgattttgagatggaactccagtacgtacagatattttgtacataaattagtttatattttaatggtgggcaggtagttactcactttcatcggctgatgatgccaaccaagtgggggattatctttggaacaacttccttggcggtcaatcggattctaggccgttaggggatgcgattttggacggtgtagactttgatatcgaatcgggttcaggcgaatactgggacgtgttggccagttccctgaatggacatagccaagagagaacagtttacttgggtgcagccccacagtgtccttaccctgatgcacatctagatggggctattaaaactggtctgtttgactacgtttgggttcagttttataacaaccctcagtgccaatatgatgggagtaccgataagcttttaaactcttggaaccagtggatttccagtgaagctaaacaagtgtttttggggcttcccgcatctgaggaggcagctcctagtggtgggtttattcctgctgatgttttgatttctcaagttcttcccaccattaagacgtctgaaaaatatggaggagttatgctgtggaataaacaatttgataatggttatagttcatccataaagggtagtgtctaagaatattaaggaagaattatatatgtatgtttgagtgttattgaataagtcacatatatataataattgaagtgacaccacatatatatcattactcaaattaattaataaaggtatataactatatatgtatcttagaaaatttctgatctcatgtcatgacttaactctctctgggttgatagatgctttaataagagattgatcattttacacttattaatccaagaacaccaaacagcaaaataaataaagaaacgaaacgaatacacatgaaatttatttatgcacatgatttactcttaataattctatcattgtctcttttagttaaaaaaaaaaaacaaaatatatatcattaattttctcttctaaaactgtatattaagaaattgaagtatatactagtttgtggcaatgtgaggggcgtaatttatttatttatttaaaaatacaatgccaaaaaaaattaaaatagagacaaatatttgtttatataatagaatataaactaatgctctatattgactaacaagggtttttgtttgaatgattaagtttagggctgcacataaattgttttactcatctcctactcaatccaatctaatctaattccaacacaactaaagcatagcataaatagcttataatgttcatagaacaaacttattgggttggagcctaaattaacctacctaactagaacccgcgcgaatcctccacctgctcgcttgggccctgcgcgtgggtgacactttgctagcactcccacatgagcggagctcccccttgctcatttgtgagctctcgcaccactagaggatatccccctcgctcctttgcaactcacaccatgaccccttgcttgtctgcaactcccatcatgaataaagctccccctcgctcattcatatccccacgcgacgactcactacccctcgcttgtctatagatcctcatgacatgacgggtccttcctctcgcgcattcatccacattatatgactctgcatgggaatcctccctcaaagcacttgatcactcaaaaggaatctcaaacacatcttctcttatgagtgatcaacataacctagacatcactaaattgctaacggcagtagtggttgtacaatgtgtatatggacctatgataactcttgaatagagagttttttatcatgcttttgagcttgattagttagttgtttatttttccttttttttttgtgataatatgtgtttttgtgttcatttggataatttagagtttttagtattaattataaaatttatttcggtttttggtgaagaaaagattctaaaagagaaaatgcaagtttaatttgttgaagttttacaggaatattgttgttgcaaacactactacaaaatatcatttttcttttgttggtttaaaactgagaacttcttttttttcgtcagttcaaacaaccgatggctatgtgggggccataaatttaggcgtctttattagctgtcggttaaaaactgccactcccgtgtacaaaaatatataaaaagaaaacacaaattttagattcgctactccggatacctagatctgagacacaaaactaataaacaaaaaactcatcaaacaaaaatctagaaccgccattgaacttgaacttgcgcagcaaaaatagaaatatcaaaaacttcttgctcaactctggttggagagagagagagagagagagagagacatgcaaagtgcaggcactactaaaaaattagggtttttctgactattataaatagtcctgtaaagtatacctatcagtctctaagtaagacacctagagtgcacatttttcactcattcttagccatttattagatgaatcagtattgatttattaagttttgttcaaatttgaagtgttttatgtagttgtgtagttttgagctttaaagatgataatactatgaatttagtgcacaaaaataataataatcaaaatatatgttaaagtcaggaagcaaaacgtgcacgaaagaagtcaagaattggcaatactttttaggatatgtcgcctaggtgttgggcgacatgtcgtctgacttacaaaacgtgaatatttaggcacatgttgattttttgaaaaaaaaaagatgaacgttgagaaaataaggttcaggcgacatgtcgcactttcacgaaatagactaatctttgcatgtgttggataaaaaagatagaggatcccaaagatatggtccaagcgacatatcacctagccatatatatcgtcttatacagttttcaaatttaaatcctaattcgaaatggcatcattcctatctttttaagcctatataaataatgatgtaattcgattttggacgataggagagaaataaaaaaaaaactttgaaattagaaaacacattgaagagcaagagaaaagagattccaagcaatcatcatcaactatcatcattagagtcttcttcttcttcttgttcttctccttctcattttccttctcctcatcagggatggtcctaaggtatatggggcgtaaggcgaaatcaaattttggggcctctacatatatagtttaactattataaaaattatagttctagtgcttagtttaatggtaaagcttttaaaaactcttaagagctccaatgttcaatccctcattgctacacattaattatttaaaaaaaaaaagaaattaaaatgtagaggttgggaattgatctcatgaccttctagagagaatttaaaccttttaccactacaccaaataatttttattatatttttttcttatttaaaattttatctatatattaat

SEQ ID NO: 297981 - DNA, 1602 bp, Cannabis indica
ttgcattttgatttctaaaaccccttgttgtattttaaggatttttttttatcttttcaaattacgcatttaaaattgtatttttgtaaagtaaggtaaaataccgaggcgttacagctttggacagagataggagatgaaatcacagaggtcatattctgtccttttcggtaaggggcgaattccagtttatctaaacaagaccaccattaattccctggttttgaaaattgagaccccgacctcaacaacagactatcagcctattgcctgctgtaaaaccttgtactatagtgcatttcgaaaatgatatgcacaagataacgtgaaattttactaaacaatgtcctcagcaactaaggtgtttttattaagaaaaggttgcttgctcacaacgttctcatttttcaagatttactcaaaggctatatgagagaattaatatgctcattgttagatgaaggtcaacttaagcaaggcttatgatactgaaaattgggagtttgtctcaaatttgtttaagggtcttcgctttcctttcaattcattaattggattttggtttgttttgtggcacttcctatattctaatgttgaatggtagatttcatgattcttttaaaggaaagaaagggcttagaaaagggcaccccatctctcactacaagaattccgacttttgccagcacagcaaaaattcacatttaccagcaaaattcagacgttttgctgatgtagatgtattattttttcaattcgaaacacttttgtcaacgcattaatgtgccgctaaaagactcttatgccgacgaaacaaccaaaatttgtcggaaaaagctgaggaacaaaaccgccaaaaggctccatttatttggcagtttattttactattttcgacacaattatttgtcgacaaaggtcttaaaatgttttccttagttttccaattgattttttagtcctaaacatgatgaaaacacttttcctataacactttagaacaaagactgaaaagaaaatgaaaaataaaagaaggttaaaggagagaggagtgaggactgaaaatggaagaccattaaatgactgtcatatttttcattaaaaaaataatattttaattacaaaagatatccaattacccatttttgaatgaaatttaatcctacatacctctaaattaaccctaactcttagatcagttaatccaatgatagagtacattcacggattgaattccttatatcaaataacagaacaaaattgtatccctatatatgtataaaagtttcttatccaatttatgaaaaacattttccatcattttgttttttacaattatcttttataatatatttcttgataaaatccatatcatatattgatccaaacaagttgccaattcagagacatatgacacccaaaccaactgtaccataccaattaaccaacttaattatatgttactcaccacctagtcatttatataattaaagagctgtgacactaataattagtgaaataattaataattatgattgcagtgtgaaagcttgaaaaacaaataataagagaaatttcctcaatttgattaaagtctttttt

SEQ ID NO: 297982 - DNA, 950 bp, Cannabis indica
acatttgatgataatattgatacatctcaataaaaatatccatttacattactacacctaaaattcttatcttatatgaggtgtgtgaaacctcaaatgaaagtgagggacttcataagtcccctttaaataattggataatatatattatataatgttccaattatgaataagaggatagtgagttataatatggtgatgaactgatgatcattgatcatgtattgtaatccatggaacatggtttatgtggaatgattgagataggttagttgagcttactctctagtagggtttacgcatatcacatgtattttcattgctttttttttgttattattatttggctgtggggtctctttccttcttttgtgctagtatatatatggtatttaattataattatgaatgtaattatcataactgttattattactgggtagctatattttatatttcataataatagtactctatatttagccaaaattatttagttttattaaataataaatttaatactttaattattttttttttacaaaacaaattcaaaattaatttttaatatgaaaagatataaatataaatataactaatctgatcataaaatataaagtacgaactcatattaatgtatacgggactatagcccccacttgaaaaaattcatttaataaaaaataaacaataaatctttttaatttaataattatctaccacaatagtatataagccccaataaaagttttttataacaattaaatccctacaacaataataaatttattaaaattgactttaatttttgtttaaaaaaaatataaatatttgtttctaataattaggcctctgctataaaataatataacataatatagaatagatgagaagaaagaagaagaagaggaagagagaaagagaaagtgaatgagaatttctgagttgtt

SEQ ID NO: 297983 - DNA, 6792 bp, Cannabis indica
gatgattttagcaatgtggaacagctgttagagactacttttctatagtggtgaccattgacatctttcccttcatttattttttcaggttagcccagagctatatggtgacaactatcctagattctttacatattggacagtgagtttttgtatatttatttaattaatttttggtaaaattcaattatgctcaatttaaatggatggtaaatttgttcaatgcatgattttacagacagatgcatatcaagctactggatgttataatttactatgctctggttttgtccaaacaaataacaagatagctattggagcagctatttctcctaggtcatcttacaaagggaggcaatttgatattggtttaatggtttggaaggttagtagtttaccaataataacactactaaaattcattaataaactacataaatataggtcatatcaacaactaaaattaatataaaatcttaactagtcataatatttatggttttagatctataacaaaaccattagtagtatctttatttattttttattattatatcatttacttgatcatttgatgccttactttattctctcaaaaagttaaaacaaagaaaattcatttcatcctcagttaataataatattccaaaaaaaaaatacctctttaaattctctgttgcaaaatttaagtagttagtacaagtaatagataataaagacaatgagggctacccatgagaagcaaaattatcatgtttgtaataattatgtcttcaatctttgacaaactattgatcttaaaaagagaaaagaacaacactttttaagatttataatttttttcatctttgttgaataattaaaattataatgatgaataatcaggatccaaagcatgggcattggtggttggagtttgggtctggtttattggttggatattggccagctttcttattcagccatcttagaagccatgcaagcatgttacaatttggaggtgaaattgtaaatagtagatcttctggttttcacacatccacacaaatgggaagtggtcattttgctggagaaggttttgggagagcatcttattttagaaacttacaaattgtggattgggacaataatttgttacccttgtcaaatcttcacctcttggctgatcattctaattgttatgacataagacaaggaaaaaataatgtatggggtacttatttttactatggaggtcctgggagaaatgtaaggtgtccttaaataagcaaaaaaaaatgccattagaaattaagatatagaaaatcagtgtcttttttgttttgttttgttttgtttttggttattatttaacaaaaaataagaaaaaaaaatctgggttttagtttttgttgttaggttttgacatggtttgggtgattttgatatatttcccattataatgtattccttttgttttttggaggggtacctctggctttgtaaatttggggaacatacaccaaagtgttaatagtactggtttgtgttatataaatatagtgttgggactttttctttgctttataattccttccaagataaaaataataatttacaggaaaaagaaaaagaaaataataaaggtgggccttagaagaagatttgaacttgctcactaaaccagtaaccctacatgggtattattgtcattaaagtccaatttctttttttattatttttaaagtaaagaagaatgcaaagttttatactttattggtaaaataccatactttaaggcctagcatgtgggcacaacaaagaaggtaaattattgttttttaaaacaccagcaggcctaaccaatgaaccttccaaacaataccatttactaataagtaaaatatttgtttcaaaatttctaaaactagaattaagtgcaataagaatctcagtaaccataagaaatactttttaataacagtcaaagacatgttcatttaattcacttacagacttgcagcctttcccatgtaagtttgtgctcttcaaagtggacttcttttagtactagtgcttcaatgttcttaaaattttaaaacattttttttctacattaaatataaaagggttaggttcttggctctttagctacttgtatggttatttagcaagtcaatcttagttcataaatatttttttagtaatagatatatcccaaaaagaatctttcttttttgtgaaattttgagttaaaaaattcttgcaaagaaaacccttattgcataacagttcatacagtgataatattgagcaaaagatgacaggcacaagggaataagaagccagcacttagtgggtctaaacaagaaaaggaaaagcaacacaaatgctttaaaattggagggagaaagaaagagttgttacttactctaataaaaagctggtcattttttgtaaatttgtttgccttgattcaaggtttggacaaaaaaatattggtcttttttttaactctttaaagacgtgacataaaaatggcccatatggattctgagacatgttatgttatgacaagaacatctcaaaacaattttaaaaacctgatttttttttactattgctttatgttttcaatcactaatgtcgcctaaatatgttgcgagattccaaaataaactattaagtagggtcagctgctcaactggctaaaatcaccatatgattaataaccagtcaatatagaaaaaaaaaaaagtagcaagtataaagaaaaaggtgaaaagaaagctaacttcagtgaactgcaatgatacattagattagaattgctgggagaacaaattacaaacactaaatatatccaaacatgtatacataagcctcatatttgttgtttcttgtggatttaaacactttgcacatgatatcttcaagtcaaacatttaatcatgaaacagctaagttcaactagtttagaaagcagagtaattgccttgctgagatgaccttaaagaattctaataaaatggtctataagtttagcaagatcttcaggagtagagacctcaaaagtgtggcctttaatgatatccaaatctcttatatcatcaaccagagacctctttgaatgataatcactagtttgttgactgtatatcaccccatatgttttttctaaaaccatacaaagtttaatgaattcagggttactaagagtttcggtagaattgaaatgggacttatgagtttttgtcagcccttctaaagaattcaccttcagtgcaatcttttgtatagatacaaggttagaagtcaactgctgagccacaggggacatattacagaccgaacgttcaccatctccacgtagatggcaaatttggaccaaattggcaaagcataagcgtgccaagaaaataaggaaatcatagaagttcatgcctgccaaaagtcagagcaaccaatgaatatcatttaaggatcaaatcaagttgacagagtaactaatggtgcaatgcaaatgattggcagtcaatataaaagagaaatgttcatcacaattcactttatagcattatccagagtcgaatttttattgttgccaaacaagtcattttagtgaaatccaccactaatcttctttttcttagttgccgttataaacacgttgttatgttgactatgcagtttatccagtcgtattataaagcaactctctttaaaaaaaaaattacaagacaatttgaacagatagttttattatgtgagagctaagctctctcactgaatattctacctttatatcttatgtttcaatgagttcatctagcatacaattcctattttaagggtcacaagaaacttgcagtttacctgtgttggccgcaagattacgctggcagagaccttcaaagtcatcacatatatccttgatgtcttctatgtattcctttgcctcattgtagtcctttaaaagtagatcccactataagtaataaaatacatagggatagatgttagtggcagaacattttgcttaataaattataaacacaatgctaattttctaaaccaagcaaacaagtattcggcagtcctgttgactcaccacccaacaaaggttatagccattgaaccagttgtggtttatggaaatggtatcttcctgaaagcattgaaattgcatatcagataacatattgtgctcccacaaatctagagttcatactgaaacaaaaataaaacaaagggttttgacttccctgagaaagaaaatgaggagacagagatgtcaaatgggctggggctgcatattgagcacatttacatgtttgtgttatatgtatataatttgtgagagttgcagcaatggttatgtataaatttatttaggcagtttgtaggtagttatacaaattaaaataatatcattatgaatagattttttttagtaaatttttctattactattcttaacaaattagttatggaaagtgattgaccaaaactatgaaaacaaaactgatggactcaattcattaacttagtaggccagaaatgagttagcccagtggactcgtcggtcttggcacacatatgagatgtgcatgtatccttgggtagtgataaccaacaaacaaacaattgagtcagatagagttagttggtgttagttgaggttaagtttagcttattgagtttgtttttgtaacaaattgtatccctttgtattcattttgagagtataaatactggattattcaataaagaaaggaaaacttttcttcaatcactctctgttctctctcttcttcttcccctatttcacttcttcatggtaacagagcctattgactaacatcaatggcttcctccggtgaccagtcgtctcaagctggagccaccgatcttactgttgtgccagctcagtcctcctcgatggtacaatcatggaatcctttttcaaattcactcacggcttcactcactttaaaactcgatcgcacaaactttctctcttgaaaatctcaggtcatacctattgtcataggtcataatcttgatgaattactctttagtaatattgctcctccttcgaagctcatcattggccatgacaaccccatagtcttgaaatggcgttgcaaagatcagttacttttgtcctggcttcgatcttcaatgactgaaggaatcttggccacggttgccttctattccacgtcgaattctgtttggaaagcctaggaacagaagtttgcaagtcaatcgaaagcaagacttcttcagcttaaaggccagttgacaaatcttcagaaaggtaatttgtatatttctgattaagtcgacaagatcaaatctatgtgtgattccttggctataattggacatcctgtaaatgattttgacttgtttttgcatctacttaatggacttggtcccgagtttgattttgttgtgtctagcattacttctcgaagtgaaactctctcacttgaacttcaggctctcttttgatgtctcatgaatcaagataggaaagacactctactgtcttggatcttttaacaaaaatggcaactaatcttaccatgagatcaagaaatagaccatatagaccttttaatggttcaggaagaggaaatggatcagaaaatgtatcaagatttccaaatcgtggaaatggttttcgacctggcaataacaacaaacctctttttcaagtttgcatgagatttgggcatactgctgcaacttgtcattacaaatttgacaaaattaggtcactccaaaggcttccacaactcagcctcaagctaatcttactgagcaatctcttgattatgatcctcaggcttttgtggctcaaattgtgccaaattttagtgatgatattggctgatatgtagatataggggcaaccaattatatagcacattcaattgacaatcttaagtccgctactccttactatggccatgaaactattgttgttgctaatggtaagaaactggttatttctaaaattggtacagccactctttcctccaattcctattctttaaatctaaattttgttttacaagttccctcaatcactaaaaacttagtcagtgtgtctaagcttattaatgacaatgatgttttcttgaaatttcataaaacatgttgttttgttagagacaagaaaacgagggcagtcttactcaaagggaaaattaaggatggcctctacctttgaggagatgatagctcgagtctttccaatacagccttgtaggtgcatcttgcaacttcagattttcaatccaagcctattttttgtcattctcagtcttgtaatgagtgttgcactcaaactgatcattcagcttctacttgtaccaaacaaaatagtaataaaaatatcttttttgcttattctaatatctctaatcctgttgtctatctttcaaattctgttaatgacattaatgtttggcataccaaacttgatcatcctgcacttaacattctcagcaaaatcttaactaaagcaaatataccacattctcttaaaaatctgaaattttgcaaagcttgtcaatgaggtaagatcataggctgccatttcccttgtctcaatctcgagctaaccaaccccttgccttggtgcatactgacgtatggggtccctcccacattccttataaagaaaactacaaatactgcatagtctttgtggatgatcacagttggttttcctagatttttcctcttactttaaaatctcaagcctttgaaacttttatcaagttcaaaagtcttgca

SEQ ID NO: 297984 - DNA, 6734 bp, Cannabis indica
aagtcccggcaacgaatttttttcttctgttttttttcccttttcatcaaaatttgttaaaacgatgacgttttaaaacaaagttatttcatttgcagaagcagaacggtgcttttccagtttttcccacattacatctttatccaacttctcaatatggacaaacaatttctgtaaacaaagaaagaaaaaaaatatcctttaattgctatgtaatgagaagtagcactctccattttcatgatgaaaaaacatcaaaaacaacaacctttgttttctcactttttcaccattaatattaaatctcatttcactattggtctaaagcctaaaactcactataaagagacaagagaaaaaaaccattttactggtcacttgccaagcctaaaattctaattggattaattgtgataagagacaatgtatatacagctaaaatgtgtcagattccatttgctctttcctatcctatttttcttttttatttcaaataaagaacagaactttcatttcatggttcttaaatccttaactttctttatcattttagacaccattttcaaaaaaaaaaaaaataacaatgagtttgaaacttttattgttgatttcattacttctccaatgtgttacttcttcaatggttgaagttgaagaagcctatcttaaatgggtgaagcaaattggttcattcaaccactctttgtttcaaaaaccaactaacaagtttgatccttgcttaactatacaagtgagtaaaaacccaagattattaggagcttttacttcaatccaaaaggctgttgattcaatcccattagtcaatgaatgtagagtggttatttccctcagtgcaggaatttacaggtatgaaataatgaatataacactagctttactttgttatgttcttttgctcactttcacaatattaacatgaagttttaatgtagagaaaaagttgagattcctaagactatggcttatattaccttggaaggtgatagtgttgaaaataccattattgaatgggatgacactgctgatagattgggacaaagtggaaagcctttgggtacttttggttctgcaacttttgctgtcaattctccttatttcatagccaagaatgtcaccttcaaggtaacccaattttccttatagtatgaaaatgtattccaatgtggattggattccgctcgtttaaagtttttgaatgggatatttacagcataaatacttatttagttcactttgttgcacttaaattgcaaaaattcatatataatttcgttagagactcattatgcataaagtgtgtaacggttgataaaatcatacccgaattcttggccaatcaagctaacaaacacactaatcaacagaatagagcgccgtcgccaccctcgggagcactagggaagcaagcagtggctctaaggatctcagcagacacagcagccttcataagttgcaactttataggaacacaagacactctttatgatcacatagggagacattactttgagaattgttacattgaaggctcagtagatttcatatttggaaatggtctttcactctatagagattgtcatttacatgccacttccaacaaatgtggagccttgactgcccaaaagagagaaaatatgcttcaagagactggcttctcttttgttaactctaaggttactggatcaggtgcactatacttgggcagggcatgggggactttctctagggttgtctttgcttatacttacatggacaacattatcaacccaagaggctggtatgattggggagacaaaaacagagacatgtatgtttcctctctaactctaaatgttttataagcccacattgatttgataatattcttttagagtaattggcggtcaaagcctattttttttacagttaactccttgtgtacgaaagctttagcaaagctaacagataacagtaaaattgaacgaaactttaaatttgctaacgattcactacacaaaggattaactgtataaaaataaaaacataaaaggggttggggccaattactcattcttttaatagagtttatagttgggattgtcttataattgagataaatagtggaagtgatataaaagagaatgctagctactagggttatttgttggtctgttcgggcggcaaaatggagagattgtccagtcaaaattcactttgctttttgttaacctgtccataaaagagcaaaacactaactagaccgattagggtaggattaggtcgattgtgactacacgtcgcaaatatcattgctctaatttcaatggtctgagttgtgttttttgtgtcgttcgggttgtaatttgggcaagttagacaaaaaaagcttgaatatcttcactagccagccacaacaacaaaagtaactgagattttagaattggtgttgttttgtaggactgtattttacggacagtacaaatgtatggggccaggtgctgagtatggtggtcgtgtatcatggtcaagggagctaactccacaagaagcacaaccattcattacacttgattttatcaatggctatgaatggcttccaaatttgtaatagttgagtttgagaatcacacttcatttctataacaaaaatcatttatcatatcatcaaggaagagggacaaaataaagttttttataatttttattaaattaaaaaacatattcacaatgtaaaatacataattacaatatccataaaatcaaacaacaaactatacacgtcaacaaataaactgtacatttgtcatattttccccaccaccatgtttttaagtttctacaagtagagttttgctgctttgatacaatctgcaagtttttaccaaaggattcttttatgtcacagcagagcagcaataacatgatacaaaaaaatattatgaaaaagaaaagaagataatgacaccagacagacgatgcaatgtaccagacaatacggtcacaatgattgaaaaagtgtcacggttgcgatataaccattcttcatcacctaataatgttaacaaattaattgttaaaccaatcataatgcaaaagcaaagttctaaacttcacacttttgtttttctgcctttcttaatgagaggaaattactcagcaacaaaatggatcaagcattcatgagaaactcacctcaaatgcgacattttgataaccatatacaaaagtggatccaaaaggattgcttgtagagccttgtgtttggatagcagcccggccacagtccccaaggatttcctatagtttagtatttatcgtcattagcaaaaaacaataaagcaaattaacagcaatctggtaataatggttcgataaataaatgtgatactctggcaaaacctcaaatgaaaaaagaaaacagtcataaaaaataaataaaaaagaatggcaaaaaagaacaaaaaggaaaaatagaacaatgagaagcaataaagcaccttcacttgctcccactttgtgcttggatttatcctgtgtttagtatcctgatatgaactcccaactgttaaaagaaaaaaccaggttatgttatctcaaattttcaaggtcaaaaattataaaagagaagggggaaaggaacttacgattattaccaaaaataacaaaattgcattttatgtaagaattgaaatcagcatgaccaggatagtttgtatgcaaaacaaacttcttgattttatgagtctgtgaatacaagaaaataatcagagagctgctatccaaagcaagatattcgaagaaataacaagcacaagaggaatacctgcccatcgaataagatgtcaagtcctctggtgaaataattgtagaaataatcaccacaaagagttgtacgtggacgaggatctgaggcagagtgaatgaccatttgatcaacctataaaccaaaagcatgcctgttaattctagaggaactacataacgctatcagaatgatgtaaatacaaatatagcaaaacctgcttttgatgaattccacaaggacgacctaattcggtccatacatcctgcaaggaaaggaaaaagactgagaaagtaagccataacacgggaccaatctccaacaaacaaaaaagtgatttcaggtaaaaacaattattgttccatcaagaagcatcaaccagcaatcttggagaaaaaaaaaagtaaggataaagtaaatttgactcaaacttgcctgaggtgatgcaccgaaaggaatatgctggccaccaacagtgaagtacaattcttccccaagctggcacaccataaaataaattaaatgaaggaaatatatccaactgaaacagaaaaccaacagcatataaaagtaacctaactggtcagcattaaaataacttgcaaaataaatgtcaactgatcactcttcctaacaattgttaaaccccacaataataacataaactacaataaacaattatttctaataataataataaaagatctctaccaacagtcactgcatgataagaaatggaaatccaatagaaagaagctaaccttgatttgcacctcttccatgtaaaggctacccactggtagtggaggagcagatgccttattcattaaagatccaaccccaacttttttgtctgtagaactatcatatacagagacgcgacatgtaacaggtgttgtgccatctggaaactctaatggtagttcagctgtccaacaaaaagtacctgtgttaatcgattacagcttgaattatctacaccaacacaattattcaagtaccttccccatcatggcagcagtcagtatactggtttggaattggaaaagcaaacgatagaccctgaaatgtaaagacatacccaaaatcccagtaagatacaagagttacgcatgcacacacaaaacaaaacatataattatgtctcaagtgtacgtactggatagaatagaaggtaaactcctctatctttgtcataaattccaggaaacgtaggcccaaaaagtgcatatacagctacaaaagtagctagagtcgacggtcccctagaaacaaaaatatgggtcagaaatatacggtataccaattgcatgctcagttagaacacataggattaggtgcccacccaattagagaagtggcatagcgcatttgaagacgctttacatcaaatatttcaataaggcgtaacctctgcataacatgttcacattagaataaaccaaaaaaataaagcaccataatatctgcattatccatccaatctaaaatgcaaacaacacatagaaagaaaagcaacatgatattggtagataaacattccaataaatttatgctatgaaatatacagaaaacaatacctgtgaccaagaatcaaaacgaagatgaaaaccatgatcgggaaagctaataacaatatccaatttcagtggatcctgcaaccaacaaggtacagtaatgtaaaactgttatgcacaaacctgttttctcaaattttccaaaaataaaaaatattcccagttaagaagtccagttgaactgagatgatataagcatttttaatcataaaaaaaaaatcacataaatcatttggtgattgagattttgaaccccacctcatcaaaatgcttaacgtggacaacatcataaatgttaggctgctgttcaatttgagcaaaagcctcgcaaattggcatacctgagcaacattcgattagttttcaatcttcacatacaatcactaaaataaggtaaatgtacttctaagatttcaaacttagaaactaaaacagcaaccaaactacccatcaagagctctttacaacaacaacccatttgaatgaatctaagttctaacacccaaaactacatcaaaaacagtaatcaaggtcgctgatttataacaatcccatatcggtttcaaagatactagagtctggaaagagtaaacccaattaatttcgaaatgaattgaactttaaacgacgtaatagtcacaaaaaaccaccgaaaacgaaaataaaaggtgaaaatagaaattaccgagggtgaaaggtccaattccgaggccaggtcggagatcaagaacgatggcgcccatggccgtaccttcgcaacggcgcctgggtctctgctgctgctgcaaattactcattattatttttttttgagaaaatgataatcgaatcgatatttttggttttgaaaatttgttagaaacgatctccgtgagtttcggcaatggaaaacttaaattaaattcgtaaaaatattaatgaaaaataatataaaaagaacaaattatcaacgggaatcgtaacgtacgttgcctcccctaacacggaacccatctgggctgatacttatcttattgggcctacactgaattttaaggcccattttcatttttatggtatttaagggataaaccgaagatattttatggaaatttgttagggaagagttaaaaaaatgataagttgaaaatacctttttgtatccattaatcaaaaatactcttatattattttttttattaaaatatacttactttttttgagtgaattacctaatataccctcactttctacttaagtctagcatataatttacataacctaagaggtctaatgaggacatcatccataaaagtgggtatatactaaaaaaaatatgaaaatagaggtaaaaattaaaacaaataaaataaagt

SEQ ID NO: 297985 - DNA, 819 bp, Cannabis indica
taaaataatttccaacaatatgtccatacaatataatataatacacaaacgattagaatagccaaaatagtggttgtcgaagtagcccgctggaacacctccatgtgttgcggtcagtgactgctcaacattgatgcatatggaaacaatccacgagattgagaagatctcttcaaggaaatattattcttagaattatttttcttgacgagtatcaaacgagactagattggagccaaaagtttcagctccgacaagttcttaacagtgaacgaatggtaaggaaatcttcaaaaatctcagagcttggggcctgaaactcggcgaaggccatatgggctttaagtctagaggatgacggccagagggggtccatcatggtgggatgaggaagaccaaagatatatatataaagagagagtgcaaaacccttcaggcttttggtgtccaggtactataagcaccgtgatgtggtcgatttggaccaccaccaattagaggtagtccatcatagccttgcaacaccgtgagatgaaaagaaaagagaatgagagactttaggagagcaagcgagtcggggctagggttttttggggtgtggggttcaaatttagggttactttcaccggaataaggccggcaatggtcaattggcctgggcagagggcagttgaacttttgtgtttagaaagttattttgttttttgtgttaaagtgttttcatgcagggggagtattttctatactctttagtttttgtttctaacacttgatatagattttctccaaataaaatattttgtcaatcaaagtgccaaa

SEQ ID NO: 297986 - DNA, 4241 bp, Cannabis indica
tttttttaaccaaaaaatttgagtttttaactttgtagggtccacttaggccatctcccgcccaaaagaccaagaataatagtctttgctttgctcttcttttgtgtaagaagttatttattaacatatagcaactccattataaatacgagaatttcatttcagttcactttaatccaatcaagttatagagattaccgttatttttaataattccaatttcagaagcaaaaatcaccaacgaagtagaaagatctgaatcatctgatctctcaattatggaggacgctcaaacttttcaatcgggtaacttttctttctgctgctttggttttgattttatgtattttattttatttattttttggttttttttaattctgtgttttagggaacaatggcaaatccaagcttcttcgttacgcgttgcgatcggggactaaaacgaaggaggaaaagccttcgagttctgaaatccccaactcctccactaagaggtactttctgcttattaattaattttttttttttgaattctgtatttttgtaattgtttgtatgatctacgaactacgaagtaattgagtttgtagtagttgtttgaggtttttttttttaatagaattttgaatttggtagttttgatagaaagttcataaagttgatatcatcaattcaaaatgatatgagtgcaaattgtcttttaataaaagtaaaccacaccgatcaaggctggaactcagattgtaagaactaaaaattatgatttttgctatgttatttgtaattaaataaatgaaacttgaattttttctcttcgcagaatttagaagcatgtttgaaatcatatatataaaaaccattgaattttcctgtgcatgaaatgttatgagacgacatggactggattatattattttgaatctttcgtttgttgcttttacctggtttcggttcttcatatcgttttatctcttgatggagacgtgcttattgttattatattaaggatgagagttacatcgagtgtaagcaaaagtgttagtgttcttgatctctccggcaaggacaagtctgctaagccacctaggaggctttctattccagccaagtcttctgcaagtccagccccaagactagcgagcagtatcactccaattgcagaggttaaaatgaagaggtctgaaaatattcagaagagaacagaaacaccatttttaacaagatcaacaagccgaaagaagttcagtgttctgtcctcagcctcttattggctttctcagattaaactctccgaatcttccaacaagcactcaatttcacttgggtttttcaagctagccttggaggcaggatgtgaggtacataaagttgtaactttgaccagttttgttttacgacgtttatattagtatcatgttgtagattgtcttagttgttgttctattttctatgcatattgttcccgatttcaaatgctcgagttaattttgaccccgttcaatttttcttttctctcttacgtgatttcatagcctcttcaacgagtgaaagatgagcttgcatcctatgcacgccgtcatgacctagatgatgaacttggagagcctttaaaggaattgttcgggagctataatattgtagaaagttcagcgcagttgcaggtgtctgagtccatttctcaggtacctgaagaaggaagccgctcctctgatgatgaaacccggagcacgtcttccattgtgagtacaaggaaccaggaactgaaaccaaaggcgttgaacattgatgctgctcaagtttccccagttgcaggttcaaccaaaaagaacactactcagaaatctaaccccacaagcagaactaggggatctgtggcaaaagacttggcaaacacgagatctcttactgccactggagccaataataataagtccactaagaaaccccagaaaccaattaagcaagaagtcaaaaaagaaaaggatctgatgcagaaaaagggaaagaaacttgctgataaagaaggcatgtcttccttcttccttaagtttgggagtagcatgtgactgtacatagttcttaatgctcttatgtgattgcaggttcagttagtcctactcgcccagagaatgcactgcaagagaacaaagaaaatatggtaaatcacttcaaacttttggattaaatgttcaactttgtttgaataagttcttttctttgaggctcttacgttggctctctttgtcactgagttggcttgtacatgcaaccttaaacattcttctattctatgtagggggctgcatcagtggaagagatcagtttgactgaggtcatataatcgttctgctactaaaacttggctggacaagatgattgtcacaattgatgggtttgtcttcagtgtttttttaaagtgggggcttttcctatgtatagaaaggattgtattgcaactttaaacattcttctattctatgtaggggctgcatcagtggaagagatcaatttgactgaggtcatataatcgttctgctactaaaacttggctggacaagatgattgtcacaattgatgggtttgtcttcagtgtttttttaaagtgggggcttttcctatgtatagaaaggattgtattgcaacttgcaagtttttcagtctgtgtgtgtaagaaagaacgaaaatttctttcacccttttatttttttttctttgggggattggtttaaacttgaaagtggattgatgtgtgtttagtatttctttatacacttgccgattacaagttaatatagtaaaacatgaatttacactatcattgttcggttgaaagttgtgtagtataatctttgttttgtatagctaaatgataaggaacatataagcaaatacaagttcaaagcaacttggtaactttgtgtcaattgttaggatcacagttctaattccaatctcatcaacttgcacaaacaacactaagacattttcaatgtcaagaacaaatcattaaacatagtaagaacataaaattaaaataaacacaatgaattaaagaggtttcagtttttagccattgatgatgtctcagatggattacaaaccaggagcaggccttgacaataacactactgcaataatccaacctccaacactcggagaaatctctctctcaagctctagatctcaccacatctctctctctctctctctctctctctctctctctctactcacaatctagctctaactaaccgactaacaatttacctaagtggttggttttataggtgagctctactctagacttgacaactagacaagacagtcataatagaaatttaactaacataactaacaaatccaagcggtcaaagtcttgacatattggcaatccgagtgaaaggtttagagaccaataggctagagacatatggcatgtgactaggatgagctaaactaacaaattccaccctagtttattctgtcacaaagaagtagctatgccacaggaagttcagatatccaatctgatcaacatattgcaatgcttaccagtgccttatagtggttgaatttgttcattgtaatcactttagttcacatgtcagatggattttcactagtgtgcaccttctcaatctctaccaggccttgcgtcactttttctcttataaaaagtacttgatgtcaatgtgctttgttctatcatggtacatagggttctcgcaaaggtgagcaacacttaggttgtccaaatttattactacagtaccttcaaacaacttgagttcttttagaatacctttatccattggcactctttatagcctttgttgtagcaataaattcaacttttaatagaatagcggactagagccattatgggttggagctgtgatatctaactaacacagttcccacatacaaggatttgaaatgctgaagtggacatcctagagtccctgtcaccagcataatcagagtcactaaaccattcaatagtgattttttttttccttcttttatatactaagcaatctttagttgtaccaactaggtatcttagcagccatttcatagctaaccaatgatccttccctagattgttcatgtatttgctcaagcaacttatgttgtgagctaaataaggcctggtgcatgttgggttttatgccctaaataaaactcatttcaatataatcagatttacttatagatcagaaataacatttaatgtt

SEQ ID NO: 297987 - DNA, 1281 bp, Cannabis indica
ttggttgatgccactagtagtgttgatgtcattataccagaccttccatcaacgtggaattccagcagtatatatgaggtatatattccagaagtttttgtgattaggccatataatttattcagaattggattgaaaaggttcacagataaagatgtccattttgctttttaagttggttatcttttcaggtggttgactacattcttgttcttgaaggaatgcctcaactgatggattatttgggattgattggcaagccattctcatgcaaaagtgtctttaattttatctcattagctagggcagtaaacttggctgttcatgttcaatttcacctacggagtgcagcatgtagaaatttggtattttatcctcgtactgaattaggagaagatatgggacttgaaagtggaatttatcatttgcttcatgtaactcataaatttccagttctgggcaaggtagtctatctgatctctttgtgtggttgttgcagtgttctagatcattttatttttaatttgaataaaaattatcttaatggaataaaagagagatgtatgtttgagatataatttttacctttcagtactttgtaagtaatccactttaacaatcaacagtttcagggcgacaatattaccccagacaaatcaaacatatttcttgaggctgtcatctttcattggaatttattccttaatgaaaaagatggacatgcaactatggattcaggagatcagttgaagaaacggatgaaatattgtgatggcaggcatcatgatgaacatatttttaagagaggtaaaaaagaccatatatcaagcaaggaattgtcggatttggtagatactccttgtaaggctattgggaaattaaggccttgtttaaattcttctgaatcccgcgacaagcagagcttttgcaactttacttctcaccaaatttcttgttctgcaactattaaaggtgtcaataatcgtagtgtggttcgttcagttatcctgccttatacaggaaccttaaatggttgtggcttttgcagacctagtgcacaaaaagttttgctggagttgaagccagaaagtttacatatatatcaagtgcgtgatgtttcactgtttcttacctgatgaagggatgagaaaacatttcaatttgttttttttttgttgagtaaccatcccacttttatgtaacattgcatttgattccagttcctgcagattggttgctactatattacaaagcatgatggagaagattctttatgtagtt

SEQ ID NO: 297988 - DNA, 4265 bp, Cannabis indica
gtaaaataatttccaacagagtcccccaggaatatacaatagcctataatcgagtgttgggtgttggggaaagtgccctagtcagcatcagaatagaccttgagttaaacatcattgacaaagagattgcattttgcataggccttgagttgagtagaagaagtagagtgagaaaatgacccttgacctagagagcccttcaagtattgaaggatgcattgagaaacgtgaagatgcagttactgtgactcagaaagaaattgactaacttgttaacaataaagaaaatattagatctcgttattgttaagtaaataagtttcccaattaaacttctatagctagtagggtcaaaaagtaactcccatatatcctcgcttatttgagtgttgtgttccattggggtggacgaaggtttggccccaatataacctatatcagttaaaatttgcaaagtaaaaggtctttgagagaccgaaataccattagtaaatcttccaacatctaggacaatgaagaacctcaagggaccaagatctttgagtttaaacttgaaatcaagctgtcttttaaataattcaataccatcagagttattgcttgcaatgataatgtcatcaacatatactaaaatagcaatgagagtgttagtggaggaacgtataaataaagaataagcagaagatgattgtttaaaaccatcattaatcaaggtggaacttagtttagcataccattatcgagatgcatgtttaaggccataaattcttttatgtagtttacatacgtcatataaaggaagctctctttgatgtttgtagcctggagaaagggccatgtaaacttcctcatttagatccccatggataaaatcattgttaatattaatttgatataatttccaattattaatggcagcaagagcataaaggacttttagagtgttaaactttgttattggagcaaaggtttctaggtaaccaatcccaaattgttgggagtactgtttagctactaagcgagctttaaacctttcaatttcaccttttgcattatattttattttatatacccatttacagccaatgaagtgttggccagcgggaagagagataacattccaagttttattggttgtaagtgtaatagtttcagtatctattgcttttttccatatggggaatttataggtttgggaataactgtttggttcagagaccaaatcagcacttaaaatagcagcgcaaaaattaagagaaaattttcataaaaaatgaaatttaagattggatatgtagtggattactcacaaagatagttttggagatgggttgggcgaatgaccatcctaacagtttttttttttttgttgaaattagggcaactcgtaggggctggtacagccgctggtggtggtaacaaagttgtggtcgtagtggttggaatagtcacttttgatggcagcaaaggtgtgctagtggtggctaaaacaactgcttatggtggggcactgatgatggttggaacaactacttaagaaagcagtgatggagcattgatggtggttgggatagcaacttgaggtggcagcaatggaacactggtggtggcaagaattgggaaggcgagataagggcatgagatgcaccactagttgaaacattagtgtgggaaaaaagaatcaatagtgtcatcgagaaatgaatttttaagagaaaaatgtgttcatagaagataacatctctagagtgaaatatttgatgagtttcaagatatagcaaagcatatgcgtgtatttagctggatatgcaatgaatacacaagcacgagatctcaaagagaatttgtgccttgagctctccaaagtggaggcataagcaagataaccaaagatgcaaagatgatggtaagaaggtaacctcttgtccaaaactcaaaagaagatttaaagtgaagtaaaatagacagtgtgcggttcattaagtatacaacaaaattaataaaataactccaatagccaagtgataaatgagattgaaaagcaagagaacgagcaatttttaaaatgtgttggtgctttatttcaacaatagtgttatgtcgtggccttttaacacatgagtggtaggggaaaatacctttgattgcgaaaataaaatgcaacttttctttcgcattatcacatcttttttctttaatggaggtagaaaatttatttaacacataagtataaaattgaggtataatagtttttacatcggatttacacttaagcatataaagccaagtaaatctagtatggtcatcaacaatggtgagaaaaaagtgataaccctatatgctaatggtatgaaaaggatcctaaatatctaaatgaattaactcaaaagcagttgaagccatattattaaccgaattaaatgatagtttcttttgtttagctaaatgacttacatgacatggtaacaaagaagaatcttaataaaaaacttaagagttttattcaaggattcggtaatctagaaagaaggatgtccaagacgtaaatgaaatctttgaatttaattacaagacttattagaatgaacataaccacttgatggaagattttattgttagagaaaaaaaataagatatccaatacgattagcaatctcaatctgtaatgagattaggggttcaaagggacacaaatgaagtttacacaacaatgaggttcagaagggttcaaagtttcctttggtgtttatgttggatgatagtgaaaaataccttcgaaagggatggaaatggctcaatgatcgacacttgatcatgaattgcttggtaagattttttgagcccaatgaggaaggaaaaaaccttttcatgacttcaaaacttaatgttgtcagcgaaggttcaaaatgtgtaagggagacgaggtcgaagctcattgatctcgtcccatatggcccaaagcttggtgaagtaagcagtggcaaatttgtcaccttagagtaaatctgtgagagattcttggagctcaaaaagacgaggaccattcccttgactgaagggattaatgaattcagtccacatctcgattgcagtgtcaagaaacattatgcaactcttaatatctagagaaacatagtgaatgatctaagaaattactattttgttgcaacgaatccaagaatggaaaagatggctagttggagcaggttgtggtagagtgccatcaataaaccctgtcttatttttatccctacgtcgttgctggaagttatgatctgagagaggtagagtaacgaggatcagattgggatgatcgtcagagccaaaaagatatggattatcttcgttggcatgccgatcatgagcaatcatatgtgacgaagaaggaccagcaagattggatataaagccaccaatttaagatctgagattgttaagatggactggatcgacagtaatagacggatcaatcagaggagcggatcttaaaataactgacggagcagccactggtgtagtgtcgatcagatgtggagcagttgaaaaagaactagcaacttaaggaatgagcggagcggagtgcaaaatggcagaggcttcaacagtaaagtcgatcagagcatcaacggtagggacaactagttcttgaacgattagaagcaccacgggaacggtggtgattgaagggatatctggagcagcatcactgacgatagatgcagatgcagagagaggaacaaaagaagagatggtcggtgtagcagtggcacgtggtgcagatggaggaaggggagcgttgcgcgtgcatgccattgagtttggcaagaaaaatgaatatgaacgaaaaaccagagcaggcacaagaattgtggatctggtctaggtgagagtgtctaataccatatgaattagaacaatatctcctttattgaataaaatgaaatcaattaacctataataaatgtaaactatataagtaatccaacataaataatataaaccaaacaaggataacttaatttctatacccaaacactagataagataatctaatatttagtagtctaacttaaaattatttatcattatacttaaacatatatcattataatttttttttgaaaaaataatgttagattttttatttgggcttacattaaactttattggttttattaaaattagggttgatttgttacattaaactatattgttggtgatcaattgttaatggacttagcattctgtgtgtaaagtctaggtga

SEQ ID NO: 297989 - DNA, 6814 bp, Cannabis indica
ataaattattaaatcattcgttaatagaataattgagtactaaaaaaaatattatctaatatacaatcaaaatcacaaaccgacattgtaaattacaattaattaattatatgcattgtaaacaaaatattctaatataatgcgtcataaaatttcccaaaatatcatttatgaaatataaataattatgaaaaacatggacagctactaatttgaaaagataaaataaaaatctttggttttgagtattgaccgaaattccgtgtttctttcgggagacttttttaaccgcggatctcctaaggtaccttcgcaagaaaaaaaaaaaaaaaagaaagaaataattgaaaatccccaaatttataatcaaagtttgatttttgagatttttatatttacgaggccctcatttccattgtccgattctttccaagtttctgtttctttttttcgttatttaaggtttcatcttctttttaaggaatttctagctttattttcgtttgaattcccactaatatcttttttccctttcactttagttattcgatttcatcgaatacaacttgaactccagcaaagattgtgtaagaacaaattttgaccagaataaggtatgttattgtttgtaatttggatatggtttgctttgcaattttatatgtttattgattttggtgggtggtaaacctttggccttgtttgttttgagtaatcgtggtctcaactttttatcttcttttcttgttattgttgttttcaaaggaatttgtaatgcttgggcttgaaatttggcattaattctcagtagctttgtacacaaactttcaaactactgtgtaatgttacccttaagcagagaattttgttgatttattcaattttttgatggtggggaaagtggttttaatttttcgatgtgggtgtttatattttgattacataaagcacactggaaacagggggcaggaattcattaatgaaattttgtatacaaattctcttttgatcttgatactagtgtttgtccattttcttctaatattagatatcatttcatggtgttatgaagtattaatttttataactaagtttcttttagctctcatactataacacgctatgccgggctttgaatatattacattgcatagcttagctttttaccaaacaatttcagtgattaaaacttttaaagtcgttgacctaaaccttcatgtggttctcttggtaaagatttaaacttatgtattttcttatgtgacagatatgcagagccaacttgtgtgtagtgggtgtaggaacatgcttttatatcctagaggagctacaaatgtttgctgcgcaatatgcaacacaattacctctgtcccccctcctggtatgtctcttttctatttccttttcctcagtggaaactttgtaaatatttcacggaaagcttttggggcacaaaagattaaatttgtgaataaaattcgatacaatggtactaaagttattattaatgatgttctgggtgctgtgaaatatagaaagaaagctcaatttctgtaaacaatcataaagagttcacacacttacaaaaagtgcggcaatgtgcatttttaacaattgaaaggatggaaaagatataaattagcagtgatcaacaaaatgatgtgatgattggtctgccaactgtaaagatctccttttctgttggcttcatgctcttttcttttcgtttcttaatccagatatacgaaagaaataaatttggttgttcaagttttgttgattagacaagatatatatgagtgtgacatcgattgtgaaagcaaatggatgttggtaaagttcttaaattgttacatctggagagataaatatcaaagattcaagcaggtcaattacaattacgtctcctagctataattgttatttattttgcaaagaatataacctagttgaggaaagtgaagagaaagtggagatcatttttttattgtttttggtataagcggaaagaaaaaaaatatcactcgtctttttgatacaaaagtaatagatggaagtagctaatgttccgtgttattcataataatatgttatattgcttagaatctttatatatgtgttctttctctgcctgctgtaatttgtccaatcttagaaggatacatattgtggattgattggtgacatcaaatctgtacttctattctgattatcctctgccataatccctccctatgatacaaccataaataaatatcaaaatccacctactaatttctcagtccatctccttcacttttcctgccaaacatagcctaatacattatacagtatattttgcatgagaattctcaattattagtgcatgtatatatgtaagttataaaacaatatgctattaacatgcctagcttcttcccttttttgaatacgttctgttactgtgaaattcttgcagggatggaaatggcacaactaatttgtggaggctgcaggacgttgttaatgtatacacgtggagcaacaagtgttagatgctcatgctgccatactgtgaatcttgcaccaggtgcggtatatagtatagtgcttaagtagtgaaatttgtttctttgtagcatgacatggcaaaaagatattcttattgcctgaatgatatgaacttcacacagtgtttaaatagaattgaaactttgtatcaatcgatgagataaaatacaaattaaaaggaacatgtgaaacacatggtgataagtgataaatgaacctgaaaaccgctaaaaacacacaataatcagagaaagaaagacagcaaaattacaagatattagtccattatttgttaaagtctaagatagagagtccctcaaatcttttggatttataatcccaagtttttatttttgcaagaattataatcgcaagttgctacccagaatttatcttttcccagagtttttcttttgattcatctctgttgtcaatattctgctgcttctgtccagccgcacagcccaaaaaatggtcagtactgctgctgtccacaaagatgaggcccgtctatctcctttaagcttacaacacttcattcagttttctgtaccggaaattctgatcatacatttttggactcattggacatgttctttaaagtagcagttatcctggaagcataacatcatttacaacttaaaattgttatttttttgcaaaaaaatattatcagatgataataggcagaagaacattacaaaagatgataagaattcttctttggatgcataaagagtagcaagtcatctaagattacaaccagagattttattctcagagtaaatcaggaaaagaaaagtcaataagttttcagacttaaagatccacataactgttcaaacctgactttttttttccacaagtgtatcaattttgttttgatgttctgaaattcaactgttcctttcaagccagagttgccaacatagctaaaggagccatgttccaggcctttttccttttacttgaagtgactcctgttcgtttttcccatgacaaggcgaattgtcttgatagtgatgcaacgtcacacaacacttggaacaatcccatatcttagaagagaaaaggcaatgtttaaagaagttgtctctagggccattactttttctgtgaagaactaattgtatgaatttaatgagctgacactggaggaagaatccgtagacatttgctaaaatcatataagctgttctgttcatcatctaattgttatgtgtgctcatatcatttagaaattacctaggaatgtttttcaagtttgagtattttatccttcatacttcttaatgccttttaagaaaacattttgtagttttggtttattgctgccctttgtagtattttaatacagcatttgttaatgcatatgaggactataattgtttcctcgacaactttgttgggctgttccccgcttatcacagtgtacacacatctgctgagtttttcttttgtttgttgtatgattaaaaagggtccaatcagatggctcatgttaattgtggaaactgccggacaacactcatgtatccatttggagctccatcagtaaaatgtgcagtttgtcagtatgttacaaatgttggtgtaagtccaattgaatcttattaatatttcttgagcattcaccatcatgactttgggtggctgccttcccaccttttactgaaaacacagggtgcttattaattgttccttctctttctcgtcttagaaagtagcccttgaattaatttctacgcatacttctctttcaaacccaaaacctaagaacaactttgaagaaacatataaactgcacatattgtttatttttatcattatttgatatctagacatattggtctcagaacaatgtccgtttatagtgtaagcagtcaaagagttgttaatactaattagaaaccaataccaaattgttcattttacttcagtttccactgaatatttattagctcatttcagtgtcatctttgaaccatggttgttgttcacacatgtattttcagttttgacagtccttgttagcttctattctttctctcacaccagtactttttttctatttcagatgggcaatatgagggttccaattcctgtgcacagacccaattctggaacaatgccctccacttcagctgtaagttattaattttcttagattattacgtgacaaaaagtatactataaatgttttctttctcaactgttggtcaccatttgtttgcattccacagccaatgcctcattcacaaagccaaactgttgtggttgagaacccgatgtccgtcgacgagagtggcaaactggtcagttttaaatattcatttactgagtttccattgatagtgccaaccaagattttctgacaatttattattttatccaatctcataggtgagcaatgtcgttgttggtgttacaacagaaaagaaataataaaatcaaaattccaggatgtgctgtaagcattatttggctgggagcaatccatatgttttcttatacatatctatatatagacatggaaattggttgtgtatatcttgtgagagattgacaatggctttcattttttcgagaaccttatatcaaaatatgaggtttctgtgattaaactgtgattgttgtccttatgaaaaaaattattagagtccaaaaaagagtcttttttggtcatttgtgtgtgatttttcatacttagttttcgtatttgattctatatgaatggatgaaaattagaataggttatttattacaggattgcatgtattttaataatttttttcatttgaattaattaataaagaaatttttatattaaaaatataaattgtcattttatttacaaaaatactttcataagggttgtgtaacaattttacttttatttatcaaaatatctggcacacacaatttcgttattattctcacgtattactcaattaatttctctttttttcatatttaatttttgtatcctatattatttttttttattttcatttacatattcaaacttctagacaatttgaataaatatttctccaaaaatcatgaaattcacgatatttaaagatgttttttccaaaaacataaaacccacgattttcaactgttgtctatgatttagccacgtttttcttctggtttttttttttctacgattttttatttaaatgacgataattcgttctttctcttcttcatcttcctttgtggaaaaagttacagttacacatcctcaaattttaaaaatagggttgaaatttatttccaaaaaaaggaaaggaaaaaggaagttagatgattttgttgagctccttccaagaagaaatttaaaatcattaaaggagaaaaaattgaggggagtccaaaaaggggagaatcaagctccttgtttgattgaggtttgtattgtattttttttattattatttttgcaatattttaggttttatcgcttctaagtatggtttatgtgctttgataaatattattttctagtttgttttaggtctgttattgactttcattcgtatttcatattagatggttttagatttttttttttcgtttctcaacttcagaactatgtttctctttttaatggtttatgatacttgctgttgattttgatttttatggttttgagtttatgtatgttgttgaatgcttattgtagtgtgatttgttgtttttattgtttttcacaaggaatccaaataaattaatttcaaaaatgaaataaaattattttcatggaaaaattttgtaattcacaaacattcatcaaatcacacataaaccaacatgaacacatccaaatcaacaaatcatcattttaaattcatatttaggatttaattatatggattaaaaaagaataaaataataggcaaaaatcacactaagtggccagccactataatgggcctcattaattacaaatttgccactttatttcaaccattgatcatttctttcaataatactatattttccaatttcaatcctataaatgttaaaactatttatttaataattataattaattatcaaataaaattaccatttattttatttattaattagaccatacaaagtcttttaattaacaaataaacctcaaaaccttttttctttacaattaagcccttacttagtgaaaattcataaataagaaatagtctaattttagaattataattaattgattaaaaccaattaattgagtctgcaagcagtattatctcaa

SEQ ID NO: 297990 - DNA, 4417 bp, Cannabis indica
aatacttcttgtttctttattgatatttaaatgatagagattacattgaaatagagttttatttagggcataaaacccaaaagaatatgccttctttctccgactttccagcgaagaccagccaacaataattcctgtccccataaaattccttgccaagtcattgatggagagtgatcgggttgagcgtccaatttttttttttttgtgagaagtatcgactcttaaacaacctacttagaagagactctggagtttgaaaaatcctccaagcttgctttgctagtaaggattgattaaaatgaacagaagaacaaaaccccattccgccttcggctttagttttacagagtaggttctaattccgtcaatggatttttgaacctttagcattagagccccattaaaaattagccatcaaggattcaagttgtttacaaaaagttagtggtaaatggaaacaactcgttgcgtaggtaggaatggaatgcaccacaacttttagtagtacttctttgccaccagctgaaaaaattcttctcattccacttgtgcatcaatctccaaatcttctccttaacattactgaaaagctctttttcctccctctctgtataagcaggcaaacccaagtactgttcatgacattcactaattggcattgaaagttatttatagaaaaagacttgagccgctaaggtggtgttgggggaaaaagacatgactgacttttccaggttaatcacttgactagaagcatgatggtatgtatccaaaaccctcttaatagcaaggcatgagttttcatttgctcggcaaaaaaatagactgtcgtcagtaaagaacagatgcgagacagtgggggctcgatgtgtgagtgaaaagctattaagattgcccaagttctcttcatattggagtagtcttgaaaaaccttctgagcaaattaagaaaaggtaaagcgacagaggacacccttaacgaagacctctagttggctatagagagcctgttaactccccattcaattagaatgtgaaactgtatgtagttagaaagttcataataagagttgtccatccatttgcaaaccccattttcctcattacttcttcaataaagcgctattcaacacgatcaaatgctttgctcatgtctaatttcatggctataactcaattaatcttgtgttttattgcattgaccaactcaaatactaccaaaatattgtcttgtataagtcgatttgaaaggaaggcactttgggttttatatatttttgaaatgacattgcacaagctgatggggagaaaatcactcacatgcttcaattttttaatttttgggacaagagtaattatggtcttgttaagatcttttaggtttgcactatcattgagcacactcaaaaccactagagtgaccaaatcatcaacaatgggctagtttcgttgatagaatctcccagacatatcatcaattctaggactcttgtcatggctcatggaccgtagagcaatctcaacttcaatcactgtgaaaggctgtaataacttctcattcatatcagtagtgattgtaattggaatggaatttaaagagtgttgaaaagctgcatcgtcaatggtagtagtattgtagatgtttttaaaataagattgaatgacagcagccatatcagtttttgaagagaccacctcctttatctcagtatgaagagttttaatcttgttggcttttctagttgaagctttagcatgaaaaaactttgtattaagtttcttttaattagaggcaaaggtgtgagcctcgtgttaagaagatctcatttattaattggattaattaaggaagaagaagaagaaaacattttgttttttcttatccttcctttctccccatccttttccctaaacccttcacattgtcccatgtggaccaaacccaactcaccacacatcacaagtttaaaaaaacattttattaaactaaatataaaaaggaaaatggggaataagcaaacttcttatttactcaaatatagctttgccattgtcaaaaattaaaggttatagctttgtcttacttgagttaattactccttttcctttattaaaaaaagatattgataaatgagatggagtataataattttattatgttcttttgtcatatacttcatttagcatttttttttttttctcttctatctttttcatcgctaatatataattttttttttctaacaaaattgaccttcaaacatgaaatttgttaaaaatatgtaggccaagcatatttgactcagcattattaccttgaattttattgttgctgaatcaaaattcacattcaaaatggtatttgatgtcatacttcagagaagtccattaagaggatagagtatttctctttcataaattgctttttgtttattccctgctctgttcatgataaaaatagagaaaataccaatcttggtttactaacctggacctggtgaccaaaaagtggactagtcaaatctctcaaattcacaaaacgacaatgaattttctccatataacgtcaatttcataaaatttatcaatgcattacaccacacacaacacacaccaaaaaaaaaaaaaaaaaaagtttattgaagcagcctgcttgctgacacaatcagataagccataatgaataaaaataaacaaaatttaattaggaaaaccccccacatataatattgccataccaactttgagtctcaattttcctttttagcagtttcatcaagcaatgtattttggcatttatcatattgtcttcatagaaaacattttatactcttctctactctatgcttaacataattattacaaatggcataaaaccctacagaattaaagttttgtgagatttatataaaagatctcatcaaaacttggtcaaactaaagctaatgcataccttggaagcatattgaataacgtatacacactaacactataccttataactcttttcagtgcattattaattctatcaattacacggtttaaaagctagttttattaattatatcctgaaactgaaaccccctttatccaaagtcaacttttgcattaaataaaataaataaattttctacgtgatattaattattaagcctaattaattagcagcagtactagtactagtaaggatatatggtccctcttattaatagcatttttcaagtcattaacaaaactttcatagaactctagttttagtatatagtgttcattattcttctgctataagccctctttttcttccttagctaattcatcattttttttttctggggctatattaaacaatgatagttcagataaaaatcatgatgttactccttgttttttctgttttattacagggattttcttgtaactgtcgaagtttattaagaagtgaagattatgaaagagaagaaagaattgaaaatcatcatcatcatcataataaggaacaaaactcttttatggtgatctcagctgccactgttggaaacagaaagactaataagatgatccctcttcatcatgttcatgctgtctcacacagagaagtgcccactggaccaaaccctcttcacaattgattattattttgttaattaattatgtgtattgttttaggaattattacaagaaacttgtcgattatatattctggctctttcgttttcgctttatggaaaatatacttaaatagatttttttttagtctttgttttctttttctttagtgtgtatataacgatttatttggtccagtagaatttagagtgtagttcttagttttcagagataattagcaaagtcaacttttggtatttggtagctcagctgtgcttgattattaaaagtttagctattaaaagagaaagaaatatgaaacatgatcatcaatgtactaaagtttttagccaatttaattgtcacgtaggttaaatattatatagtaatgctactataatatttttattaaatatatataatttgcaggcagcatataatatagcaaattaacaatttttataaaaagcaaaataaaactaatggtttaacttatcgaatttggattaaagaaatataaactagtaatctttcacaatatatattttttaaaaaaacatgctagatataattgaggaaggcatgtgcctcatagttttcaaaaaggtataaaaataaaaaggtggaatagtgcccacttttgcccatatttatatacttttttttgtttgttaattttaaaataagggtgctatttatttttatttgttgaaaggagaaagaaagggtgtttagtgattaaaattataataattatgttagaaaaattaataataaacccaagatctatttgtatataacatagaaca

SEQ ID NO: 297991 - DNA, 1424 bp, Cannabis indica
gatcaagcttcaaacaccttcaacccagaatttctggattgggaggttcaggatcaattacttgtgtcctggttgctgtcatcaatgactgagagtctccttacaaacatggttgggtgtaatacagcacggcaaatctggcatgctctggaaaaacattttacactgcaagtctcctctaagatcttagaatttcgaactaaattgcagaagcttcgcaaaggatctatgtccttaaatgactatctcttgaaagtcaaacaacacgttgatcttctagcatctgttggagaagtgttgagtgccagagatcatatagcagcaatattcaaaggcttaccgagtgagtacgacacgtttattatctcttctaacactcgtatagaagaatactcagtagcagaaatagaagcacttttactcgcatctgagtctcgaatagaaaaaattgatcatgatcaagactcagatctgagtgtcaatattgctgtgattgaatctgatcaagtatctgaagctaatgtggcctattagaactactcaaataggaataacagatttcctagctacaatcggactccttctccaataaccacatctcgtggtggtggccgtgggttcatcaatcgaggaatgtctactgggagtaactatggcctgtatcctggcactaatggtcgtggtggatcgggttcgaatagaggaggtggcagatttcctatagcaccaaatcgtgtccagtgtcagctttgtcataagcttggacacactgtgatcgattgcttttatcgttttgataaaagtttcactagggtttttccaggttccaactcacctaatactcaagctaatatagtgcagacctcccaaacagatgacaccagctggttccctgattctggagcaacgaatcactgcactccaaatgctcaaaacctcaccaccagtgctgagtatgaaggtccagaacaactatacgttggagatggttcaggtctgttaatcaaacgcattggtcaatcttttattaactctaatacagctcaccctcttgttttaaataatctcttgcatgtgtctgaacttacaaaaaatttgctaagtgtttctcgttttgctcgagacaacaatgtcttctttgagtttcatgctgatcattgttttgtgaaagatcaggtcacacaagccatccttctcactgggatacaccagaatggcctctatacttttaatccttcccatttcagtgttcaagtcccaacacctgatgtccctccaagtgccttgacagtctctctaccccaaaataatgagcatactgttgctgatagtactcagtgcaataaatcacacatctctgactatgatttgtggcataattggcttggacatccttctcaaaggattgtcaaatctgttcttga

SEQ ID NO: 297992 - DNA, 7927 bp, Cannabis indica
tatgtgcatgagagggagacataattatgttgcactcttttttccttagttcaggttttgtttcactggattttcctggcaagattttaacgaggcaacttgtaaataattataaatatcaaatatatattatactctttttcctttagctcaagtttgtcccactgggttttcctgataaattttttaacgagacaactttaaatcatgctaacatacttgcactttatgaagcaagtagagaatgtgtgggagtgagatcattaacataacatattcagaaaacatatgtattacactcaataaagaagtatcaacacaagaaattctctataaagataatattgcttgcatctctctactaaaatgagggtacattgaaagagatataattaaaacacatttcactaaatttttcataatacatttcaagagaatgcatattagtatccaacatattcaatcaagtgtcaatcttacagacttatgtacaaagtcattactaatatcaacattcgagaagacagttcacaagattataattcgtcgattagaaaatcttcgatctccacgaatgtctaaataagtgagagttaattcatattgcactcatttttcccttgaccaagtttttggtctactaggttttctagcaagattttcgaacacctattatggacatccaagtgagagtactgtaaaatattatataatatatatttatggatgaccataataataatcaattagttacccaaaaaaaatcattatttatgcttgattgtaatttcatttattatattgatttatttttccattcttttagtcttattcttgtataaatagaaattcaccccattaaaataaacaactaaaaaaatcttactcattctctatttctctcttcttaattttttctctattttatattatttttaaacacgaacaacatttctaaagaattttaagagaatattcgtaaatcatagcgttttttcccttaaaatttcatagtaaaatccaagttgcaaataaaaaattaagaaatattaacgaatattttaagccatttactttttaggatttaagatttgagggttcataattcatttcatatcttttgaaaaaatcagatataaaaattgttgttacgattctatttccggataataaggttaaggcttggtaaaagtaattaaactcattgattagtgattactatactattaaagctgccttttaaaaagatggttagttaactaaccagaagcatttccactttgatatttaaaattaacttaaaagaagaaatggcactgaagtttagtaaaggttctttttcacttgctttgctttgccttggactaaaaaagctttaattagaggccgaagttaaaagtaattgtttactactattctcagatttaaaagatccacaataatgcacagataatggagaattgatgcctaaatgaaaaaaggttaaacctaaaattatgggcttaatctctcaggaattacaaaaacaaaagaaaaaataaaaagaaaaaaaaaatgtagaaaagttgatgagctgatattttaccaaaattaaaagaaaataggttgggttgaatgcaaagtatcaattcttttttctttaccaaggaaatacatggaattgactttgcaaaaaataaaataccaaggaaatacatggaattggggattgaattggataaatttatcccaaatattaaagttatcctattctcttaccaagaaaattggattaagttatccctaactaaggggatttaatcttttgcagcatctctctaatttgataacaaagttacattataaaaataatccaatccaatgccaccatcaaaatgaggccttaatgtcaaaagattgtattatcaatgtgtatggagtaaaaaggaaaactaactgagaattatggacaaagcaaataattataataaggccaaggctattcgcaacaccacacatgcaattcgcagtggcatggtcatatggccgagaatcagccagcaaataatacctggaaataaaaacagacattctagcatttattatatatatgactacgaacaaatgaagaaataatgaaaacccaagaggagccgtttttttactaaggctctagactttaatgaataacaaccacaagaaatggtgggcctttggaaaggccaaacaattgaatcaccattacactttgtttggtttggtttggttttacaatgtagtcactattacaccttatacaatcaccatagcataaaaataaaattacccaaacacccttccattaccaaacaaaaatttatggtacgtttagaaagtcacggtgtaatcgaatttgtgtaattgaaagtaattacacaattcggtaaataattacactataattatgtaattggaggtaattaaaaagttccaattacactcttcaattctcatggccctcattttaaacattaattactaaaaaatatagtttttccgtgtaattattaactattttgtcaaacaaaatattaggaattcatatgtaattaccgcctcatatccaaataaatcaatcttgtattttaaaatatagtgtaattactagactatgtaattaccaccctagtaattatactacttagtaattacacagctacttccaaacacatctttaatgtgtagatatttatgtcaatactccactcattcctattacctatcaaaaaatgaaccaaacatcataatatcattcttattattactattcctattacaatcaattatcagcaatattactattgccattttattacaccgaaccaaacgccacctaaatgctatctatctggaaactgtgatagactagaaaaaagagaaaaaaatggagacaacaaatacatcagctgttaaccaaatcgatattaatgaagcaatcaaaacatttaatcagattacatcagcatgttaacaaaattgatattcgaagctttaaggaaatttaatcagatctatctaattagttagctacaagataaaggagcttacctagcaaaatatacaaattaagtatcctctgaaaagcacccaatgtgataaacccgatcaagatttgagatttgatccttcaccgaggaattaggttgggtagatgaaagttttaaatggaagaactgttgctggtaagggtggtaaatagcaggtagcaataaagctgattgccgatccatagaaagcaatcgcccacacttactgtaccaatgacaaataataagtaactccaaagtttaactaacacagaatttcaaaagatttaatgagatgtggcacctgcaaacttttgagaatagattttggtagctgcatatccaatgctggtgaaacaaaaaaacaacaaaaaattataaaggaaatcatgtgtcaaggagagaaatagacattaacaccccatttagacaaagatgataccaaaagggaatatagagctgtttcagcttcaactccaaggaaatactgcaaagccatcgcagcatgctcctgcattaaaaaaatgattcaacatttagagggcttcaattgtctttagttaaaaataaataacaaataaaggataaaggaacattaccgttatatgtctaaatacatgataaactgaaacacctcttgcatgcatatagctgcctccctgttaaaatgaaataaggtaaaagtgcagcaattaagagcaaaaggggtatctacgagactcacatcagcagcggaaaagctcatgaagacatattttttttaaagagagaagagaaaagcaaatattatcctttaatatatactaaaagtcaaacataaatgtagtctatactaagactcagttctctttctctagtcaatacggcacataaatgtagtacataattttaggcacataaatacaatgaaccaacctaaggaaaaacattgcactgatcggggaaagcttataaaaactcagcactattaaagattagtattatgattttggcttataaacactctatcttaattctaatggactgacgtgaatcacaaaacgaacactttcccacataataattaaaacttaatagatatttagtgcatctatggaagaaagaaaagaacagaaacacacctaaaattccacctcatattttcaccaacaaagagcaattaacttcaatcaaaacaagaattgctcaactaggggaaaagaataccacattggattattatgagaaatctaactatccaagtatccattttattggttatctgcagagcaactgaaccaacatctcatactgagtttgggacatcggccaattgtataatggattttgcgccgacatttgagtggacaagacgtcatatgagtcagttttctagtagtaaaatataagtgagacacaataagattgaaaccaggcaacaaaaattcatcttgatatacctcatctggagaaaagaaagctactgcatctggatcgatagaaccagctgggtgcaaagatactacagctctgaagacagaaggaaatgacaattcaattacagcaaccttatctacatcaacatcactcagaggacctggttttaatctatttgaactatgaaaattgtgttccttcagtttttctatgggaccctcatttggcagggaagaagctcttttcaaccagtccattcgttcataggttagaatttttaaattcggcacttctttttccaaacgagtcagaatgtctgatagtgttttacaatcactaagctcttcctgatgaataggtggaactacttgtggaccacgttgtttctttggattcggttcagtatcctgaccattttgaccctcatcatcaaggtgaggaaaaaatcgcctcttctgatcagtgaaggccttaagagccaacctacacaaaacagacaacaatattttattggtcaataataataagagaaatggtttcggtagacaaaacacagtggaagccaacatatgtaccacacctagtagcaaactaattattcatcagaacacgtaaacttgttcctacgatcctacttgaggcatagttcactctaacccaagtctttcaaaacttcattcaagtcctgcaaaacttagacctacattttctgcattctcagaactctaaatctggtgtagagtcgaacattcattgaaaatttgctaaaccacaaaaattaaggcattctctttttttgtttaaatgaaaactttattaaagccacagctcaagcaacaaagtttgtgatggaaacaagaactttataacaccaattaggggctttgttggattgaattcaacctgccaggatttcatcaaaactcacagattcaactatgctaacaaacgacatgctacaatacaattaaagtagcattatgctattcatcgtaaacttgttaataatctcactcaaagcataattcattctaaacctgggtctttcaaaacctaaagttgtttttcattattatctgatggttctgagaactctggctcctaattacccacaataaattagaaattcccgctaatcaaaaactcaatgacgaagtaaattacaagctaatatggagtacctgaacccaacaaagataatattcatgagatatgcaccaacctggttcgatcaacggcagaagcgccagcctgaccggcgagttgacgtttccaggcgtaagcaaccactgcaccgtctgggcaaaccaagggcatgtgcagcccccatgaattacttcgcgaccgaagcgattcgctaagaaccccagactcttctagcagctttcctgatgaaaattccaaggcaaaagaattcaaagttcagaaactatttctttcaattgcttaaaccataatgaattatagaactaaaaaccctaataaaaagaattagaatatcatgaacggggtaatatttcttgatatgcttacagctaaactgaataaaataaccaagccctagaagaggcagtgaagagctttgtgttcgtaccaacagagcgaagatcctggaaatgttgacgcatagaatcatcttcgttctggaagaagtgcacaggtttattgctttggtgaggctgcgcagcgacgaagagagcttcaaggaggcgatcagcgccgagccgaatgtcggctatgagccgagccgcgtgagacaaacgatccattgccagcgccacctgcttaggaggagcctccgtggagtgagcctgagtggccgccgtggctccagtcgccgtcgcctgaggttgctgcatcgcttctgagtgtatctcgtgttttccactttgggtatcaacggaaatggtgagagttaccggagtggcaattccttttgtattgggcctattttgttccccattcgcttcattaaatcaatcttttgggctcatatagttcaaaataataaaaatatatatttatacaaaaatggcaaattttttttacatttttacgaatttactgttttttttttatatggacagcacaaacttgagattgctaggttttgccaccaaaaataaataaagaatggaaggtttattgttaagcaaatgaaagtttggagaattttgtactaattactcttggttttacttgttgctagatttacactatgttatttttaagttgttttccgtacaaatatatataaaataaaataaattaaaagtctcttattacaactaaatattaaactaaaacgtcactcattaaaattaaaactcaaatatgatctatttataaatgatattaatgaaaaagataagtttaattttggtcaaattaacttatttttgacaagtttaatacatttacaactcttttttttaaagaaaatttgtaaactttaatactgcaaattagctaaaagaatagctttcaaatcagtagcgacaagcctcccactataattacgacttagagaaaaaaaaaagtagaacgagcaaaataattggtcgtcttgtttgcagatcgtttgacaaaaatacatgaaacttgaggtaagactttgaaaaaaaaaaaacctacaatctgccacaatagaaccaaaaggggaaagcatattaaaattactatggagaacattacgtacagcttgacaataagactccataacaactttttaaatttttttagttttaatccaactcaaaacctccttcaagcctacggcctcagcacaagcaggatcagcacgagcctgtttacgaatagcaacatcataaatgagggagcctgaatgatcccttgcaatccaaccaatcccaaagaaattatactcttcaacaactccatccacggcagagttatcatctggaggacaagcattggctaatttccattgagtaaaataagctaaagtcaagacacaacaacagtagcaacatgtttcttttcattccaaacaacttattccttgccttccaaataccccaacaaagcatggaaataagacacataatagctaaaggaaaagaatgcataagagatacaaaccagtttgcaaacgacatttttgcagtagtcttaatgtcatgaggaaaaagaatccaacacattcttgtaaaagcacaatccaccaataaatgagccacagtttcagttgtagcttgaccaaaaggacaaagcaatgggacatccacacgtttctcaagcaattttacccgagttggaaggttaccgcgccaagctctccacaccatatttgaaacttttgttggaatttttaggttccatagattcctccacaaaccagagttaccagttccagactaactgctgagttttataccctaaataaaactcatttcaatataatcagatttatttattaataaagatcagaaataacatttaatgtt

SEQ ID NO: 297993 - DNA, 989 bp, Cannabis indica
attttttgtaattgaaggaacatttaaaacagattttagaataattggggtattttgattagatgtaatagttgaattgcctatatgagaaataattagtttcttaccatatcctacaacaagagtgtctttacctatataagggatggcattgtccaagtgctccataccaaaaggcacatggttgttagctcataatgagtcctcaccaaaatctagaacagtattgaaggagtatgcttgataatccatgtgatctattgaatcttgttcagctaagaaagcttttggaggagctgaattaccagaatttccatttccactctagatgtattctttgtggatggaacaaaggccctgtcaaacttatattgacatatggctgatgtatggccaaccttgaaacacatttgacagatgggttttgaggtgctggaggatgaatatttgaagggatttttgctgtaattgcgccagccatcattagaattacgccacttgtcattagagttggttcttacttgtgtgtatggggtctttgaatttggattgaatccaaaatcttggtcccccaatagtgagattggcagccatcttgtttgagatttcagtagctgcgtgatgcctttccaatctgcactcatgagccattaatagggtttgaattttttcaagactcttggattcaatacttgaggttatgcctgatacaacaggatcacattctggccctaggccatttaatagttgcaactctatatcttgatcactaatggtgcaaccatcaacaacaagactatcacaaattaatttgactttgtccacataatttaagattgacaaattacctttctagatatttgtaagttgacttttcagttggagcaaccgagcttttgattgacctgcaaacttgtgttcaagggcacgccagacttcataggtgtgacagtcagtagtcccgtgatccgtaaggggaaacaccgggt

SEQ ID NO: 297994 - DNA, 4004 bp, Cannabis indica
caactggtatcagagccatggtaatgatttactttcatgaaatattgattaaaacgatgatatgtgttgatttggatggtttcatgttggtttatgtgcttatttgatgaatgtatgtgttgtacaaaaatttttcaataaaaaatattttttctgtttctgaagatattttatttggattccttgtgaaaatatgaagaactgttacttttcgggtaaatgaaagagattcaggttcagtgcttggtgatactctactacaaaaaggagtaagggttagagtactaaacagaataagtcatattgtttatgctgcaatcaatgtatggtttcttatacttttacatgtttatttatcgtacatgattagtaaattaaaatcttgataaaataagtttcaccatcttccactccataaatgataaaattaactctccaaattttataaatatcatcttataagatttacaactctttttatcatcatcatctatactcaatattttaaactttatcataatatttggtaccaaataatttaaggttataaattttatcatcaaataaaacaaataaatattttttatttaaattcttaccacctatacactagatgataaaattaagtgtccaaattttatgactatcttataagatttacaactctttttatgatcatcatttatacagaatatttgtagattcatataatatgttacaatttgggaaaaaaatactattctatacgactaaatattatttatcacattaaattagatgattcaaattcaagtttataaagaaaatttgccctcaatatagacaaatgtgatgctcataatttctcaatatatatatacacatatagataatatgtaatgcaacaaaaatatcaaattaaatagaaaaaaataaaataaccaaagcaaattattgtttattagaataaccaatattattaaaagtattatattattaggatagaatgaataaaccttaaacaacctggaacaataataaattagagtacacaaagaacaagaaaacaaaatagtcctgctcaataatagtatattagctgcttgtatgcatccttatgattcgagtagaattcaacctcagcctgaaaatgaaaaaacaaatcatagttagttaatctctcttttttttattattattattaaaactatcttttattgaataaaaggaggtgctgaaaaacaaaatttgaccgtggcaacaaagggtgccacttccttgccagaaaactccttaaaaacaaacattagaggcagcccaagatcctaagttatgtgcagcaacatcaaggctacgaggaatccagcatagatgaacatatgtaaggctagaaagaactctcacggcggcatcaaagatcccacaagccttccaaacaggggacttcccagccagcaaaccttgcactgccacttgacagtccaagaaaatggagacactcaaccatccacgctacagaactcgaaggcacgcctactaaattacaaccaactctacttcaaaggaggacatcaccacactctgcaccgtgagaacctccaccaccgtgcccgaaatatcccagaccaaaatcacagcaatcccaaaattacctcaaaaagcagcatcaacaaagatattctggtcattccacgtataattttgagtatgaaaaactacaatgttctcaagtctctctacaactgcaattattgacctcacagagtaacaagaaacctactcaaggatcccacattgaatctttgacactaaaatgggggcatccttcatgaaaatctagattcctcgccctccacaggtgttagcatcaaaaaacaacatagagggagaaggaggctctatcaccatcatcacctcagggaatattcaaaggtagtagtaaccatctcaccatgtctttcgtgtcagcaaactgtaaagtatccgagcaaactccccagaggcaagatctctaaagttgtatggaaatgtcacaatgaaagaacaaatgaagaggaaagtcctcacccaagtggcagaaggcacaatgtgtacaattttcaaatatctgttgaatcctactcccaaatagtagaatatctttactaatttccacagaaagaatttcacccattcatgggccttactcttccaaataagaccccaaagatcatccatcttctgacagcaagatcgaacacaagccaaataaacatacttaactgaaaatgaattgtcagaggaagccttccaaatcaaatcaccatcaacatcaaggataagatatggaatagacatgacgacctcattgagagtggggacaaaagatttcctaactaaactttttcctcgactttccaataacaccaaagaacagtgaaataatcaaaactcctctctcgagttcttggaatgaaggaagcttcataatgatcccaatcgtacaactatacccaaggagaatgtcaaatgtccactttcaagccattacccattaagaagcatgcttcattacggatgaaatctatagtggacataataccttttgtaccaaaggacatagaattacgaatgggagcagcccaggaggagaggttacgcctaaaatacttctcacaaaagatttaacaccacaaagaatcgactctgaaagacagtttctaaccaagtttcaccacaagcgcaaaattaagatctttacatttcttcaagttaagaccaccccaccacttcggcacacacagtgaatcccaattggcaagagcaagaaaacaagacttgtccactgatcccgtctgccaaaattgacgaaccattttatctaactcatgaaaaatgaattccgagatcatgaaagtagacaaagcatatataggggtactcaaagcacccaactgaatcaaggtagagtgcccggcctgagaaagaagtttttctttccacctttcaatccgcctagccattatatcaataagaacactcaaatctttgactttgctaccagaaaataaaattaggtttttgagaaatttgtcactaccaatcatatctctttacccccattaattttttttatatcatttcttagctttgtccctacattagaagagaaaatcaaggcatatttatgagtttttatatgctgtctggagaccatatagtacaactctaagcagcgctgaaaacctttataatattctccaagttagcttcgtagaaaataaagatatcgttagcatacatgagatgcgagagagattagttgtttcgggaggatgtaaagccattaatcaaattgcaatgttcagacttaaacaacaagtgggatacacaagatgaacaagtatcgggagagtggaccccccctgcctaaggccccttctaggaagaaactacttcaatgggccactatttaggagaatggagaagaacacagaggacacacatttagccaccaactgccgaaattgagcacataaattgaaagtttccattgttttgtcaacgaacctccacccgattcgatcatacaccttagacatatccgattccaacccaacaaagccctttcgacccttcaacttttaaaagaatccataacctcatgggagatgatgcaattatctacaatccacttccccataacaaatgtagattaatagggagaaataattctaggcagcaacctcttgattctattagcaagaaactttgagataatcttataagaaaagttacaaagactaatgggacgatagtcattggagctatgtgcattacctctttttgggatgaggataacaaaggtctaattcaaagaacaaacaaactcttctgtttagaaaaattgggtaacagacccataacatcatccctaataaaatcacaatgtgctttataaaattgccaaggcatcccacgtgacagtcagtaatcccgtgatccgtaagggaaaataccgggtaagctgtgcaatcccacaccgc

SEQ ID NO: 297995 - DNA, 3476 bp, Cannabis indica
aattaatcataaaaactcaaaattttctaatattacctatttatgggtaatacccattaagagtatgagaaacttaaaagagtgatgtgacatcttctctttctaagattttaatttctctaatttttgccacttctctacacattcaattcccctttcacctctgtgacttttcaacacccttgagtatcctccactgaaacaagcatgctctgtacccagatcttttcatcttcttcatcgaaattccacagtaatgatgatttttcctcttttctttttcccaaaccatttttccacccttctccgtgtcgtggtggctcaacattaatgtcgattgatagccaaccgtctctcccctatcagatgcgatcagaatcgacatctttgctgaagggattgaagcaagcgtgtcgaaccattaatgcatcccttacaggtttgatctcttccttgaacaaatatcatgatgaaccctatttaattttaattaccaatgtccttttcgattctaataggatttttagtcttaattattgtgtctacctacctagtcatgggctggatttggataatccccgcctgattcagtttttaattcttacccttttttctatctttggtactcaagtgtacttcgagatacgaaaatttgttctacacttctcttaattgttgtactagaaatttcctatttaactaattatctattgtttcctctgcttgccttattttcgttcaaaaaatctactatttccttccttgattctattttgccaaatatggaagacttagcttgttctttttctacagctcttcacctcactgatactgaaaacaccatacactccctcgctgaccatgctgacccaaatgagggacttccacttgccccacctcagttccatcttatggccaccttgtataccacaaaaatttttaaccacaatgcgctgaagaattttctagagaagtactagaaagatcgatttccagtgagtgtcaaagaaaaagcccccaactccaacctttacttagctgctttccactgtgatggggataggcgtagagccatcctcaaccaaccccaggtctttgacaaatgccctgtccttttgaaaatccctaacctaaaaaatccatgaggaaaattcctttttgggtccaaatccacaacattcttttttctcgaaggtcgatctctcttgccaagttagtgggccaaattacgggcacccttcttgaggtaaccaaccttcacttttagaaatctggggattctaccttcgggttaggattatgtttgatgtcaccaagcccctccctcatggtatcccaattctcttccctggaatggcttccccaacttggctcgagttaaaatacaagaatatccctgaccactgctaccattgtggccgtcttgggcactcatattttgcctgaactgagtgtatgagggcttttgacgagtccaaccaaccaccccctcccttatgagagtgttttgcaacgcattgctcgcccaaactttggcctttttgggccctcctattcccaaacccactcctccatcaccctataccacctccccaaaaccaatctcccccagtgctaaaccacaacacaaataacctgatccctgtgaatcatccccgtggccaagtcctgcaacaggacttttcttttcatagtaatttatgaaactacactaatactgctggtctcttcctctcccctcagttgaactccaatacacctattgctccttaaaatttccccattcctactctcgaaagtacaccattccagtcccaaatccatgtttcccctggcccacttttgctgcactcatgtcagttgctaatggtggagctttatcctgctctgcttccccacaacaaccctcaacccctggatcacgtagctccacttctccctcctccagccaactcaatgctcctttgatgatctctcctccacaccacccgattgagccacaaccaactacccacattgtaggtctccccacttccctgtcattcgccattggaagcagtgatggtccccccgtcgtgcacctccaaggaaaaaccaatcagctggctcatctggtttcaagagacaactggcaacaattagaaatgagttgagggaaatgctgaagagacataggccacaaccatgccaaaaggtggtggaagtggcgtccagtgaagaggcaggtcctgtggatacatatgcctgtcaggagacatgaatctcatcaactggaatgcttgaggattggggagtgatcgagcattctaaaacctctccctgctggtcaaaatgtataagccatctttgctttttgttattgaaactagactttgtaagaactctgctgatctgtttagacttaagttaggttttgaggtcccccgtgttggtttaggtgggggacttttacttttttggaattcagacctggatgtaattataagtaatttttctactaatcatatccactattttatcttgtctgctatttttttctagttttaattttactgttgtttatggtgctcctaatcctgtgaatcgtgcccatacttggagaatcctctccaggattggtttgtcatgtatttctctcccgtaggttatcatgggtgactttaatgactttctaacttggaatgacaaaacaaatggcaataacagaaatggtccttcaaattcttttcgccaatttctggataattaccaattaaaaacccttcgggatcccatatgacttggacacctaacaaccagggccataggaacactcacgaacggttggactgggctgttagcaattctcattggcacacaaaacaccctagtaacaatcttaatcaccttgacttttttggttctaatcatagggcaacccaaatcctttcacatatcccactcagtcttcgaatttacactaagataaaaatgttcctctttgaaaacgtttggctcactaagcccacctggaatgatgtcctatctaaggcttgggagcacaatactcatgatggctcccctatccaagctctccactccactcagatgacttgtgctgaatttctctcaaaatggaaaccaaaactttctttagcttccaacaaaggattaagaaaacccagaaagatcttgaataagccagaaactctgaggacaattctcataaggccttgctctgtcaaaaattattgcaaacaaaccttgacactcttctattcaaagaagagacatacttgaaatagagatctcgtaatccaatggctccattctggagtaaaaaacactcgtttattccacaagtttgcctctaataaaaaacgggccaatcgtattaactcccttaccactgaggatggagttgttcttgaggacattataatacccggtaaaaatatacatatatttaaaatttatttgttatacaatttgtgtga

SEQ ID NO: 297996 - DNA, 2827 bp, Cannabis indica
cacaacagtatattgtccttgatgattattgcaaacaactagtggaattgaatcctgggagcacaacgataattaaaagcaagatgattgatcataaaaggttgtttgagagggtctacatatgccttaaagcttgcaaggatgaattcaaagcatgcagaccattaatcggtttagatggttgtttcttaaaagggtattgcaaaggtatgttgttggctgctattggtattgatcctgataactctatatttcctattgcatatgctgtatgtgaaaaagagaatatagatacttggacttggtttcttaatttgttgaaagaggatttggaaccaattgacgttacaaaaatcactatgatgagtgatagataaaaaggtttagagaaggctcaagcttcgtttttggttaatgagcaggagatgtgttaaacgagaaagtgtttcgaaatgggtgaatccagttgaaaagagggtgacgaaaatcatcgagaagaacaagcaagtggccaggcgttgttcttgtactcgagcagattcacacacatttgaagtaagtcggagtggcatagaaaagttctcagtggatttggttgctaagaagtgtacttgtagaggttaccaactcactggaataccttgtgggcatgccttatctgctatttgtagctttggattgagtgagtatgattttgtggatgatgtttacaaaaaagaagcttatatagctcaatacgtcggagtaatttacccaatgccatcacctgataaatggcctaacccaggacaaaatccaatataccctcctactaattctgtcttacctggtagaccaaaaaaggcacaaaatagagatgccgatgaacctcctgccccaaatgcaactaagatgagaagatttggacaggtaaacacttgcggtaactgtggaaaacaaggtcactctcgccgtacttgtaaaatttcaataatagtacaggtacaaaattataatttgaaacctatatagcttgtagtatttctttatagagctctattattttggtttatgttcacaattgacttgtgagttaaaaattttgcagcctactactcaaaagaataaaggaggaagaccacttaagaaaagtccaacagaagaaacagtgaaaagaaaaaagcggagagcaaagcaaaaggcaatagaggcattacaagcttccacatctcagggacaaccaccatctcagcaacaaaattagcctttgttttggctaaaattaatttctttttgatatatagggtagaatcagactttattttgatatgttgttttgatgtataccattagtacagatgatagttaatgggaactgctactagtggtgttgctgaactcaaaatatccatgatttgaaactttggaatattttgtacttatgctttgattctatgagcaatatgcctactctattttattatagttatgaatttaaaaaagtttactatttattatctaatgtacactcaagctctcctatagcttttaatctgctcctcacattttgttttatcaactcgtctcaattgattttaaaaaacatgtgctatctctcaccttaataaagattacttgttcaataaagatgaaagattctttctttgtttcatcaccttgttaaatatgttgttgaaataaaaaaaacttgtttcattgatgggttggcaaattatattatgaaaattgcaacaatgaaaatactagtttcatttccttttaattgtcacataaatattgtagccaaattgcaaaacttcagcaactaaatcacaataatataagttaatttttcattcaaattgcaccaaaccaacactacttcaatagccaaactattaaaaccacacattaatacaataaaaaataatttcacccaacagatattaagtaagaaaatatatttggattagcatatgatattattgcccaaatttcatatcacccaatttttttacccacagtgaatactaaattttcatgcctctagtcaccttcattcttctcaaccaatttggaatcaattcctttccgatttcaaaagtttacaaatacacccaactgaaaaattcactcaccctccatctgtctatagtgcaaaaaacagcactacaattcatttataattatcataactaagaatacaaatttaaaaacgcttactctcattctaaagtatattttgaaccttcaggcagaattttttacggtccaagaaattttttgacactcacccacaatcacaagttataccatcaaacctccctctccctctaccccttccttgataccccaccagaccttcctccaattggattagagctagaagaatagaatgatcattcacttttcatcatatacccacccctagtcatacccttctactaccattggatctttgaaaatagattcttcacaagttcttcgtctcctctcttgttagttcacagatgagttttcatttttattgttatgctttacttagttttaagatttaacttatataaaatgaataaatataatttatgatatttattttaaagagaaaaagaaataaaataaaatagtgtgatcttagccttacacatgtccacttaagttgactaacagaaattttaaaacggaatgagacggaattactattttgtaaacattgggtagtttacccactaaatataaacaatgggtacctatcgcttacaaagccaaaacattgggtagttatgtcgcaatttacccttattattattatatttgtgagatattagtgtgttgttttacaattttt

SEQ ID NO: 297997 - DNA, 6933 bp, Cannabis indica
tcctacaagaaagacataaattgaatcaaaatcaaatattttcatttataaaatatattacaataatttcaagaaaatatcaattaaaactcaatttattttatcatttaaaataaataaaagtgtatttttaaccactaatcacctaggtatccttactacgaagtccatggttatgtcttcccacttccacttaggcatcctcaaagttgaagtaaacttgtcggcctttgatgttcagccttcacttgctgacaggttaaacactttgaaacgtattcaacaatatcactcttcattcccggccaccaatatactggcttagtgtcatgatacatctttgttgttcctgggtgtagggaatacggagttgtatggaactcatcaaggatttccttcttgatctggtcatttgtcgagacacaaattctatctttatacctcaatattccacttggagtcacaatgaaatccttcgtagcgccgatctcaactttctttctaagttcaatcaattcaggatcatctggtggccaatctttatcctttcaacagactgcaatataatatttatcaacttcccgactacgaactcaatctcgatcctggccatatcctcagccaatcttggagagatttccttcaactcgtagatttgccctggacctttccagctaagtgcatctgccaccacgtttgccttgtcgagatggtagaggatttcacagtcgtaatctttgactaactctaaccatcatttttgcctcatattcaaatcattttgagtgaaaaagtatttcaaaattttgtggttggtataaatctcacactttttaccataaaaatagtgacgccaaaccttcaaagcaaaaaccaccgctgccaaatctagatcatgagtggggtagcgctgttcaaagtctttcaactacctagggtcataggcaatgaccttccctgattgcattaacacacaacctaagccttgtctcgaggcatcaagtatatcacaaacttttcattactgactagcaaactcagaactggtgtggtaatcaatctcttctttaattcttggaagctatcttcacatttatcgatccacacaaatttatagttctttcaagttaactcggtcaaagcagtaaaaatcttggcaaaaccttctacgaatctcctatagtacccagccaatcttaagaaacttctaacttcagttggtgtcttaggtcgtggccaatcctgaacactttcaattttcattggatctaccagaatctcatcctttgttgtactttcccttgacatatttctctctatagcttatgctaatgatgcaagtataacacttaggaaatttagctaagtgatgggtctataagaggttagtcttgctgttcaaacttaataggaacttcctcctcaatccctttgggagttactcccttgtaacatatatactctaagtgttcttgctcttttccatggagcagggtgtattactattaggtggtgactaaggggattgactgagtaagggagcaagggagagagagaagtggggagagagagagaggagcggggagagagcgaggagagagtgcagggagagaaagcgggcagaggggagtggggagctccttacatggggagctcaattcgtgccttggccttcctcatgttggctctccccctcgtgcggtgtcccgtcttggtagttaggctcttcttttcttgcaaatactcttgtaaagtatatttgagattttctctctcactaatttatagattttcaaaattgcacttaataacttttttggagataacaattagtataaatgtaaaaaatcttttaccgtataaatataaagtttaaaaagaagaatattattttgtgtaaaatgtcttttttttagtttatacaattggatgggttacacttatgtaaggggcttgagactatacatgaaagagtatagggactaattagtaatttttagtattacctagttagtataaatatgtaaagttatttcacaaatagagaatcaatgaatgaaatgagagaaaattaagattatttctattagagtttagcaatgactctaagagtgcaaacagatacaattagtattatattattggtgctttcattgagagaatatcaaagagagatttcagtgagagatcgtcactatgattgatgaagagcttgttgaattcattgatccatgatgagttgtatggaattctgtatggagcaacgttgcaaggctcaattaaaggaattggatgtcatattttaacgctactaccccatccacttctttggagatcaacaatcacattgacaaccctatcgaaccagtgagagtagccattccattggagattactcctgcagccacacacatagtcggtgactccccaagcatcaacattgttggtgtcatgcaattgagtgcagtggagactcaatctgattcaatgctgaggttaccagcacaaatgaatttgcaggactcgccattacaagagcaacgacatcaagggaaaatccaaattggcaatgttcgcagatctgagacgatcaaggatgtcgaaggcactatgcttccaacaacaatccaacaagcgcttcttttggcctttcatcctccaaccacaaacaacatgtgattgacctttcttccagtgagattgtgatcgggtcgggctagctctcaacttacttggttttttgatcgaggacaacaaacaaaatttgatgacgatgggctcgacaaagtggttactagtagacgacaggaggcttggtcgacccagattagagaaggccattggagcatagacaatgaacttattagttttatctcctatcgtttgctgaaatatatcaatatatatatatttcctaactcattgttataaaggtaagatatatagtattattttcaattatcgaaatcaagagaaacataggcacaattgaaagagatcacatcgctatctgcttcaagcatttaaaaaaaaaaatatataagagaagaagatgaagaaacagggacgtagcttgtatcgggtgaagaagatggtgctgctctaagattttttggcttggacttgggcttggaccgaatattaatagaaaataattgtgctgtaattaattttttttcttatatttgtacttgttcttagttttaatttttaattttaccaccttaaggacaaggtaattttgaagaattgaggagtgttacatgaaatggtataagaactaattagtaattgttagtattgttaagttagtatagatatgtaaagtcatttcattaatagagaattgatgaataaaatcagagaaaattaagattatttttattagaatttggcattgactcaaagagtacaaccgaatacaattggtattgtatcacagacacagaattctgtcaccgcagtttctgtttttgttttcgttttagaaaaaaatgtatataattatgacataattggaaggataacgttaacaagtaattgaaacaaaataaatttcgttattttacgaagcaattcatagattcacacaagttattggttcatacttcgtcaaaccctacagtagaaccattacactgaattacaaataacttacagagtgtttaataataaacagttattctcaacgctgaaatcatcttactctatatatttcctcatgatgacctcgaaacaaattatactaaaaatatagtacataatctttttccaatttattatttaaaggattatcaaccgcagatagcagcaattggaatgggttcaaggacatgagttttggcagaaacagcttcatcatcaccatcaccatcaccatcatcatcattaccatcttctgggttttcatcctctaatttgaggagaaagtcattgaagcactcatccaaggtcctgaaagtttcttctgggtacagattgcccacttccacatcattagaaccatctatagcaaagtttatctgacaccctttgatgaagatgtcatgggtgaatgatgccactacactttctggtatgcaattctctgtacacacaaaaaccaaatactaatatatgtttattaaattaaaaaaaatgtagagaggagagaattttagatatatatatatatataccagcagctgcagcgagtaggtgatcttcagtaatggtaactcttggaagggttttgccaatcttcttctcccaaagtgaagccaattcatttatattgtaaaaattgcaagacggtcgaaaatggatattcttatttatggttcgaacatcatcaactgttttcatcgttagtcttccaatgtcggtgccagcaacaaagtaagctgcaattaattaattcatacattaatagctcttcttaatcaatttacttataaatactgtatcaacatgtaaaatagtgctccttttaactacaattacttagccccaaatgacttacctcacataaatgagatacagttagtgtactataactaggacctgaatttaatttataaattaaatcttaaaattttcacatataagtatataatatgtataccactctactccttaggattatctagtatcttattcttatgaattgttaaatttaattaatttaatgtagtacattttattgtttttgaaagtaccatatttatatttaataacgtacataaggataacatacaatattatctcatactttattcaaatgcctacaatattattcaatatccaaagatagtgctgatgagagcgagtgggatctctcacaccttgtaatgtttttattgttatttttggccgccatcaaaattattttttcattagtacttttgttctttaaatttttataaaatatataattttttgggtatttatttttggcttatcttggtagcacctataaatgtcagaacatatatataaatatataattatttgaatattgcggtgtccaatattgtttgatgtaatttactatttttattttctttaaggattttcttttggtgtgtggtttttcttccatttaagttaggtaatgctacaaaaaaaaaaaagttaggtgatgaattaatacattttaatattgggatattttatacaaaaaaaaataaaaaaaaattacaaaaatacgattgtaccgaattttaaacattttaatgattttatttacaaaaaatacgatatttttatgctgtaccttgttaatttattattatttgtatattatttttcattgatgttttgatacatgtttggatgttattttcttgttacttttatatagttttttttttgttattttgtgttatttttatagaacactgtaaaaataaaaaataaaaattaaatataaaaatgtaaatattttatcaaaaaataacagtttatttaatttttcttttaatattttacttgtttttaaaaatatttgattacttcaaaaaaaaaattaaaaaatttgatccatatttatatcaaatatcacatttaatggtattggccctattggataccacatgtatctcatgacaatgttcaatatatcaatttcatgcactgtcggatgtttgatttgtctcaacatatccagcatatgtatttcaaaaagtgattaatcacatttttctagcatattttgatgaacattcccacacatttgttctttttttgaataaacataccccactatttttcgttatatatttaaatatttgaaacatatatataaagatatatataatatttatataggtataagctttagcggtgctcctcaactcaacacctattattgagagatccaacacacttgggagtcctaaattcctaataaacacatggtttggtatttctcacctaacaactaaactttttttttaaaaaaactacttgaggctagttatagaaagagagtgtgtgttggagattttgagttcgagtcgaaattatatataaatataaacgttaaaaattaaaaaaaaaaaaaaaaactctttttagaaattaaacaaactaaaaattttacaacagaataaaggtcaccaattcacagccacgtgttaaataaaccaaaaccaacaacatcattattgatctctttttatgttatttggctaaatggaaaggaaacaaaattgtcccttttgaaaacttttgctaagattcttcgcatgtaagtttttccttttttttttttgaaaataattaagcttttctttttcccttctttgatttaaaagtaattgtactcggaactcatctatagaatgtggggaatttgtaatttggtgggtgaaaaagttattaaatgtttttttttggtttgttttaataaataaaaataatttttgtggtatgaggtgttcgttagatcacattaaatatttttaggcctattcaaattcgaaccaatcatatattggatgttaaattttaccatccgatccgatccaattaatttccatcatccaatcaatccaatatccattagatatgttagattggatcggttctatccattggatgtatttcatatatatttatttgtttaatttggatttatctaatattttagacctagtattttctgaatcggatcggatccatccaatattttaggtccagaatgtattagattggactggatctatccaatccaacaaaaaatgagtaaaactttaatgttaatattcatatatacttatagatttgacgtataacaatataaaatctaatactcattcaaattaaatgaaaatactaattagttcgataggatgttagatgcattgaatttttagacaccccatccactatccgatccgatccaattattgaatatttaaaaataacatccaatctgatctgatcacaatt

SEQ ID NO: 297998 - DNA, 883 bp, Cannabis indica
atacatatatatatatatatatatatatgcacattccacaaactgattagctagctactataactatatcatgcttataatgattccttatccaacaatatcaatctcatgctaagatcatgcatattgtctacagctttaatttataaattggcaaatggactactagctagtccccatcttttaattaatataaagcctaataattaattatcatagataacttgatgagaaagagtacgttctttctattcaaataaaattgtatgataaaaactaaggtgctacatattttaataattaagaataattgtttctttaattttgaaaaaataatgtattttatataaatatatatatatctttgatagaagagaaagatcgttatagtcaataattagaatattaatatagtaaataactgtcttgtatcatagaaatactaaagggtaccagcgatgcctaatactcttttatacgtatcaatattgctattggtctaattgctatccaatcgcaacgcaacatgtcgagaagatactaaacaccataatgtctaataacaatgctctccttttaatttgttgataattaaactaattaactagctctagatctagctagtacgtacttgatctttctagctatctggcataattatgagtaatcataatatgtgcacacatataaatttaaagaaatgattttgtcttgtgatgtatttttatggaatgtattccgtgatgtacggcagctgttagatggggaagttatttgatctgagggctggggttgatctaggagtacgtaattagggttaaaaatggtaacgtaccctgagacccatctaatgtaccctaagacccatctaatatactacaaa

SEQ ID NO: 297999 - DNA, 3289 bp, Cannabis indica
aaaaaaaaaaagaactttacaatatatatcttttgtttcattttttgtacgaagcattttcttaattgtatatatagtcttcaaagaatcaaattaccatatttcttttgggccgatttctttcttcaatgatatgacactcgcaaatgggcataaaagtcccacactcccccactagctatggtagctaatatataaaataatatcgtgtagttttatagtgctgtaaaaataatcaaatgaaaatgtaacacacacaagggttgtgtattattaccatggaagttgcatagaatatagatagatataggtactgaaagtgaaaacccttcactaaaaactgaccatttggctactaatttcaacgcaaaagattaacctaatactattgactcattattaagtggccactaaacctacccaaaaccaaaacataagtgttgttttttctgaaagaaaaagggatcaggtattgcagattcttccctttttattttggtaactttgacaatctcaggactgagttttatacattatgttgtcttaattagattatcagtacagcaatctaacctcataaaatgtcaaacataatctctcccaataagaaattatggtgagattcaaacctttcacctaaaagaggaagaatgctagtaaaaaataattgactatatatataatcccttcaaaataaattgactattttgttcataaaaaaagggtaattgactatttatagataaacaacaaactattactataacagaataagctatttttcataaaatctagctggttgttctttatttttaccgactctgttaataataatagtaactaaaatattgagaattaagagataatacttaaatttacatattactaattagagaagactcagttaggatagtgggcccgatgcccaacataatttcactggtgaagtcctgtttaatatcaccaccctctcctctcttcccttctctatataaaagtatagctctattcattcctacacgacaagcataactctctctctctctctctactgccactcttcaccttttgccagaaaacgtcgtcgtttccagccacacatcttatcttccttccctctcatctaaaactcttctatatttccatttttctttttatttttttccccattgattccaaaatcggaaaggcatattaatcacgtttccgtttttggatttttctatatatttgcacatacatcagtgtcgtcggtctggtccgattttcacttttttttttcagaattaactttttctccatttatgtcactcttccattgatggtgatttattatctcgagatttcacggatctctgtattattctctttacaagtcctgtaatagtaagaagaagtacttctcagaaaaaaaaaactgagaagcttcaatggaattattgcagctgaacgtcgtcgttttatctgcgttggctatgctaacctgttccccgtggcaggctttttctcagaaaactcacctttcagtgggtatgactctggttcgaaacgcttcggctctcggagctcgtaagtttctttctctcatcaacaagaaatatatatatataatatacgattttgttgattatattaacaaatattttttggggtgagtgttaattttagtttgcttggatgggagtttaccggcgtatcatttgcacagaggatttggagctggagcaaaaaattggcttctgcaatttgaggtaaaagtagtgtttatcttgtccaattagaaattgacacgttagtatgtcaatgcatggaatgattgactgggtgaggtcatcgagaaggcttgttgagtgttgtgccatggtctttggtgcagttgaatttgattggttgggtttcccaaaactagatacgaataaaacgacaccgtctttactactttctctctcctctcttcaatcttgtgtctcgtgcactttatctctctctctctctctctctaaacggcgcagccattgtctccatcgcaatacaaattctgccacgaaacccatcgattaagcggcgcgtttttacttttataggcttattgttggtcactttgattaataattagtagtgtccataaattcaacattattattatcatcaattcagaaatgaaagcatcttactttagatatataattaatgggattcgtgtgactatgtcgtttcgttgggttgtgttgtgctgtgtggtctcaaaggagattacttacattggattatgcatgccatgccattgtcatatatgtatgtgtatctatagatcattcattatctatggtccctaattaataatgggccataatgtaataataggtggaatgttggagcattatttatagttcatttagttgagtgggtggatatatatgggttaaagttattcatcagtttaattgttttttttttgggtattcaccattcatttatctgattaattaaagttcttattgatcatcatgatatcatttgatctatgtagggaggtgggtggtgtaatgatataaagtcatgtttagagagagctaacacgcgcagaggatcaacacgttacatgaccaagtttgaggttttctctggaatcctaaacaataatgcttctcttaatccaggtacgtaattcttaattacttttgattgagggtttaattaacatataataatatatgtattataacatttttataatgttttattccatattgaactaaacatttatgccactcatcaaacattttttgaagtagctagtccatttgtcacatgctagatgaaagatactattctttgagattttatcattaatttatgcaaacaaaagcatgtgattaaccatttttcttttaaatgaagtcattttgtgtagttcattcctagcgacactaataaaagtcaaggtatatagtaaataataaaaagaaatttattatctaggaatccagacaatggcatatggccacccaaataaggaaatttctttggtactttttaataagaaacatcatggcagatacagttgtatatatatactcttacatataaaaacctttataaaaaatatgaacaaatataaccgacacttgacatagtcattcctctttgttacatatacttattctatattttctaagatacagattacacatttagatctaatacttacggatccaatatttttatttttgaggacttatttattataaaaaaaaaaatatttataactacattataatcactttta

SEQ ID NO: 298000 - DNA, 5077 bp, Cannabis indica
gataactaatcagattgtaaagagttttatttagggcataaaacccaacatatgtcagctaggtttttgtgagaggagacgtgcatcagttagagagaaccttgttggaccttttctcggatgaagtgacaatcaatttccacatgcttcgtgcgttcatggtagacatgattttcactgatgtggattgcagtcgtgttgtcacaatatagcttaggtgttggagagatggggacaccaaattctttgagaattgcaaggatccaagttagttctggtgttgcatttgccatggctctgtatccagcttcagcggaagaacgtgagacaacttgttgttttttttttattttcatgaaattagagatttaccaaggaatgtacaatatcttgaaactgatcttttagtatcttggcagcttccccaatcggcatcaacaaagaatgagagctgaacattgactgggataggctagtttctgcataagcaatgattttggggacactgtttgaagggaagaaaatgccttagcctagagtttttttgagatagtgcagttttctatgagcagcttgaagatgtggaactcgaggagaagataaaaattgactaagatggttgactgcatatgtaatatcaggcctggtaatagtaagatagattaactttccaataaggcttcgataagcagtcaggtctgtgattatagtgcctttgaccttactgagtttcaggttagtttccataggtgtagaagcatgtttagcacctatgtagccggtatctgcaagtaattgcatggtgaagggtggttgggagatggaaatgcccccttagttcgacaaatttcaaggccaaggaagaaccgaagtttgccaagatctttgagtttaaatttttgatcaatggatgtagtgaattgtgttatgtttgagagattgatgctggcaacaaggatgtcatccacataaatgagaatggccaagaaatctgatgttgtttgtttaatgaacaatttgttatcagatttggattgtatgaagccatattggattaatgtggtactaagttttgagtaccattgtctagaggcatgtttcaggccatatatactcttgtttagtttacaaacagagtgaggaggggccttatatctagtggtaattgcatgtagacctcctcatggagatccccatggaggaaggcattattgatgtctaattggtggatgtgccaattgtaaatagctacaagcgccaagaagatttttagagtattaaacttggcaacaagagcataggtttgggaaaaatctatgccatgttgttggttggaacctttggcaacaaggaatgcttttaacctgtcaacatccccatgttggttattttcactttgtaaaaccatttacagccaatgactttgtggccaggaggaagcttggtgataatccaagtgttatttttttctaaggcctgggtttcattgtccatagcttggatccaatgctgaaataaggatgcttcagcataattttttggtttagtttgtgagtatgttgtaagtacaacatctcaaaattggtttaatgtaggacagataagattcaatgaggtgtgtagtggatgatgtatggcatacatagtctggcaagtgtgctagtgtttttttggtgtggccagtagtaggtgcaacaataaggggctgctggtttgatgttgcagttgctggaaaaacaacaggtataggatttgcatcagtagagactgatgcaggtgtattattgttagagacaacaactatctcttgatgtttatcatgattaatatgtggtgttttgaggattagatttgtgttgattggcttatgaaatttatgcactggcataacagtatgaagaactatttgggggaaacagatggtcaatgttagatggagatgatgaggaaactaagggaaagatttgttcatagaaaataatatgttttgtggcattctccatgagcatgtaggctttcatgccatgtggatagccaataaagatggaagctctactccttggagagaatttgtgtcttttggagagaattgtggagctataagctaacctgcaaaagctctttaagtgctcataattaggagcaatgttatagagagattcataagtagtgatgcctttgagcatcttggatggagttctattgataaggtaagtggcattttttacaaggaaagaccaatataccaaaggtagattagattggaaacttagagcctgagccacactcaagatgtgttggtgttttctttcaacaactgagttttgttgtggtctctccacacaagaatggtagtgtaggatgcccttagatgtatagaaagtttgtaggtttaattctttagcattatctaaacgaataactttgatattggtggaaaattgtatgcataccatattaaataagttaggtatgagagtttgaacatcaaacttacttttaaggatataagtccaagtgaaacgagacttgtcatcaacaatagtaagaaaatacttgtatccttctgtacttgtaatgtgaaatggacgccaaatatccatatccactaagtcaaagatgttattggcaagattatgattagaaatgaatggtaatcgtttttgtttggctaattgacaaatatgacaatgctgattggtaaaagaggaagaattagcattctttttattgaaaatattagaaatgtacatagaaaggtgaccaaggcgattgtgctaatggtctacatgtttattttcaaactaaaaaaaagttgcattaattgctggtgtatcttgttgcagcatgaatagcttgccatattttttagttgtcgcaatcaccatatttcgagtaagatcctggataacacaattgttttgataaaaagtaatggaattaaagttgttattaaccaattcagcaatagataaaagattaatcttgaaacttgggacatataacacattatgaagagttatatgagggttaataacaacagtaccagatttgtgcaccaagactttatttccattgggaagaatgacatgttggggaagaatatggttggaaaaataactaaagcaagtgatgttgaaacaaatgtggtgagtattaccactatctagaatccatgtaaatggagataagaattgatttttacctacacggttagaagcagcaggtgccattacagcaagatcaacatgaggggtgttgttgctgagttgctggctgagaagagagatcaaatgttgacattggattgaaagatctgagggaatcaaatggccatctgcatcagggttagaagaactggaagattgactttagctttccctttttcttgtctttttttgtctccataactaggagaaaactagtgtagaaaatagcatttgtctacggtgtgacctggtttgccacagttagagcaggatggtcgaggtttcttggctcttggtggatgattaggcatggagctagaagcagtagatagaggaatggtttaagtagagccaagagaatgttggcgctcttcctgaataatgatggaaaacacacgggaatgcttggggatgggttcattgagcaagatttgagcttgaaccgaggcaaaggattcattaagaccagtcaagaattgaagaacttgactctggttatagtaatccaaaaaaagtttcatagcaccacaagtgcaagtggtgataggctgaaattccttcaactcatcccaaagggatttcattttggtgaagtaggatgacacagattggtcaccttgttgtaatcgggtcaattgagtttaaagttgaaaaattagagggccattgccttcgttaaatctctcagaaagatcattctacatatcaatggccaaatcaaagtacatgatactttgagcaatttcttgagaaaccgaattaactaaccgtgacataaccatattattgcatctaagccaagaattgagaagagtattaccaatttcagggcgagggagagacccatcgatgaaagcaatcttgttcttggccactaataccatggtgattcctctcttccaagattgatagttgctgccattgagaacggtagacaccagcacaagtctgggatggtcaccagtgctaagaaagaaaggactggagttatcatcattgagaggacaattagctggaggagcagtgtggtgttgatcgtcgacaatggtagattgatcttgaagttcaggattctaggtgttctgtgatggaggcctagtgtgatttctgcgacaaatggctgaggagttgagattaggagcagcaggatgttcagaagtgatgtctgctgcagtagtatcagccatagatggaggagcacatcttgggatcaggttgaaggtcttgccatggaagcaatgggcaaagatacttctgataccatatgagaagaataacagagcaaaagatgaagaagacaatctctattactcaaaatcttgtatatgttgaatacaataggcagaggagtttatataggcagtaggtgaagtgaagttagttaggggaagaatctaactaacttaactaattaactaattgacttaagcttgaaaaaactaactaaccaatttaactaaccaattctaatatatcacaaatgcgataagccgcaacttaactgtcaagcacagtaaaataattttggagcaattctattggtcacctcaatgtcatataaagttttttatattattttctgatacctgacaccttaagccgtctcttagcatttctctaaaatttgacataccgtcatactaatcattcaaaccaaaccatgttaatattgggtgtacaattaaagtcttatattggttaaaaatagaaaaaatatttctaagtatttaaggagggacactatctctattgaaattggatctttcgaacagcttaaactcaaatagacaatgtcatactaataaagacataaatggtgtcaagagttacattcgtatggtgttggtacatgtttttttttttttttt

SEQ ID NO: 298001 - DNA, 3043 bp, Cannabis indica
tggataagcgcataagactgtatctagaaaaattggccatgagaaatggtcaagatatcattcaaaaaataacaggtaaaataataacaattaattataaaaaaagaaaaatatatgatagagtatctgttattgaaaacgttgtttttggggtttttttagagttgcatattagttgtataaaacttttattgaggataaaaaactgtttaaaatacaggtactcaactatgacatctaacatagttgaagcacttaactcaacaaatttagcagacaaggaaacaccagtcacaacattaatggagtgcttgagggcacaaatgcaagagtggacatacaataatagaaaagatgcataaaagtgcacaacaaggctaacaccatcataagaaaaaaaacttataaggaactacgtacactcattgtgattaactgtaagttgatattatacgttgcatactctaaactggaaaagttgtttttatatagttttttgattgtattaaagttgctttgaaaaacatgcaggtcaagccagcaaatgaaaacctattgaggtgatagatgaacacagaacaagaatagtaaacttgaaagacaaaacatgcacatgccatagatttcaaaaagatgaaatgtcatgtaaccatgcagttgccgtcatgaaggacttgaacatagacacatacaactatgtgcacactactacacatcaaaagcattaatgtaaacatatgaagaaacagtatacccagttgaaaaccttaaagaatgggatctgccaaaatttttcgaacacatcatagtgttgcctcccaaagaaataatcaaatttggaaggccaaggaaaagaagaatgacgatatcttgggaaacaaaaaaatagaacaagtgtggcaagtgtggacaaaagggacacaacaaaaaaacgtgttgaaaaattacaatagagagctaaaaaaacaactattcagcaactagaaaactactatagtgaaacatttagataagcatcttttttttcattggttgtttcattatttttagatggaactttttatttgctaaaacttttcaaacatattgttgagagaaaatagatattatgatcattaatatagaaatgacataaatattatagttaagagataaacaattgcttgattcatcaaaagcaggttgtaaataggttgttattaagatgtttttctgggtaaaaaagaatatatcgagtaaaaaataaaatgtaattataaaataaatacaataaccatataaaattacttacagaaataaaaaaatttctatgactatcaacataatttaattataaaaataacaccaactgggagttaagtctccattatatacaaaagggttgggcaaaactgcttaactaaaagggagagagaacaaaatgctcgtttactccctaatccacgagcattccaactaataatgctcatgactccaggcgagtacgttgagcgtcacctgcctcttcaacttgcccttcgttaagagcttttgctaaattctgcgtgcgtttgagcattttccgaaattcctttgcattaagacagtttggccgcttcagtttcaccttacgtgtggtagtggaagtgggagctggagtcgtggtagacccaatagcgaaatagaggggctgagtggaggtgagatctgtcaaaatggtggaaaaagcttgagagacaggaacaatatggtgattcacacctgttgtggccataacagtagcagccgtacgtagtggatgtaggcttagggagtggttgctcggcagtggtgacgggcgaagaagggacagtgttattctttgtagtttggggatgatgaagggatgtgggaatgtcaagggatggagctaccactgtaggaggggctgaagtgaaatgatgagcccagagagaggttggtatggcagggtgattcaggtcttgggagtgaggaggcaaagcattatgagaagagctagccatgtagaaaccaatagatgtggtttgtgggtggcccaagtgttgcacaccataatcagaggtaggttcattgaaggggccttctgagatgataaagggttggtgcaaacgatattgatgtgtggaacccaaagaagttgggctagcaatgtgtggcctaagccaagtacgtgtactagcaatataaaagggattggaggtgatgcggatcttggcttttaaagaatgatataccgaaacattggtggagccgaagaggagtcgcatgtagcaaggaagtcatggcagtgattcacaatgttgctcaggcagccgcaatagtgacaaaaattggaaagattttcgaaacgaaatttgagccaaaccgggactgccattccatggaaatgaaagcgagtgccacggggtaggggttaggttatatcgagctcaatgcggacacggaggtaagggccccaagtctccttaagagaagctgtatccacttcaatgtatcgcccaaagacttcactaagtcgttgtgcaagtgcacaagatcgtttaagaaacagtataccaaaaacggtatacgcctctcaacttacatgtatctataaaaaattctgatataggctcatctatcactaaatctatctattatataaatatatatatatatatatacaatatatataggcttaattgtttgtagatttatctatgtttcgttttttttaatcttttaattgtactttaaattactaacattattaatcttttattttctatcatgtttgaagatatctcttcatcttcattttccacatctagtattgtatattgaatttgctattgatttattttttttctttcttttggctagctattctttatataactttctcactttcttttttgtgcctggctgctggctgttgttgtttctgtgtttgtttggttatggatttaatcttgtgttgattctgttaatttgtttcaatgaagtaggtgcttagacaccttccttttcataaaaaaaaaaatgtaaaatgtaaaattttggt

SEQ ID NO: 298002 - DNA, 4094 bp, Cannabis indica
aaaaaaaaaataataataatctttgttcaagcaagcaatgcatgactctcacctttaatgtatatatttatagagagatttatacaactatatatgctaagtatgttgaaatatatagaaaattttctgtagaaatctttataatgtttgttctggtagatattttctatttattttggtatttataagaattttttagtttatttttttgatagcatacgttgtagctattttagaccacttgtaaatttttagaaaattctgaatatgttacattgctaaaaataaggttataaacagttacttaccacgtatgtaagaaaaactcgtgcaataaaatatgtaaattttatttttgacattataaattactcataattttctaaaatttttacaaatgatcctaaataactataacagatcattaaaaaaaaaatagattaaaaaactttaccaaaataaatataagttctactgaaacacctgtaaacttacccttttaaaatatatatatgcttatagtaatgtcacctcctcctaccccatgaaactagatccctagataaaagcttatacgtatttgtttaatcgaaaaacaaaagacatattcaaatcaaatttctcctctctttttgactcactcctttatatatacaatttttatttcaattattttttgcataagcaaaattattgaaaaagttatgtgctcctactttgtgactcgttacattaatacaaattatttaaaaataaacatattttaactaaatatatatagtcacggttgaaaattaaaacctaaatatatagattttcatttaaataataataacaattaataataataataatactttaaaaagtcatttattcaaaaaaaatacttaaaaagtcataagggatacaatgcactctttatctagttcgacataacctaaaagaactttttaatctaatttcttcatagttatctacgttataattatttaagacatcttagcaaaattttaaaaaattcaagaaaaatttaacatagtaaaaatatggttgaaacaatttgttgcacgtgtaatttttttattttatatacgcgtgtaaaatagattgtttgaactctactttcgtcatgttaaatttttttaaatttcttaaaattttatagaatatcttaaataactacaacatagatgattattttttcacagatgccaaaacaaataaaagtgcatcggtacgtacacctccttcaaaggtcagggtagaattttctaaaattattttttatatatatcttttctaaaataaaactcaagcataaacatactaataataatacattaaatattaaagataaaagtttgaaacggcaaaagacagtgtcgtttcaatatttgaaattcagttaacagttatttcctagccacatcagaattccctcctttctcaactaccttctttcctctctttctctctctataaagtctctccctttatagagagagaaagagagaaaccaaccatggccagagctactcgagcccgaatcctaatcgccgccactctgctccaggcggcggcagtattgtacggttttccggcaacaatgaatttggagagagcatttccaacaaatcaccgagttcagctgagtcaactcagagctcgagacagactccggcacggccggttattacaatccaccggtgaatctttcgtcgatttccccgttgccggaaccttcaacccatatctcgttgggtaaaatagtaattttccatataatttttttttgttaaagaataataaaaattgaaactttgattaaattttcaggctatatttcacacgtgtgaaattgggttctccttcacaagaattctatgtacaaatcgacacgggaagtgatgttttatgggtcaattgtaattcttgtaaaggttgcccaaaatcaacttcactaaaggtaactagttaccttaattgaaaaaaagttgacttttttttagtgaagcaaagaatttgattcttgggtttattattttgatgattagattgagttgaattcttttgatgttgggagttcaaacacagcttcaatggtttcatgttcagaccaaatatgtaaacttggacttcaatcaggtgactctgcttgttctggtcaatctgactttgatcaatgtatttactcatttcaatatggagatggtagtggaacatctggttactatgttcaagatttgctctatatggacaccgttcccgccgattacgacgatccgactaatactaattcgtcggccaatatcgttttcgggtgagctttttcgatcccatttatcactagtaaaaagaaaaagtaacactggtttaatatttactttcatatattttaaattaaattaaaataaataggactcgtattgtaatgttggaaactatataagttttctatcgccaagtgttgggttatgcttttggtgtcaagacaactagtgatatttttgtaatatttatctacaaaatggtatttttgaaaaatttagatacttttgtttataagaaaatgatggtatttttaataaattttgcacttttatttaagtcctatttgtctatactcaaggtcggcctctatataacaattcactttttacagacgtcagtttttagtaaacgataaatgtgtcatatgacaaaagacaacattaatcacagaaataagttgaagtacaaatttactccctactactagtgtaaagttactttttttacctcttccttcaaaacccaccaagaatttatgtgctttcaactagttttcacattaaaacgaaactcgaaaaacaaattccttagccgaattggtatcaaaattaagtcttttccggttactttttgtaaacagatgtagtacttcagcaactggggacttaactagcaaaaatgcagcagttgatgggattttcggggtttggtcagcaacaaatgtcggcgatttcgcagttatcttcacaaggaatagcaccaaatgttttttctcattgctttaaaggagacaatagtggtggtggcattttagttcttggtgaaattgttgaaccaaacatggtttacactccacttgttccatctcagtaagttttatgttttttgacaaaaaaagtttaaagaattcttaaaaataagaacactttttactaattttaaaaaatttcatttcaggcctcattacaatctgaatttgcagaatatatctgttaatgacaaagtattacatattgatccagaagagtttacaacatcaaccaataggggaaccataattgattctggaacaactttggcttatcttgcacaaaatatttatgacccttttgtcaatgctgtaatttactttgaaaaatttcaaataatttatataattgagttttttcttatgataaaaaaaaaaacaattaaccaattttgttgtgtgttatgacagattactaatgctgttaattcagaacaagtaactcttgttacatctcaaggaaatcaatgttacattatcacctccaggttaatccatcctcatataatcttaaattaaatatataagaatatttacagcataattacttaaagttttatatttgtaattggtataaatttgataaattttgtttaggggtaaaaatatttatagttactaaaattgtaattcgatcattttaaacagttaactttcatatctaacgactaaaatgacatgtgtcaccacctaattaggtcattaatatttatgatgtgttctaattaagtagtgacacatgacatcctagtcaccacctaacgaaagttaatgaacaaagagtgattgaattaaaattttagtaatcttaagtagttttgtcactaaaaagttagtgacttcttaaaacttacaaacataaaatttgcattgtgccttaattatttctaatatataatataagaaatttttgtaataaacttttcttaaaagttattgtggtagatttttttatctgttttgacatttaatagaattttttaatttaatttttttcataattgtatatgttata

SEQ ID NO: 298003 - DNA, 5340 bp, Cannabis indica
ttcctacgagagttcagttgaagactaaacatgtctctttgttgtgttctatttgtcatggggcaggtgaatcaattttgcactgtttagttgcctatgatttttcacagaattgttggcaggtagcgggtttggttatgattccagttgatgcagggtcgtttggagactggtttcttcatttgttctcacgactgggtgaggaacaaagtgttcaggcagtgatgttggtttgggcaatttggttcacacgaaatcaactcttgtggaagggtaagaaaagtcgggtgaagttcgtagtcaatttggctcgtatcactcttgatcagtggagaaaagcttacgaaagaagtttgtttcctgcgtttgacacttgatatcttccgggtgttagtattatcaaatttgattgtctggtattggtacaaactgttagaaatttgaatgttttgtcatccacttttggtggtgtcgttaatgattgtaaacaacttttatctttttttagtgatgtttctttacgttttgtcaaacagtcagctaatcgggctactcatcttacggttagaacagcttctttatatgctgatcgtattttttcagagtgtaatctcccttttaatgttgttgatattgttgaggccaagttggtgtagttgaatgaaatttgcagtccaaaaaaaaacacctaggaacgaaaattgctcaatccaagaaggcattagggtctctcaaagaacatactctcttgatcttctaaaagaaattggcatgttaggctgtaaaaccaactgatacttctacggtactaagtctaggtctaggttagacccaagagctgaaaaatgtacctttctaggctatcctccaaataaaaaagggtaataatcctattactaaacatcttaaccaaataatcttctcattaccctttggaaaggatttcgtgcctgaactaagaaccccaatgccaaatacatctcatacaatcaccatccgaaacctatagagaatttactacaaaaaatccagaatttggtgcacctagaaacattcacgaagcattaggtgaaccgagttggaaattggtagtgcttgaaaaaatgaatgttttgaaaagaatgggacttgtgagattgtagaattaccgagacaaaaaatataggatgtgcaaatgggtgtttacgataaaaagcaaagttgatggaagattgaaatgtatggctaagggatttacccaaatacatagaatatacaatcaagaaacatttgctcatgttgcaaaaattaactctatttgattgttgttgtcgctagcagtcgattctaattggcctttacaccaattagatgtaaaaacaaccttttaatggtgatctagaagaggaattgtacatgaatcctccaccaggcttcgaagaaaacttttttcttggagattttcgaatcaattgacaaatctttgagatttgatcaaatatcaagagtgcaaatctgtagagatttaaagatattttttggtataaatagacatttctggtgtaaatataagctgatttcctacattgaattagattattctttccttttttactttctttgtaaatgctataaagcctacattgtatcaatagttttaatatacataaaacagtcatacgacttttattcttactatttccagtggagttggaaaagtttgcaaaggaaatgtctttagatagacctaaacagtcccctagaacatggtttgagcactttggtaaaatgttaaagtgttatgggcacactcaaagtcaagttgatcacactatattctaccaacactcaaagaaaggaatgatggtcattctaattgtgtacgtagatcatattgtgctaacttgggatgatcttcgtgaattagaaaggttggagggaaaacttggtcaagaatttgaaaccaaagacttggtgtactaaaatacttttttggaattgaatttgcaatatccaaagcagcatgcattttcgtaagtaagctaagcataagtatgtgcttgatttgcatagtgagacaattatgataggctgcaaatatgccgaaacgcctattgaacacaatgttaaatttcaactcatagaagtggaaaatgtgaaggatcaggagtgttatcaaagattagttgggagactgatttatctatcacatacacgatcagatatagcattctttgtgagcatggttactagttttagcattcactgagacttaaacattttgaagttgtctacaaattctaaaatatctaaagggaacacctaggaagcgtctcttgtttaagtcactagaacatctagaaattatatagatgttgattgggtaggaagcatggtagaccgaagatctaactcaaactattgctcatttgtttgtggtaatttagttacacggcaaatcaagaagcataatgtaatggctagaagcaacagtgctaaatctgagcttagggttgtggctcacgacatgtgagagattttatggataagaagattacttaaggatataaagttatcacaatcatctcctatgaaattgtactgcatgcaatcacaattgctcacattgcagtgcttcatgattgcacaaagcatgtcgaggtggataacattttattaaggagaagatagagaatggactagtgcgcatgtcttacatacctatgggagaacaagtagtcgatatcttcacaaaagaagtttacaaaaaaatgtttgattttctaaatagagagttggttatggagatttctttcagcaacttgagggagagtgtaggaatgatttttgtgaggttataacacaggtattatgtatattgtttcagtaattttaggaaagtagttaataggaattatctacagtctttattccacgatttatttccctatataaggaactccgtattagtttaaatatactattagtgtgaagaaataaaatatcaaaaagaaaacccaaggactacaggctacaacttgggaactcgtgaatcaataaggaagaacaacgacaaccagtgccactggaggatttatgggtccgttgagctttgacagtgactaaatgtttcgtttatgtcctaccttgagctggtcaaaggttatgagctggatggacaaggttcttggtttggttggtagattctggaatggagcttgactcacagtctgaatactactcagattaggattccttgcatagttgtgttgttagagaagagacggtcattttgtcagtaatcattgaatctacaacttaagctacttaggggaactaccaaatacaacagattttcctgaatttcaccttgaggaaaaggtgaatgtttgggctgagggtaatgttaggcctcaactatgcgtaacatgcctaacaaattcaagcacaagaatagaccacaagtaattagaagttgctgctgagttgcattttcctaattggttgattgcatttttaattagttgaggaagatactttgttaaatcctagtaggagagagacctagtatatataggttcatttctccgagtttgccatctgattattgtatttaaatttgggaagagtaataagtgtctttgaagacttggaacattgtaactatttatataaatatatatatatatatatatatatatttataagtcaatgagaaccctaatagcagaattgtttcaagggttgatttactgtatttgatatttagtgtgttgccacatgtctgcccatacagcacaactaaaaaagacacccttactcagaaacatgtgacagactatcataatacattctatggagcaaactgccatcaagaatcactgaagtcagaaaggccatccaacaatatgcataaacaaatactaataaaattggtaatccaacaaagatagtggcaacccatcctcccaattcttacctccatgaccatcataaaccccaaagaaggaagtggacgcatccagatcaggataagcggcatgctaaacaaaaaaaaaataaaatcacagtaacttaagaataatctttgacaagataaaagtcacagaatgagacttgccagtacacaaactgaaagcgggcttgtcaatagaagtgaagattatttaaaactttaaatatcagaaaatggatcaatttctgatcagttctaatttagaaagaaaagattttattaattactcacagcatcttccatggatgcgcgccacccttgcattgatgataacccgtatcttagccgatcattcccaccatcttcagagagcttatcagttttgggagtactgaggtaagtacccattttctattcaaaataaacaaggcatgaactatcagaaaggaagaaagaaagaaaaaatatgtatgtatgtatatatctagatttttcaataatcaaatctcaaacttcaaattaaagaaaaatgttgaatacatcggaatcggttagtatgaaaaatcatcaaacaaaataagcagaacagaaccttcaccaacaaagaaaaaacccataaaatatcaaacgggatcagctcaatcaaaggtaaaaaaaaaggttcacgagatttaagcggaaacctgagtcagattaagaaattttaattcatacatatacatcaatcaatatcaagttaaacacatacattgtagaagaatcgagctaccaatttccatttttgatgaagaaaataaatcgcatacttataagcaaacaaaaaagtgaagaaacgaaaattactaacaaagacccagaagctaactttacatttccatgaagaaattaaatttaaataaaaaatatgaattttaaaaagacatttaagattcacttacatgccaggtttattcgattgtagtgagcagaaaaatcagaacccagatgataaatatattctgacggaatctgaaagaaagagaagcaggaattggttgaaattaatcaaatggaaaaatgaaaggccgtgaaagagaaagaagaatgagtgaagagaagaacgagactttgtggatggaatgttgatcttagtaagaagcagctttggaaattccaactaactgtttggacttttttcctcttacccacccacgtagactgtctaattctaattctgctaccactaagtctttttcacttcttttattatttctttttctaatttgatttaacaatattttaattttctataaaagaaatttattgttacagtgtaggtaggaagacaaaatctcccactaatttcgtttccttgaagtataaagcactcacgatttaggggtgttcattgtatcaaattcaaattt

SEQ ID NO: 298004 - DNA, 2275 bp, Cannabis indica
aaaattaattctaaccatataaaatatcttatttttcaattagtttatttatgtaatatttgagagtgagagagtgggatagagagtgtgacttgagtcctgagttctctaggtttctgttagttgatcttttggctgtatgagtgttgctcgtagagattagtcttctactaatttctttggtttcgtctctagaagttggcttcattcggttattttgtctcttcttttgttgtctttcagtgagtggagtttgttctttggttcgtttgtgtgttttctgtggtgaggtgtttttttcctttttgtgtatggggtagggtagttggtccttcagggtgcgtatttactccttgttgtctttagctgtctgtgctttaatggagttagttaccactgaaaatgccccacttttggggaaaagcttttcgtgcgccgaagcctcgatttctttgtctcagtgtgccacctcgctgaaggccctggcgtcattgtgcttatttggaaaggtgatagctcccatgaatgttgttgctgaggatattatagagtacgtaactaaaaattggttgaaaccggtggctgtgtgctctgtttcggaaccccctgccatgagtaactgtttcaagcttagctttgaatgtgtggaagacaaacaatgggctttagagaatggtccctggtcctttagaggatatacctttattctatatgcttggtttcctggcattgaaagatcgtgttctgtgaatatgttaaaggtgtgggtgcatgttcataaccttccccacgagtactactcgctcgacaatggtatctgtttgggaggtatgatcggcaaggttataaaagtcgagttggacgaggagaagccaatgacctggggttcttttttcaggattttagttgatctaagcttccttaatccgttgatgtcgggttgttattttgatctctcctctggggagaaaaagtggttacagtttaaattcgaaaaaatcggcatcttttgttataactgtggttggttgggccaccagcgaagaggatgctctttagcttcgccggtgacggtcgaatcggtggttggatctccttgtccgttatttggtccttggatgtccaccgcgtctagatttcaagatgttttctcttgtgtcacgaatccggagacgcggccttctgtggagttgcagacgggttcggccttgcgtgatgggaggctggccgtcgctgggcacggaggtcagattggtggctttcggtccaaggcggctgggggtcgaaacagatggaagaaagtgacgggtcgtgcttttcctggtcattcgcagggtgtgatgcagaaatgggtgcaaaagggtggttcgggtgagcatgcttccgagtttgccgttaatggtaatatggttgatgcaaatttgaattctggggaaaagaagactgactcccttccctgtttggagtcctcgaatgtaataataaaacccaaagaaccgttggtcaaaggtgggatgtgtactgaagatggattatgggaagatgggccgaataaagacaagagtggaatgggccttgaggtttttgggccggggtcagatttttctttgtgtaaaaggcctgaattgatttgtaatgtgggtaatgatagtgagaatgttttaaatggtgggccaggccgtgggaaagaaggggaaattaattgggctgctggttcctttgttttagcaaggccaaatgatgttaaagctcataatggtaaggagagtgaggttaatggtgggccacgtggatatgggggtgatttggtggatttggggaaaaagaattatacccatgagacttttgctagtggggccgtgcaccaagatgatgaggagagggctttaactcactttcttaaagcccaagaagagttactttatgaccttaagcattttgggaagatggacttgtatgaaattaagaaaattggcggtgacattggagtgaagccttcgtcgaaaactaatgagcgcaccacacctttcaagaagaggaaatttgagggctccgcttcactctgtacccgacccaacaaaatcgtgagacgtcacccggatgtggttagagactttccttgggaccataatgagagggaccttgggtcaaaggtggatttggatgatctttctgaagaaccttctgaggggtcgagctctcctagctgtaacaatggtgttaggaggaatcatctgattggctcttttgtaattgaagaatctggttccagtct

SEQ ID NO: 298005 - DNA, 3402 bp, Cannabis indica
ccgcaaaatatgatgttgaaaagatcactggttcaaatgactttggaaagaaaataaaatggaatctatcatattgaagatgttactgtaacaaacaccaaagcatgtgtgtcaagcaattagttggatgcaaaaatataattatggcacaagaggcttggccatgtgagtagaagggggctaattaaattgagcaaacaaggtcttcttggaaaggtaaatcttgaaaaataagatttctatgaatattgtgtgtttggaaaatcttgtagggtcaaatttggaactggaaagaagagaaccaagaaaacacttgactacattcacagtgatctgtggaggcccttgagaactacatctcactcaaaaggaagatattttctatccattattgatggtttttctagaaaactatgggctattattttaaaaataaaactgaagtgttagaaaaattcaaaaattagaaaataatgatagaaaccaaaccactaataaaatcaaaagacataggactgataatggcccaaaatattactcaaatgattttgacatgttttataaagaatgtggtatagccatgcacaaaatagtgaggaaaactcaccaaacgaacttgtagagaggttcaacaagactatattggagggggttacgtgcatgctattgagtgctggttttcttatggtattttgggcaaaagttgttaacacaacaacatatgtcatcaacaaatgtctctcaacatcattagattttaaaacaccagatgatgtatggtttggaaagccatctggctatgaatatctcaaggtgtttggatgtgttttctttgcacatgaggggtaggacaagcttgagcctagagcccaaaaatgaattttctcaaggtatctggaaggagtcaaaggttatagactatggtgcctataactaggaatgaaaaaatgcataataatcatagatttgacattcaataaagcaagcatgggattcattgagaagtctgctaaacctagagaaaattttgatcaagagataacaaaagcataagaaattgagcttgaggtagagttagacaccagaaatgggaaacaacaccaagtgatcctaaaaataatggctttgaggatgaggttgcacaactagacctagggagttactggcttggaagggataggtctagaagagatattaaagcaccagataggtatggtcatgatgctttaatttcttatgcttttaatattgctagtaaaattatgttgcatgagcctataagctatgctaaagtaatgaaaaaacaaggaatgtaagcaatggaatggtgcaatgtctgatgaaatgaagtcattgcacaagagcaataccttaatagtaatcaagaaaccaaaaggtgccaaggttaataggttgtagatgggtatacaggtacaaggagggtatactaggagttgaaccaccaaaatacaaggcaaggtcagtggctaagggattttctcaaattgaaggtgttgattacaatgaacttttttcactgatatcaagcatagttctatcatggtattttttttattagttgatcagtataatctggaacttaagcaactagaagtcaagaatgcatttctgtatggaattttagaagaaagaattttaatgaagcaaccagaaggcttcttggaacctagaagggaagatgaggtatgcttgctaagaaaatcattgtatggtctaaagcaatctccaagatagtggaatagaagatttgatgagtttgttactaaacttaggtttaaaaggagaaagttcaatccttgtgttcatttttcaagaaacaaaatgaagaaatcatgtacttcttgctctatgtggatgacatttttttggctagtagaagcatgcaagaaatagacaaactcaagttgaaactgaaggaaacttgacattaaagacataggtcctgctagtacaatcattggcatggatattagaagagatagaaagaaagtgttgttgcacttacatcagaaaaggtacttccagaaggtacttcaaacttttggaacgactgattccaaggttgtgattacacccttggcacaacacttcaaattaagtgttgcttagatgccaaagactgaaaatgaagtggcaaagacgtcaaatgtcccttatgaaaatgttgtaggatctctgatgtatgaattggtccatactagactagacattgcatataccttaagcattgtgagcaggtttatggtgaatccagaaagggagcattgggaagttgtgaagtggacactgaggtatccaaagggaaccttggacaaggactagtatttcaaagatgcgagaattagatagattaagatatagtaatgggttatgtaaattctgattatgctagctgtattgatactaggaagtccctatctgaatatgtgttcaatatgtttggtacaacaattagttggaaagcaaactttcaaaaggtagtggcttttcccacaattgaagttcagtatatggccttgacagaatcaatcaaggaggcactttggttaactggtctaatggaagagttaaacctcaatcaaaaagttatcattgacggaattaatcaaggaggcactttggttaattagtctgataaaagagttgaagcttaaccagaaagttatcacagtgcattgtgataatcagaattgtgtgcaccatgaatgtaccaaacacaaaaatataaagcttcatttcttaagggaaattaaagaagttgttaagattgcaaaagttccaacagaagaaaaccttttcgatatgattactaaggtggtgccaagcaataaatttgagcattgtctaaagctgattgggatatgagtcaactgagcatgtacggggctagggaacaacaggaccgagcaatctttttccaaacaacttcaactttcaaccaaggtcgagatttattaattatggttacaatttttttcttctgggtagctagttgtccttctagaaagcaattataagaaactagttgtcctttcggataaaaggattcaggaacctagctgtccttttgagaagagcttttaggaagctagttgtccttccagaaaggagttctagaaagctagttgttactctagaaagaagttcatgaaagcttgtcgaccttccattaagcttgttgctcatccagaacgtccctctagagagcttgttaccattttggagaaattattgtccaagctgacttggagatcttagaatgggtgttagttaagttggttagtattgtcattatcatatatatacctatcacttattgtaatccaaatcttgatcaaaataatcactgaatttcaaaaaggttagagagagagagagaga

SEQ ID NO: 298006 - DNA, 1770 bp, Cannabis indica
aaaaaaatataatttttttatgcattttaactgttattctatttatttttaaccatgttataattgatcatgattcatgagtactaaaaaaaacattatttttaatgtatttaacactatttactaattcttgttttagaaaaaaaaactattaattagcagcaatgtttaatatttctaaatatatgtaatgtaagacgagattttgttatattaggtgttcttacttataatacctctgattttgtttaagaaaacatattgttgtctaaattgtttgttatgggccaattttaccttttggtattagtgattaaagtttcacattaagctaatatttgataattttttatgacggttaatattaatttttatttttagaaatatcataatgttatcgagttgtccattggagaatttgtgttttgacttggtcggtggtattgtaaattttcgagtattaaagttagagttattggaataaaaattttgaaattttggccacttcaaatgatatggttgttttgttgaagaagacacttttagcatataagttttttcttatttattaataactctaagtctcattagaaatagcttttaataattttattagttgttaattgtatttatatttatgcattttggaatgttttagaagaaaattgaaacaagattgttgacttaagaatggaagataaagcttttcagtaatttaagtagaatgtatatgtggcaattttaataacgttggatataatttttttcaaatttttttatatagttttattaggagacattttttttttagaaatctagaattattaattgttaaaagatatagcaagtattctatctagtttttaagaaatgtctctctttatctaatctatgtatatggaacaactattatagatgcacatatattagttatgcatgttcttcaaatgaatgtataacaatttatttggttaaatattactttctaatctaataaaaagttataaatttatgagataattgtgacaaaaatatacttagtacttaaatgccgagtatttttaagaagcgcgccgagatgaagttcgaaaagtcctttcaaatattctcttgcctttccagcatcttcaaattaatagagatggttctgcttcaatcttctcttgtagttcttcttcaaaaacaatggcctccacgccaaatattcaagccattgatttcgtttcttcttcttctcgatcgacttcacagcaaatctaatcttctctaccaccctacatttctttgtcattgaaagttgagagaggaaagagcacttcaattaatttgaatgtacatgtttttgaatgattctacattaataattaatttatctatgtaattgatcaaaatagcaaaattaataatatttaagttatttgtcaaaaaaaaaaaaaaatactgttgatcaaatcaatattcaaggttataacaatatgaattaaagaaacaagataaagacaacctctaattcaacatttatgtattttaaacaagatttaatcagaataaacttattttgtagcactgtcatttatttatttttattttttatattgaaaaaaaaagagggaaattgtagtacatttgtgggtacgtaatgccaaaatatgcattataaagtttacacgtgtttaaaatcatagattatataaaaatttaaatcttcatccacacattaaaaaatattaaagaaaacttagatctaaaacgacagagctagcacactat

SEQ ID NO: 298007 - DNA, 3049 bp, Cannabis indica
gtcatgggagatgtatcattccccattctaagccattcctctatggcttctagctcatatgaaaatccatccacagctacatgtgggtttttcattacatcctgcattcaaaatacccaaaaacttatcactaactttttctttccttggattaaatatttaaataaatgattgaaaaaaaaaaagcatacctgaaatattggacataggaaaaaacttggcacttccatggggtcctctccatctagggctctattgattgccacgtcagatccattacgagtagccaagttaaattgtccacttgacactagatccctagctttttctctcaagtcgttgagctcttccataacagtagccaatttcaaatccatattgggcccacggtttctggacaaacatttcaacgtgaggcctgctagtctctcggctaggtccatgggccactgcccggccatttcatccaaatcccggatcaaacctgctctatccatagtcatggcctcaacaagcccagcccaatttctcccagtcaaaaggtgcatcagtaaaactccaaaggccctaatgtctgatctaatccattgctcatcaccactcttagaaagcccaaacccagttatcttggcatttagattgcggtcaaggagaatattggccaatctcagttgaccgtgaacaatgggcttgggtttggccatgtggaggaaacccaagcctgaacaaatctccgccgcaattcggatacggtcataccaacggagggtccggatccgttttttggctgaccctttgcgagagtacaatatgtctcttaagaatatatcccttaagctaccattgtgcatgtattcaaatactatgcattttaactcagagcaatagccaaccatgggcaccagatttgggtgcctgatttggctcaacagcaacacctgtgtcaatcataattccctatgttaaaattaaaatctaagtaatatgaattgttgaatttttcttaaagagtaatttagcatctcaaatagttttgactgttataatatgaaaaccaaaaacccttattaccttagattgaaaatcttcttgagacattccattaacagagtcaagccttttgatggcaaccaaggaatgaccaatgcggccgcgatagaccccagtccagtcaccgccaggcttcaacctcattctctccgagaagccattagtagccattctgatctgatccgccgtgaagtccttgcaaccgccactaggttgaccgaacctggccaccatttggatggcatctttctctttgcaaaactcaatccgacgctggagaacatctctctgttgccttagctcctcaatttccctaaccatctttgatcgtaagttgacagcgttgtgtagctgagcctctgattgagatttggccaatgtggatgcgtgaagcttgttggagagctcgttgttgagctgtgtgagtgattttagcctcttcttggtttcttctacctcggccatggttgcgtggaggtgttcctcttcatcttctaacactttctttaactctgttcgcttctttacctcttctttgatttttgtttggagttcatcactctaataattatatatatatacaaataaaatcaatatgtggtgctgaaaatagaggttaatatattatatatatagcttagggatataagtaagtacccggcgattgcataaaaaaatagctctttctgcttttgaacgcctttctgcattggccattgcttctattctcttgttttggactgtgtttttggcttctttcagttttgttttcagacactgaattttttctgcattactctgatcaaagtaatcaatacacatgtattttatttataagttataggtataaattaacatatacaaaagagtgatataacttctgctttttggtttggtttggttgatgtgcacttttttataagtaatccagtaataacaataataattaaaaaaaattgcctagtagcagtgacaaagtagtttttttactttcaaaatgtagttaaaatgctctatttcatttgttctagtctcttctctattttattcattttgtaaacagattaatttgcactccagtttaattcttaattataaataaatactaaaatttaatttacgtaataataataaattataaatttctataagaatctatctgttaagtgttaagtatattgctacgtgacaatctagtccaagtcatgaattttgttttttttaaaaaataatttaaatatatcaataaaaaatgacatgtggataatgattttacacttaacgacctggtatctagttccaaaaatataatttaaattttattaccgccaaaaattaaacttaagtatttatttacaattgagagttgaacttaaatatttatgttacaaatcaattttttttttttttaataatacatcactctcattatttttatatatatttttttatctatattattttatatttaaaatgaataaaaaaatatattatagaattagaaatagaaaagatgatatattttggaaaataaaaatttgatataaaacagttttgatgatgtattttgtataatagaaaaaaaaaaagttggctattgagggcaggaacactaattaattctagtgcaaatagcctatacaattcatggtatcactatgcactgtttagtacttgtaggaagaaccaaacaaatccccctcaaagcttttatccacatcactatcaaacattcaaaattatctcccaaggtcaaaaaggaggataaccaacaaacaatttaaaccaaataaaataaaatgattttctcaaaaaacatgtcttaatcaatagattaaattaactataaaaaatatatataaataagaagcaaaattatttacaactcacgacaaaacattaggggctcgtttggaacgccgtattaagtcgtattgtattgtattgtattatattgaattgtattttatgcaatatttttatgtaaaactatatgtgg

SEQ ID NO: 298008 - DNA, 6292 bp, Cannabis indica
tctttttttttttctttaatttcttctaaaataaatgaataaaaatttggttttatctaaatattatcagctataaaaatcagaataaaaacaagtccactaaaggacaaaaagtcactaaggtaaaatgaccataatgcacttgcccacactaaaagccaaacaaatcatttaggggtattttggtcaaatctaaaatctcaactattcccgacatttctaatgtctaactatattgccccgctatactaaaaatactaagatgtgattctattagccaaacaccgcattccaatgttaccaggcacaaaacatgcaaaaatattaaattccatatatgacatataaaatgtgttccatattcaaataaatttccataaattgataattcataaataaatatgcaagttttatagttaaaccctatttatatgctaatatccaaattaaagttaagcggtctttacattaatcttccctttgagcagaacctgtccaatttccttttccttgacaaagaagaaatatttatggaattcaagaaacacgttgttatcttctgttagtttagaaacactaactaagttattttttaatggagggaatttgacggacagagtttaattttaaagaataagagtttggacaaggtaaatcggcagtaccaatatgagagatacatattttcttgccatctacaactgataaagattttggaccaacataggtagtggcattgtcaagtgtggtgttggtgatgtggtttgtgacccctatattagcaaaccaaatcagatcatcactaaaattagcagaacacttagagtatgtgaatgaaattcatgataagtgttagcttctgtgagataggatctaggagtagtgaaccctgattttggagtgactcaatttttgtcaaatctatagtgacacacaatagccgtgtgaccaaatttcaagcatacttgatagatgagcctcaaattagagtgagaaccttgacttgtccctcaactaggaaatctcgattaattctcattaggattacctcgaccatatgactaagatggacaaaaattgccatttcttggtggtccaagagcaagatttgcctgcattttaagtgtaagattagctacagtgttgtgatgatcaagtcgatgctcatgggccataagaagagcttggacttctttaagagtcaatacaccacttttggttatgatgcctgagacaaatgaattgtattcttgtcacagtccattgaggagttgccaaatgagttcttgatcaccaattgttgatcctacaatagtaattgaatttgatagagtttgcactttgtccacataatctgcaatggacagagatacattcttaatgtgcgagaagtcacccttgagttggagaagccttgctttggattgactgggtgaatttctgctcaagagccttccatatagagtaggatgagttgtagtttgtaaatgatgcaagaactccctctatcattgaagatcaaagccatgagatgagtaattgatcattcttcttccactggggatattgcagatttggttcacaattaacaagaacacaggaaggaggtacattagtgaataaagtgtcgccaagattgtgacctgtgacagtgggagccacttgtgattaccattctaaggagttagttcgatcaagtttaacagtgagagaagcagtgagggaattggaaaatggagttgagatcatcaaagcaggtggtggactcagagcagcgctgagcgtgggattggttggattagtgtgaatgctccagtggaagccattagggacaaaggttagtggtgattgataccatgtaagagcttattaatggcagtattagatcgagatagaagaaataaaagaaaagttgcaaagcatgaaatagagcatgagaaatgaatgccaaagaaaagcttaaccaattttggttagcttgagacctttatataagatcaaagttcagtccaatagagatataaaaacatacatatcataacagattatcactgactattgataaactaaaaactaaacaactaacaaactacttaaccaatttatcattggtttacatcctagatccctaactaatattcattaccctgtggttgagttaacaacatacaccaacagaagccctctgcgatggccaaatcgaccactaaaggtcatttcttggtgaagctaaccctaaaaattgaagcccaacctagaaaaccacatgacccaaagaccctcacccttttctcctaccctatctctcttgccaacctcgaccaatgacgatggggcactctcggctatcgtaccctcaaatagagacattgatccacctcgctagtcttgaaaccttagaaaccccaaaggttcctttcctttccctcttccgaaccttctttctttttctcattattcgtggctcaacgtcggtgagccatcttcaggcgtggcttgccaaaatggatgtcaaaaatggcttctacaacccctagaaacatagaccccgtgatctcgagttcatgcgatattgctctttggtcatggagttgaggttccagggctcatgtttcggccataattgggactttttcgcctatcatagacatgtgccattgtatccgttgtaaactgggctaggggttgatcgtagtcaggacttggaacccttcgatacatagggctaggtgacctcccatatggagttagggttcctagaagaacgaagaagaagaagaaagaaaaagaaaaaaaaaagaagaataaaagaaaagaatataaaaaatattcaattattttaattttaattttaattttatttattattaaataatttttgtaattttaatttttatattatttttgtaatatttatatcattaatattaggtggatcaataaaaatttatcacaagtacattttgtacacagtggcaatctaccttggcacttaacagaccaaagtggacggaaaagttgagaccaaaacggaattgaagttcagggggttttaccctaaaagttcaatactaaaaggtggttgtgccaaatttacaagtttaaggattttggtcgcagattacccttattataaacaattaggttttgtttggctaccatatatttagtgacaagcccataaattttattatgtgaggacttagagtaaaaattattgaagcgtttggtgtgaggtatttaaaataatttgattataagaaatattatcaaagaacatataatagtaggaaaattgtgtaaactatttttgtttgtatagggtaatatgtaattatattttcgttcaattacatatattggttgagtagatgattgtttatatatattattttaaaaaaatgaaacaaaagaaaacatattattttattttaactatttaattttaattatacgtaaaaaaatatatttattaattagtaaatataaaattttattgtattttgattaacgaaaatgaacattcacttatattttatgcttaacatgtatatatactatcaccaataatataaaaataacccaatttcagacaaaaaaaataaataaataaatatcgcagactaaatatatatcgtaatttttcttacaataaatcataatattaatattattaaatttattttgagggggagcgatagtccaataagtgtctcgttttactgtctgtactgctattttgtttgattcaaattgttagctactcattaggatcactaaggtggagagtcgtttccatccattttatcttgtttggttcggtatcgttcaatatttctttgtgtagtttgagcatagttaattttgtcaggttgtttttgtttttctattttgatcatttcttttgttgtttgattcattgatcataatttatcaattagggagagattgtaaccattattatttttgtgtgtggcaaattatgtcctaaaattgtgtctggagtggttagtgttagtctacattgtatactgttagtgattgtccaggtcagcaaaagatattttgttatgatatagttgtccacctgcttacaactatctatttcggctttctttattcaactagacatatataatttttcttaattatgttagaattataacacttcgaattgttaagcttggattagatttttttagatcgattttctttcttcttcatttttttttgtgtatcgatcttcttacagggaatacttcaactcagctcttaactacatagatctaaagagattttggaacttaagattgctaaagggatttcaacaatatcacaagaggatcttgtgtgttcaaccaagggatttggtttttaaggtagtttttacttttgatttcagtcaaggaatatatcttggagttttgtaatatggattagagcttgtaaatcatattcttaattagtggagtgattaccttgattcttcaggagaaccaaatagtagctggctggaatttatttttagttatagtgaaccttgtaattttttggtattttgattgttatgcttgatgttgatttcttgtttctagaataaaactgaaattgtcaatataaaaatgatagtttcttaggtttacaaacttacaatatcatatatcatatatagaagataatttttatttctttaactttctcattattaatttgataattttaaagctaataatgtgtgcactgaaggttcattaggtataccgtattatattatatattatattatattgtttagtataatattgaattgtattttatacaatatttttatataaaattatacgtgatatcgatttttatgagtacctaaatatatagcataaattaaaatttaatataatattatataaaaatatgatatacaatttaatttaataaaatataatataatacgatcacttaatataacgtaccaaacgataataaatgaacaattttaaaagagacaaaaagtagtattcttttgagtaatgtaaattaatttagtatacaccatcatccctatccaagatatataacatatatttgagtttgaggtgtaggtcaaacagtaccacagaccaatttcttattcataaccttttgtggaaattaatagtaaacttgaatagaaaatttgatctaatggtcaattaagctataaagatgtccagcttaggtccccctagtgatgccctaatacaattcctttatgcctcctaccataatatatataatgataattaaacatttagtcatttatcatacgatgcaacagatatcaatataaacaattgattatattaatctgattttatattttacctaattaactttgtactacaaagcagtcgatctttttcttttttggtaaataaagcagcctatcttgacttcatactatcacataaagtctttcaaaagataaacgaactctaatttgatgacttgagtatctccaatagagtgtcgaatttatgattgattattatactcttaacacttttgcaacacaaaatacttctctaataatgtgctgaaagaatattgggttaaatttgatatatgttaaaagttatgttatatttattttcacaaaatatagtattatataaaatttgatacataataaatatatatttttttctcaaaaaatgataaatatacaatttttatttattataatatcattaatattaatgagtgaaacaatgttgaagtggcggagctcttggcacttcgtgttggccttcaacgtgcgaccgatttggggtataaagcgtcggtatttgaaacaaattcagtgtatgtttgtaattgggtgaattcttgaagctctaattttttatttagactaattatttttgaaattgtttatcttttaattattgttggtggtggttcgtgttgtgccattttacataatgcaaatagtgtggctcacacactgttaaattctgttactagttttatatgaatgaatatgtgaattgatgcttgtcctaaatttattaatatatactcctgtaacaattgatttaattcattaataatatcatattaattttttttttatcaatttaattgtataccttcaaatgttatattaatattgcatgcactgaaaagactcggtttgaccgagtcaaatgtagttttatatatatataaaataataataaaataatatacatatgtatgtaaaacaaaaaaaaataatatatatatatatatattattttgaataactgaa

SEQ ID NO: 298009 - DNA, 978 bp, Cannabis indica
tgaaatttataataaaagtaatatgtgattagggtagatccataaggagacaagaagaccctccattggtttaccttcttaagcatcattttttgctttgtttgacagatcttaataatggcattagtatactaaaaaatacttatatttgtatttaaataaaagatatcgggacaagttgtctattacaagacaagtctcttgttgtttcccaataacattaagaggaaaaacaaatgagatttttaaagaattacgtgctgtcagtctttcatttataaacacattgaaaagaaagaggttgatcagtagaatgccaacccaaactcatttgaatttgatcctactttatttatttaattttcaacacaaaaaccatatgattttgtgacaaatttatataattgaatgaagactctgttttctaaataaaagaaaataataaataagaaagtagagaaccaaaaattagaaaaaaaaaaaaaatgtcattaaagttgaaaaacaaatggaataggcactttgataccatatcatatttatgtgaaaggaactaatcaggtaaagtataggaaagttcaagctgtaatatgccatttaagtacccaaaaaaaatgtaatatgccatcgtgtttaattttcatagcactcatcattacatatattataccgattgataattaatagtgtatctgtattttgaatatatagagcattctatataattaagagtgtaattttaaatttatagtagagtcaacagaaattaataagatagagaatttactcgataaattctagatgtacttatttgaagttttattatataagtccatggtccccacactagtttagataatattggtttgtagactcagttaattggttttaattaatcaattataattctaaattagactatgtataatttatgaatttttactaagcaaaaacttaattgagaaaaaaagagatttt

SEQ ID NO: 298010 - DNA, 1990 bp, Cannabis indica
catataattaaatcataaaccctagttgagatactataaaaagaacatgttgctctcattctcatccaacaactcacttcaacaaaatttaacctagttttcattctctgtcaactagaagatgagagactccttttctatagttatttcacacattattcattgttcttcatcaattcaagctaaagtgatagagtaccatgcccacacatagcaagtcaagtactcaatcatagtgcggaagacagtgggaaggagagaaggagatccaagctcggattttgttattactctgtgacagaaaggaacaagggttagagatctgataagaaggagtcatattattctgctgccatcaatgtaaggttttctaaactcctatgtgtttaatttcatcatattagagaattcatatttaaggtgttaatccaacttacatgttagtaaatctagatcttggtaaaataaatcccaacagtttcctattttagcttgaaattattctctgcctaagatttgaggagaatgatttcctttttgctgaacgaaacagtaaatggggaaactactactggcttccaggtacacactggagggttcttctagctacacggagctaggatctttctggatacggactagccttggcggagacttgtttgagcaagaagtgtgattggcttccttgaaggctaggttggtattgggctcggcccaattcatttcgtttggtcccactaatggaccttgaatttcatttggaatccacgtgtcccttgccagaaatatggataataatattaaattcaaattcgacatctttcctggactgttggatgcattatgcgttttcttggatataatcttagtcattaattcgagagcatgtagatcaccatctttgttgtataaatgcaataaaaattatccatttaccacttttacccaaaaaagtgggaaaacattcctgatgaatgaaccagtactttggtgattgtattcgcctccttctttgaatttgtgcatgtgaaaatttgggagcaccggccccaattttaaccattgaatcttcaactttaacacaaccatttatctttaagtgaagatcaaagcaatcatcagtgaaggttgttctcttcaaacttgacttgttgcctcaaccaaacttcttctataggggtttctttaagactgccacacgtcgttcgaattccctctccaaatcatccatcttccccaaattcttcatcaagtaagtaacgttgacattttttgaaattgtggacaatatcaaaattctatctttcttctttaatgatttcatgcttgccttaagaggtagatgaagagaatttaggcttttgggaaagttctgaacattttttttgaaatagggatactttatgttcatattgcttgtagacattgttaggttctgcaatcttttatctttcccagtaaatttttgattgaaatggccatgtcttagcaacatgcattcaaaaatttctaaaattatttcctctgtctagaacccttatggttctagatgacacatcttaggattttatgccttaaataacacccaatttcattgtaatcttatttactttcaaaagatcagaaatcatatcttcgctttttcatatgctttttcacatgttttatacatgatataagtttaatatataagttctattaaatgtagaacatatagttattgacaattacagtgatgttatcatagtggaaattaattgtgattatatgcttcaaattatttagtcccacgatttatcagtgcactggatttacactaaagtgataatcatcgatggggtttgcttacccttggataagtggaatttcttttctaggacatctattaagtaaactagcattcaatgtatcattagaccgatattgacagtcaaaatgatatcataaacttaccgttatatcttttctatgtcaatatcacttagttgat

SEQ ID NO: 298011 - DNA, 3314 bp, Cannabis indica
tttaaattttttttgtaaattttctcataaaataaatttttttgagaaaaaaatcatattataacaaacttataccttaaagccataaaaataaaaattcccctaattaataatcttagcaaaataaataaataaataaataacaatcatcattaaaaattcttgatttttattattcatttatagacaatatataattcttcacataatacatgaattgggaaaaaaaaaagaaatttacaagaaaagaagtgatgtgatatttttcagtataaaatttacataagaaatatatttatatatttatatagccaatagatattggaactcaaaatcagagggtattttttcaacagtagcagtagaaataattcttccactattattggatctaaagcaatcaacaattgattttctaagtgagccagctgttggtaaatggtgacaaacccactcaactagtaactctttactaactgcaaaatcatccatatttgtaacaagtaattctggtaacccaatcttctttgtgcttgttactattattgaagcttgaagatactctaattttgatctttctaattcagccacaacactttcacctgtgtacattctcacctatatatacatatatagatacaattaatttgtatacttattaggattagtttatttattattagaaggtgtctaataacaaaactgtgaagacttagactcaaaacgtacaatatcataaatgtagagatattgtccaatgtcctaagtaatttattgattaattaaaatgaataagaacttacagctggagaagaacgagttccgcaacaaagggcaaatgtcacattaggatctgtcgtttcgaggccataaagttcgcgaacgactgattctttgtcgtcgttttcgccattctgaaaagtgttcaaattatgagtgtgatttgtggggtgaccagttatcttagaataattagaagggtaatcaattacttccttagttaaagtaaccagttaccttatattgtttttctcaaactattgtaacactttttcacattgtcatcattttaattaaaaaaattaaataaaataatttatgtacctctttcatgattgagggtgctgatttcctcaaaatataatgctcaatggcttgagcattgatgatatttccaccaatgttgagaattgcctaataataataaaaataattcaaacacttgtaattatattgtaataaattcatgaaagaataaacttagtttaatttaattagtaactaatcaaaattaatgtaccttattcattaatgttagcaatttttctggggtagatggcactccatattggatatatccctgaaatattatatgagagccttaaataagaataaatttaattctatttgaatggaaaaatcaaaaaaaattttgaatttaattaaagagaatgaagaaaaaaaaagctttaattttgtaatatatacatgcattatacaagcattgtacatgttgatccaaaatgctaacttctgatggtatgtcaagttcttcaaattcactgtctgaagattgttcatcaataacctgttgtgagtattaaaaaaggaaaaaataatataaaaattcaaagtgagtgagaaatatcgaaattatgtaagggtgtatttagaaagtcgttatgtaattgaaattgagtataatttagaataattattacgtttcacatgtttagttaattgggcaattacgcattaattatgtaattaaaaataactatagtttgctaccaattatatttgtcattcttgtgagaattgagtgtaattacaaaatattacacttttgtgtagttactatttataaaaaatatagcaaaaatagtttagggtgatagttaccccttagagtaactagttacttttttatggttactaattactttatctagttttctccatatcttttaactttttttgaaacttttccataagatcactttttgaaggaaacaaaaaagcgatatttttgctttttccataaaaattgtaaagatggaaatctctaatgaatattgtgacattttataacacaccttaattttcttaggagtggaacagagctagggcttgagatgcattttggatccatagagcttgaagtaaaaataaccaagtttttataaggtccaatgtctcttggaatagactcttcaagattgaagatgccataagggtcttgttgccttgattcttttgatgatgagttcaagccagcctcaaccctaaaacttctcgagctcaaagtcgaagagtattgcaatgaccgcgaaatggggccagatttttcaagctccattgctctagttgttctaagaagcctaatgtagatcaaattcagacacttcatgatttcctcagagagcttattaggttgccaattctgaatgttattctcttccgaactttgaactagtgctgacacaggcttcggtggaaggtctaaattagatgtcacaaaatttctcataggctgaaaataattaaaacatattatgaagacataagaaataaattaatattataaaaataaaattttatttattttattttaattaccttaggtgatggatttcttatatctctcataggagaagatggcttcaacattacaccactttttcttggaactttttcttcatgaaagtaattattctctttcatatttccccttttagggtttagactaaagtcattattattattattattaagattattattgttataataatcaccttttatggctttacttatgaaatgtaatgttttggtttcaacaccattaatattattagtattattattattattattactattatgcattggacttggaaatgtgaaggatgatgatgaagaagaaggattgacaacggaacgaattggcgatccgaatcgccattgtttcgattttgattctttgttctttgttgctacttcttgttcatgttgcactactccaagtttaagttgattgatttggctctcaagtcttgaaatctcaccttcaaccatagctaactctgttaatagttctttagtctgcacataataatgtaaaaattcactatctttactcattattaatttcttataaactatcataattatgatttatattttttattttttttataatatttataaaatggcatttttgaattttttagggccttttatatataaaaataggaaaatttacaaaaatactggaatttgggttaacttttacaaaaatactgttacatgaa

SEQ ID NO: 298012 - DNA, 1162 bp, Cannabis indica
aacacaaatagagaaaaagttgtaaaaattcatgcaaagaaaaggaaatgaaaacttactcactgttcgacttgaaaaatcttgaagaggatatcctcctaaatcttgtctgcgcaaggaatgatctggaaaaacttcaaaatgaagaacatagaattttttgctctgaaagtttgaaggtattaaaagtttgaaatgaagcttggaggagtatttataggagaaaggcagattgggaaaatattttttagagaaataaattcaaaatgattactttttcccacaaaaatcctagaaccctttctttttattaaaactgtatcaaaaaagtgtaaaagtcagacacgttcccctatgcactgaagttaaagatcattatgaaaaaagatttgaaaagacgtaggaaggattcgcatcaggtaggcacgaagccttaagggacaaatcgtgtaaggaaagatgcgtgtcacttggccatgcaaagatagaagctgagaagtccacgtacgaccagacgctcatacgcgaacttagagggcaaatattatcctaaaatgacacgtgacagttgataatgagttaggacggtatgtagttaagtaggattgcccaaaaggttttgggtggaataactgagaagcaaatatggactatactactctgccaaaagggttggcagctctaaaagaataactaaatatcctcgattagcttagaggatgttccctgggcgacatatcctaccaacaatgtagtgaagatagaaatcagatttgtcttaaccgcccaatccttgaagattaggtcatttcaaatgcttaaaatagtgggattgagagaatcaaggggattgaggagatcgtgtgattgagtcaattatcctttattgtttattctgtaattaatgtaattgatttacctatagccctataaatactaaatcattctcactattcagggggtgaactctaattctttaagagaactatcacactacaaaatattatctgtaatttcaatataagaatataaaaaattcattgactgttgagaatcatgaggttccatctcaaaactaattgacaatgagtggagtagcccatgttcttatatatggctcaattctctaccatttattccatgtgggacattgtccacaata

SEQ ID NO: 298013 - DNA, 6464 bp, Cannabis indica
aaaacaaaagtgattatagaacaaatttttatttttcaaaattaaaattttaaaaacaaaaatttcacttttatttttgttattaaaaaatttacgtatgaagaaaaagaaataacgataattaataagagaaatagagaaagaattgagagcgggagaggagaggagtagaaagaagaaaggaagaaagaaaaaggagatgaattatgaaaaccatttattcatttcatttttataattaattattgcaataataattttttttttattgtaaaataatatctcatagcttaattagctgttaatttgattgattccattaaaattcgccaagcaaattaaagcaagaaaagagacgaagagggtttgtttgaagctcatctcttttcttttgagtcccaaaaatggacgatgaagtggtacagcgagtcttccaagaaggaggccgcgattacttccagcagcaaccttccacttcttcttcctcttcctctatcctccaatcactccctcttcatgtggtatatatatatatatttatattatattatatatgtacatatatggttttggtctttttgtgcacgaatatgggctgtgatgaacgaattttgttggaattatagaaatttcccggcattcggtaacttttatatttagtatgtaattctaaagtgcattatgtgggaaagttggattgttttgttaattaaaaaaagttggcttttcacttgttataaggatgagagaggtgaagttaagttgtcttggtgtaagttttggcaattagaacaaaagggctgatttgttttgtctttattttttatgggttggttatcttatatgtttgttttggccatatgcaaattcgtcagtatgaaaggtggtggtggagactaaaagagaacttgaattcatctctgatgcgttttagcttgtatttttttgctcattaaaactactaagctgtttgggctgcttggaaatagtagcatcaacctataatgactctttatatatttgtgtgtgtgagtattttttatggactttgatcctagaatgacaataaaagatatgtagatgtatataaaaatttgtttgtttgtttgtttgttcgtttttttctcttttcctctttcttctttacattttggtggtcacctataattcttaaagtaacatcctagtggttattgttgtaatgatttttctggtggtttgatacttgttagtttatcctgttaaataatccttatgtaacataagtgaatctatgttattgtgctcctgcaatgttgctttgcatgataggtacttttggcagtcaatatttttcatgtattatagtgtcgtctgtattagagccaacttgtaatcttaggatgtggtattatagttttatctttatgtgtatgattgcaaatgctgtgtaaattttcacaaaaaattcctaattgtggattcggttgaaatgttgcagtcttttgattacggctattatttgttagtaaaatcaatccaagaactcagagagaaaaaagagggtcttgtcacagttggcattggtggtcctagcggttctggtaaaacaaggtatatactttccgttgatgaatttcatgtagctgctgctgcttcttccctctttgaaattttgagcgttaatgttattttaatggtccctgaagcttagcagaaaaggtggcatccgttattggttgtactgtcatatcaatggagaattatcgcactggagttgatgaagggaatgatttgggcttattagattttaagactttagttcaaaatcttgaggtatgcttcttaatgtgctatattagtttatctacctgtttgggttgaatgatgtcaagacaattgtcttgtcattgtaatgtcatgttgtttttgataatttatataaccatacttatataaccaccaaagttaagcacaaatgctctagattttgtacatatttttgctagttaaagtttcagcttcttctgttcagtattatcaactcaggtcctgaatttgtcagcacattctaatctaaggcaattggggtcctatgcttatgtttgtgtttctcccagttctggtgttttgtctttgtttgttttatatgcacttatggtgagactctgttgacataggatttaacaaaaggtaaagatacaatgatcccagtctttgactatcaacaaaagaagcgggttggctcagaaacaataatgagcgcttcttctggggtggtaaggatgtctgaattgcatttagcatgataactgtgataattattcggttcattctgagaaaatatacacttatatgaatgtatgtagtacatatgcattaacttataattggtttcatttcttcactttatgtttaggtaatagttgatggcacctatgctctgcatgcaaaactgcggtctttgctggatattcgagttgcagtggtgctttttattatcccatcctttgttttataatacatgttcgttttggtttatattgaaagactgatgcagccgtatgtaaatctcttataccaggttggtggtgttcattttagtctcctgtccaaagttaaatatgacattggtgattcttgctcactggattaccttattgatagcattttccctctatttagaaagcatattgagccagaccttcatcatgcacaggtaaatatttttctggaatttagtaaagctggtgtggggcaaattatgtatcatgttatctccctgatccaattttcttctgtcttttaccacagttgagtgtgattttccttttggttgcagattagaattaataacagctatgtctcatcatttcgagaggcaatctataaactaaagtgcaaaagtgaggtacgtacctttctgttaggatattttcaatcgatgctggacttatttatatacatagaacttggaccatcctcatttatgttcttatggctgtatatcctaagtagtttaactttagagacaagacttatgtattgttcttaaatttgatcttttcctataaaatggtgtaactgttgtgttaagccattttcagtggatgctggactttgctacatgcatagaacttggtcctttctcatttatgctgttcttgttttgttgtaattccaagtattttgcggacaggaaatgtccattattctctaggactaaactcgtgtaactttctattaaaataatacaactatttgctttattgaggcacgtatggagaaatgaacactgaaaggcagaagaggagaataattcatatgtcatgaacacactgtgattaatatatctgcagaaaaatgctctgttgtcacttgggacctggcagtggggctgcatgaaatccttaacttaaaaataagataacaattaaaatgtctaattggcgaagcaactgtggctagaatctttactgaggtggatctgttatatttgtaaagagatatactacaatacagggattacatggttgtgtttgtgtgcatgcttctttctttcttacattattttgcccaaataaactacttttcatgttaaatttcttctctggtatgttgtgatgtctactacttttttttcctatcaatttttacattttatgtttttttttttggaaaataagcatgtgatttaattcaatttttttatttattatttttttgcatcatcgatacagtctccaggtggacagtctgcatattttcttcaagaatatgaagtagaaacagataagtgagtgttgtaggctgtttattttccaagtcctgaccagttttttacaacgatattgaagggaagaaactgtaattaccttttgattttttttttcatttttgttatcagttttattgagatgtacctcagacctccttcagccagtgaagaagcactgacaaatgattggataaaagtacgtcaatctggtattagatattatttatctcttggtgatcagagaattgttgacaagaattacatcatcaggccaaaagctgagtttgaggtaaggcatcatatcttagtgattactgaccagattaacaataatgtgcaaagtaaaaagacccaagcttgttaggccttacatttccttttatgtatttctttttgagccagagattcctttatccttgctatatccctgcagcaaaaagaccttagtgatttgactaaatttgattaatttttgtttgtgtttctggattagagccaaatcccagcagcagaaccttcattaattgatttatgaagagattattttgtgcacccatattattatgaagcatctggtcctttccttttactttttgttttgtttgcacttgaagataattcctgcttaagactcctgtgaaagcacttgtgcttggattatgttatctgtacattatttaatacataaccacttcatatgctttgcttaccgattattctcttaaatatcaaaagcaggttggaaggatgactttaggtgggctgcttgctttggggtacactgtagttgtcagttataaacgagcatctacatcagtgaataatggcaatgtatcaatttcacttgaaacaattgatactcttggtgagacattcatggtgctgaggggcacaaatcgaaaagtatgaacttgaattctttactaaaatgtgtttcttttagtacttttttttgtgattttcttttggagaagttttcaaagggtggtggccatggtttgaacacaggaccaaccgtttgatgaagagtgacttagctgttcccttgggacgtaaataaagtcattatgacttgtgtgcctatattattactttggaaaggtttactgttgatactatactgatgtcgttatgtattttcttttattaggatatgttgcattagtgtcctgtgttttgaagttctttctattacatatgaattgtatattgggtattggggaggttatgtggacagcctgtttggtaaacaaatgaagttggtttactttgggatcgaccaagttactataaggaaacacatacattacctttagcaatcttcttcagcatggttacctttatcattcttgttcagcatggctatacatgtaactgtatttaaaacttattatcacctcggttaatcttattttctgtagacagttggaaatgaagcatcagaaatgggcctcagtggaccgtggctcactaaatcataccttgaaatgattatggagaaaaaaggttgtaaactagtctatgtttttctaatttattaatgtttattttacttgtgaatttgaaattattcaaaagcttttatggggtttcctggagccctttttttcaataaatttgtgtgattcaatcttctctatcctggcatttgttttatggtgattttgaaaaatataaaataaaatacacatgtacgagttattgtcatttttgtctccagagtaacgaggtttatgttgttggcttgtacaggtgtacctcgtcttaatacacctccacttttgcctaatacatccctggctagcaatcaagacaaaacgataattgcaccaaggccaatccgggttactccgaatcttgttaataagcttgaggatctatctcaaccatggactcgatctccaacaaaatcaaaaatggaacctgtagtggcaacatggcattttatttcttcagatcctacagcagatagctcagccataggtatgtttgtttgactcagactattctgcttgccagtttattttttctgggtgtgttgccatcatcatgtttaaacttctctcatgaagcaaccacagatccttccactttcagggacactatgaaacttgctccaatgcccgattcttatgacctggatagaggattacttctttctgtgcaagcaatacaggtatcaatgagaggataagttagaagtctcttaaatcatgttgaaatttttacagtgagaacttgagcagaattatttatataattcttatgttgataatttcaggctttgttggagaataaaggtttcccagttatagttggaattggtaatatgggttctgtagaactactccctccctcttcttgctgttgatattaatcttgtctggattttctgctagcacttgcatatttgttatgctattaaagtatatacattgacgtgcataggattttctgagtgacaattaacatgtttatattctattattagttccatctgagttggaatctggttccactcagtggctgagataagagacatcctggatcagctccaccctatcttggatttatactttttatgtggaggcttaaggaagttttgttgctatgatgtcttggtgttttttttaatgaattttgagtagaagttccttgaaaaagaacatgacggttatcttatttatttattttttattttattgaa

SEQ ID NO: 298014 - DNA, 2287 bp, Cannabis indica
aacatacttgtgagtagatctaagatcctggtaaaataaattccaacagatatgactcggttatggcaaagacttggcttttttgataggatttcagtgccttctcaaggaaattcaggtggtttggctttgttttggagaaggggatagaaaccgaatatgtctcaagtaattttaattttaattaagttcattttgtggaagatagaaatatgaagccttggtgtgtgtacgcaccgccttggagagagttttggaatgctttttgggaatctttgtgtgctgaagtgggatcctctgatgaaagatggatggtaataggtgatttaaactcagttttgcatcgctcgaaaaaggtgggggcaaggtttgcgagacttcatgtttgtcacaggggcaatagctctttcacctagactaaaggtcaggactagagacatcttattcgtaaaaaattggacatgctatttgctctactgactttgttgtcctaattttctaaggctaggttacaaataggagcattaaacaatctgatcatgcgactatccttcttgatacctttaaagacatggaacgtattagagcacctttacgatatattgatgcttggggtagacccaatatgtaaggacattattaaagaggcaaggagcaaatatgtaagtggttttcatagctttatttttaattctaaattaaagaatactactactgccttgaaaaattagaatctagagtgatttggtttatgacaaaccaagatgaaattattggaacaacttctagttgatgtgcaaaataggcccccttcaaaagacaacgttaagctggaagggtctattatgctcgagttggatgagattgaagcctgtcaacaatctatttggaagcaaaaatctagaaagttattgctcatggagggtgattgtaactctaggttttttcatgcatctatgttggttcgccgcaaaagaaacttcatttgggcagtttcagatgatggtattaattggatcaataatagaccatgtatggctgaatacttttgattgaatttcttgaatatctatcaatcatctcatctagatctaaattacgatgataatttcttctttctcacaagttctatcacggaggaagagaataggttgttggaagctatcccaagcggttatgagattaggcgagttatgtgggatctccctcctctcaagtccccgggactagatggtttcttggaaaaattctacaaagataattagcagatagtgggaaactccaattcttaagacgttatccaacgacttgttttgaacgccacatccacaaagatgtgatctctcacgagagagatactatccccaatagaccgattcactacctctgaagcttctatgttaccattgttcggcgccctactatgttcctcgaagccacgcataacttcattcttcattaacctaaagggcttcttagttccccgatgatatatctcgttacgaaattcccaaggtttaaggcaaagaactgccccaaaatagaaaaaaatgaggacgttgatcacacaaagtattatcattagcaaaaagagggggaaccagtaaccagttgacagaatcagcccctgaggagagagaaatctgatcgactcaaatagaccatctactagagaaccacagacgctgagtaacaggataacgtgataagagatgcagcattgtattgcaaccttccccattacacatcatacacttacaaagacaagaatggaatattttacaaaacttcgattttgacagaagactattccagtatagccaccataaaaataaatttagtatttcatggatcttagctcgccgaatttcagtaaaaatcaagtccaagaccacaaatcttggagatttcaaagactagtaggctgaagctttgatggttatggaagggagttttttagtagtgacttgattggagtgaggatattcctttttttagagacatttatattatgtttggaagttaaattttggtggggaaagaacgaggtaagaaaaatgtaagaatataaaaatgtttgaaaaataaaaaattcacatatttggtatggaaagaattgtatggagaaagagttgtttgaacaaaaaaattcgaacatgaaaaactaatttttttatttatttttcacacttttatgttttcttacatttttcttttcacatcaaaatcttgttggaaatatcttaccaggatctagatttactaccatgtatgtttcattaacatc

SEQ ID NO: 298015 - DNA, 1583 bp, Cannabis indica
tgggttttcttttgtggtttgaagagagagaaagaggagtgagtgagggcgatatggggggttctgttttatttgttttgttttatatatacgtatattattattattattattatttatatatttatttattttttttgactcggtcaatcgagtctttacaacatgactcctaggctcggtccaaattgtaataatcaaatttaactcaaatgcatccgtttaaaaatgatgataaaaagttagagtcaattttaaatcggcgcaaagcagcaccggtcccaaatcgacaaaaaaattaaaacaaattttttagcatcaatttagaacgttgactgacataaaaagacaattttacattagtaattttaccataaaatataacaagtacaagcactttggtaaacccttctatacattcttacaatatagatggttttaaccccattaaagtacaatattatttttcaagtataattatataattttactaaagtattctagaaatgtctattggaaattgtacattaaagaataataatataattcatatatattaaattatataataatataattccatattaatacacacttaactagttaggttttggtaattcgactccttaatcttagagtattacaacagcagagttacttcctccgtcacgaccaaaggtaaaggtgtgatatgaagaaaggagatcccgtcgtcacctaggcacccaccaccaccaacaccacgagatcccagtacctcgcaatattgccctagaaatgagaagcgagctaactttatgggcccaaaatcccaaactcgccactatgaagacgaaataaaaggtctctgctagaacaaatggaggttagaaacaacgatggctggcatgcaaaaagtactgagaaccattctcaaaagcagaactcaaactctgccctttctgtacaaagtccatcgacaaaagtgcgggatctcaactgtacacgaagacgggaaaagctccttgtcgccaatggatgacaccctaaaaggtcaaagtagaaatggcctgtcgtgaaataagaacccaagaggttacttagagcaacatgaatctatctgcttgggtaagactgcaataggggaacatcatgtagtcttatgaagagacttcagccaaaaaatcttgtgcaagggaacaccgcacttgcacctccctcttaagagcaatgaaagcgtaaggtgtctcccctcagccatgatggagaaccgcacaatgatggagaggagtactactcacaagctttatacaaactgctgggaagatctaagtcccgttcaccaactctcaagaaatgatgaactaaagaatgaaagagctagaagtagagatgtaggatctacgtcgaaggatggctacaacaccaaaggaagatttcgaggatgatgaattcgacacgaaattctttttctcaagggaaattaaaatggaaccacttccacccagttttgaaggagccctacatgatgccattgtaggtattatatttatccaggatcttagatctatttgcaagtatgttgatttaacaacctaatattg

SEQ ID NO: 298016 - DNA, 3698 bp, Cannabis indica
ttcattaaatgcatagataattagtattaactaaattttcaaggctcattcgttttactaattgttattttattagtgattgatttattcaattaccaggatactcacgagtcatgacatgataatatgagtcatgaaagggaaacaaacaagtcaaataaatattatcactagtattttgaggaaagaaaaaggttggtaaaatgtaagaaaaataaaagcgggaaataaaaatagtaaatttttatatttggtatggaaagaaaaattatataaaatacattcaatttaacaatatttttttcatatcaaacttaaaaaaacaatttttttcatcacattctattttatttttccatttttaatctttcatcgtcaaaatccagctttcatccaaaataaaaggattattttctgttactttccttagttgttttctacattaatcaagttgattacaaagctcaagttcagtatggtgcaccaccaagagctaagtccaaaattcaattccaaaagctcagcttgagtttctccaacaacactgattttggcttcagatttcccaaactctttctctcttattcaatatgaattcgtgtttcactaattacaagagattacaaggcttaaatagaagttttacagctgactgaaatgactaaagtaaccttggtgcattgattaaactaaattaattgaaaattccaaacaacttaacaaccttaactgtcaaaatttttaaagatgtttgtatgtggtctagttgaagtaatgagcctccatttcatttttttagttagaacttcaggcagttcttaacaaaaagaaaaaaacgaagtacaacaatagtgagttatgttcgatctaatctaacttgatgttggatttgtttacacaaatatgagtaactttgtttatactaatcaaacaaataatgctatttaatcaacaattgttggataaattgtgatttacaacctcaccatatcaaacatctaaactctacaatatatatatttttctcttttctatcagcttcatgccaataaaagtcagacttcgagttaaaaaaaaagaagcaaattatggctaaaacctataataagcacactgaacagacattagctctgatcaaaacagtaacttgcttactcgccggccgccatgaataaataaccggcgggaaaaagaatcggtagttttattttgttattattatctctttgtgtttttttcactataagaactggaatgtcctctgaattgttatgtgaataaagaagcctattagtgtccaactaagtatagagttgtaagcttcattctgatgtgaactgctatcgcttagttgccccgcattcacaaattcggtttttcccatacttgaagttgtcgagacattaaccgacatggaacctatgaaacaacagatcagacatcagatcaataatctaatcaaaggcatccaattgttgttttgtgtaagaggttggaaacttacaatcatagtttgtccatccaattctatgagcagccaaatcataaacaacaattttgtctttgaggacaagatctgcagcaaaatgaggatcattttaagatatattcagcatgaaaaaatataaggttgcgtttggttggaagtaatgaaatggaaaagatcatccaatgtaagatttttttttattttcattcttattcctatgtattcattcattctaaccgagcataccctaagtttcggtaagcagtcattaacacttttttttcgaacgtgggaaaaactaaacttttgagaaaagtagtttggcgattcatgagctacagatctttcacaaagttacaattcaattaagtgtggtgttatgatgttgtatacctcctagaattgttatcccttgacccgggattttctgaaatcctatgcaccaaactgctgcaccaccctgtgtcatgtaagataaaatatatcagtttcggcttaaacatttgggaatcgaaaaaacagtagtttctgcatgtaaatatataggcccctaaatatataactgttactcacaatcgaattttgttgaataaggtaatcttgtggtctcaaatacatggaggcaccaccagcaaagttcaaactaacttgaggaaatatctcggtgacactgtgccccgaaacattcaagagttaatggatgaatttggattatctcgaaaagccaaaataacaggttaaactaaacgaattaaggaaagaacctggaggtgattaaataacattgacttcccttggcaagaacaggtcttgcagattgtgaaactgcattggtaatctgcagcacaaagataagttgatgttataattatgagcaattagtgaaaattatttgcttttgcaaagtagcctttttgacaaggcgtcaactgtgtcaagaaggctacttttgtagataaattgctcttttttcgggtacttacagcgttgataaagggctcgtatgcttcttcagcaaggtaagccaaagttgtaccggaatcaataatggttcctctgttgctcgatgttgcaaatactgatggattaacggatattgcttgaccatttacagaaatgctttgcagattcagattatagtgaggcctgaaataatagtttataactcaaagattatactttcaaactatattttcattaaaatcgaaaactattcctcaattactccattgcatcacaaactcgaaaaatgtctatagcaaaacttgaggatacaaatttgaatagaattgcataactattatccattcacgtttaaagatgtaagaaaaaacttactgggagggaacaagtggactataaacaatgtttggctcgatgatttcgccaagaactaatatacctccaccgctatcatcacccttcaagcaatgagagaacacttttggtgctattccttgtgaagacagttgagagataacagacattccttgctgtccaaacccgaaaattccatcaacagctctatctgactttgtcaagtctccagtttgcaaggtactacacctgtttgttttcacatcaagaatagccaatgacttccacggggtccaagtgaaaaaggtgaaatgacaacgaagcaaacttttgctagcttacccgaaaagaataggagcagaagcattttgaatcatggaagctccaacaaccatgtcaaagtgcaacaaatcagagacatagtagcctgaggttccactaccatctccatattggaatgtgtatgaacactggtttgtttgagaagaacaagcagagtctgatgattggattccaagactacatcttttatccgaacaagagactaaggacgatgttgatgagctcccgggatcaaagaagttgagtggaatctgtaaatagaaaaaggaaaaataaaaaactcgaatagagatttgaaaaacttcacaattgtttccacaaaggctcgaagctcttccctactaaagttgaaactcattgattatccaaccaacatcaaaagtactgttggacttactcgggcctcaatgatatggaaaaaaaacataatacaatggatataattcatataagatttgaaaagcttcacaattgttttcacaaaggcccgaagctcttcttgagaaaactactaaagttgaaactcggcatcagaattacttttggacca

SEQ ID NO: 298017 - DNA, 844 bp, Cannabis indica
aataatatgaaaatagatgtacaaacgggccgaccggacccatatttaccgaatctcgcatttataatagaagcctagtatgacccgcataacaatatgacagacttgacccctatttcgagagtcagacctaacaaaataattaaacatgaattattcgtgtcgagttcaggcttgtaccaagctttagcggtcagaagagtggttagtaattagcatttagttatatactattctgttttttaaagtttaaatgcattataattaaatcaaaatatatttgttaattttttaagcataaactttggattgaaatagcatttttttaaaaaatatatatatataataacataaatagagatgaactctaccaaacaattgaaaggtcttattcagcatatataaaatatttatatttttaaattattattgattagaagtgttatctatattttcgcaaacatgacacgtggatattaatcaatgagttattaagctgcccaagtgcctcattcagcgccccaggaggataaaggtatcaacctcgcaggagaggtctccatgaaaggaagtctccctgaataccggccacgcaaaagttctatgtgagctagtgcctcactctgctgcgaaagacaaaaccctctgctcccgcgaagagaatggatcttttcaggacaggacacactagtctggggtacgcctttgacccacagaaactcagtcgacgcgtgtcaggctaaagacccaatgactatgctttttctgtgtaccatgtcagtgttggaatatgttttaccaggatctagagttactaccatgtatgttaattaacatcctaaat

SEQ ID NO: 298018 - DNA, 3479 bp, Cannabis indica
atataacatgattttggataatatttttactattcaaatttcaaaaattaccaaatgcacatttcattaaattttattgtctttattatatatcattttcttcatcatcaatatcatttttttgaatttcccaacaatagtttctcttgatattcttcgaactatagtcggtatctgctaagattaatgactaatgtaactacttttctgttttgaaaagtagattaggtaggtagttaattttgttaggcttttattctcttcttgatccttgtatttaagtaccttggtctataaataaaagtagtgttagttagttttagttaacatcttgctaactaattctagcaaagaatagttttagaaactctttattcttactctctttctctctaaatcttgcatgatatcagtcgctaatgactcgcgtcaatcctcgattgatcctacaaatcattctgctgctactacacttgtcacgactcaacctctaatgacttctccttggaatcctttctccaattccctttctcttctcttacgatcaaattggatcatgtcaactttctggcatgaaaatcacaggttgttcccactatgattggtcatgagcttgatgaaattttgtttcattgtgtccctcctccccttacgctagttaatggagatccaaatctaacgtttgctcagtggaaaaggaaggatcagttgctcatgtcatggcttcggtcatctatgttcgaaggagttcttcagtcgccttctactgtatggaaagccctggaataaaaattcaacgaccattctcgtgcaagacttctttagctcaagggacaattctccaccattcgaaaaggtagtctttcgatttctaattatgttaaaaaagtttacaatcttgcaaattcattggttgttgatggttcccctgtcaaggaccaagatgtcattctttaactcttgaatgaattggggcctaagtatgactcaattgtctctggaatcacgacaagaagtgatcttctttctctcgaagaagttcaagctctttttcttcctcatgaaagtcgattggataatcacaatgttgtgaatgaaatagccatgaagatgcaagctaatctgacctatggtaatccaagatccaatacctatcgaccaccccagggctctaagagcatatgacgaggctaccaaaaacccttcaatcaagcaaattggcctcagtgtcaagtttgcctctgtttggacacacaacaccaacttgtcactatcgattcgacaaatcttgggtcactcctaactaggcaccataccacctcgagcctttctcacagagcaagaatgggaatatgatccataagctttctctaccttatttgtgcttgattttggtgatgataatggatggtttgtgaacactagtgctactcaccatgtgactaataatcctcaaaatcttgaaacctcaacaacttatcatggccttgactcacttatgggttgagatggtaagaagttggtaatttctcatattggttccacttctttgccttcttctagtgttttcccttaaaattgcattctattcttcaagtacctgccattacaaggaatttagttagtgtttctcaattaattaatgataatgatgtttttcatgaattttacaaaacttgttgttttgtcaaggacaagctaacggggagagttctactcaaagggaaatttaagaacaaactgtaccaactaggagaaacaatcacagatcataattccaaagcttcaactcagtgtcatagtgcccttctactagtgttaagtctgagtcttgtatttccaactcttctaaatacaatgtaataaattctcgcacttgtaccaattctgaaatgaataaaattgatgatttctcatttgatcatgacccttttgtttttcatacttttcaccacaatgatgttaatgcatggcacttaaaacttggacacccttctctagctttattaaacaaaatcctaccttttgttctacacacaggttcctcaaacaattacaatgttgtaaagcttgtcaactaagaaaaaaccacaaacaacctttccttatatcccttagcatagcctccaaacctctagaaataattcatatagacctatggggcccttcctatattaccgctaaagatggatataggtattatgttcatttcctaaatgactacagtaggtacacttgaatctttcctttagttcaaaaaaaaaaactaggcctttggtactttcattaagttcaagattatggttgagaagcaattaatatacctataaaaagtgtacaagttgactggtgtggagagtacatgacctttgctagatttcttagtgatcaaagaattctattcacacattcttgtccccatacacatgaagagaatggtcgtgtagagagaaaacatgagcatatcaaataacatgcctcaatattcttgctcaatctggatttgacttttcttattggtgatttgcattttagtatgatgtgttcacaataaacaggttgcccacacctgttataggtcagatttctcctcttgaatccttgtttgggaacacacttgattacactgttctaaagccatttagatgtgcttgttgtccctacttaagaccttacaatcatcacaagatggaatacaacattcaacaatgcacttttttaggctacgcaaatcatcacaaaggatatctatgtgaaaataaagatggatgactttttattgcaaggcatgtggtgttcaatgagtcatgctaccccctgctcacacctcttttacaagtgaccagataacttttgtttcctcagtgatgcacccttctacaatattttctacaccattatcctctaatgcagttcttccatgtgttgtgcatgttgctccccaatacctattgctgagaaccatgcctctgctgcaaactctttaccaaatactacaaataacattggccacaattcagatgctgcaacattgaacaatacaaaccctgcaccaactcctcgtagtgttgttgctccaaataatgttactgcatctgccactactaaaagacctggtcttagtggtactgtaatcttgagaagtaaaggttgtgataaactttctgttgaaccaccatcgtctgttgaactccaacaacaatcatttgtgcttcccactaggggtgttcatccaatccaatccatactattttgctcacagtgcatctgatccacactaagtgtgaatttcatattttagatccaattcaatctgcacaatagctcaaattcaatacaatccaatccacaaaagtgcggattggatcggttattttagattggttactttcaatattaaattatttaatattattataaaatatttttttccacataattaacaacaaaataaaataaactattgttgttttatgtct

SEQ ID NO: 298019 - DNA, 839 bp, Cannabis indica
tgccttatgtaattatcccaactataaacactactatttaattagtccaataaggaaagtgttatttattatttaggttaggtaaaatgtaattttaatctttccaggctgtcttattatttttttgaagatcaactaatcaattttcattagtaataatttgacaaagaatcatgttaaagttttgacttttataatgaggatgacatgagtatgatctatcatattttttattatacatttaggatcgctttttagtatgttgttgttgtaaaatttaagagcactataaattagtgctttgagattaacaattttttataataattattaaataaaatatataaaactctatgaataattaaaaaatttatgagattcttaaatattaatagtgtctttgaagaagctggacaaatctatcttccatcttttattccgcatgtggtatggaattacaataactagttttaaaatgaatgtttgaaagtggtggtccttgcaaatcttattttatttatttatttttgaaggagcattattttatttttcttaataaggtggaaatttgagaatttttaaaaatagttttttgtattttatttaattttagggcttaaattttttaattataaaaatattcttataaaattttaagattataaaaatatacttagttcaacaaaaaataaaaaaagacaacttaaaatcaaccctacgacaattataaatcaactgtaaatcaataaaaaaatatcatgacaactataaataaattatacaacaactaaaaaatagtttattatttttactaaagaaatatttttataaataaaaaa

SEQ ID NO: 298020 - DNA, 2272 bp, Cannabis indica
agagagagagagaggaatagactgaaggcatttgggtacctttggtactatttggagacaatcacttgaaagtccacagatcacttaaaaccttcccaataaaaagtctgtagagaagttgcataaaattattacttgacgagtgtagtattgaagtttctctcaagaaataattaaaaggagcactacacgtttaaattttattttattcaatatggaaataaattatatatatatatgtattaaaatattacttatttgtctaatttaaaagctttattgtgaaaatgatgtgagaagtataacaataaagttgatggatagaaaaatattttgttgattaaataatataggtatatttattgtagttatcaaaatacatatataaaagtaataacaaattattaactagagccattgcataatagtttctaaatattgtattgtgtattattgttggtcccttgatctggaaaacttagtttttgtacgtaatgtaccagtttttggattataagtgataaaacactttgagagataacgtagtaatatttgaccattctccctacaactctatatggcttaaaaaacaatggacgttcatgtggggattccaataaatctattttgtgtattttaacccaatttttcttctccttcaaactccatatatctccatccaataattttgtttcttggacttggaggatgaatccaccaaactcagaaccccatcattgagatcaaccaattcaaaacaatcaaaatcatttattggcaaagcaaccaatccaaatttctctttctccatatcaaaggccatgatcctgtgaagaatactacaagtcttattattagtaagtccttctaaccaaaccaacccaataaataactccatcaacacacttgggcattgagattggaagacattgatcaggttgtgatttgctcatcctccatacactacaaaaaactgttacttttagtgataatttttagtcacaacaaaatttttttgtgattaaatgtgacttttaatcacaacaaaatattacttgtgactaaaatataatctttagtcacaagttgtcactaatttagttttagtcactacctagtattgtgactaaaaatacattatttagtcacaacaaattgtaatttttgtgactaatacttttagccacggactttttagtcacaatataagaatgataatttataattagtcacaatttttttacttttagtcacaagttttattgtgactaagtaaaaaattttgttttgataagtttgatgattttttctcatcatctttacctataaatgaagtgtatagatcatagcttttaccctatgtctacaagtattgagaaaaacactcacaactttgtaacttcctgatgatttaatgacgaatttcgaaagaagtcatagatggtaattctagaaactctttcctcgaagggttagccaaacatggtttggtcctatcatcatcatcatcatcatatttactacttattcttgtgaggcaaagaataccatggaaataactctccaacaagattttgccttcttcttcttcttcttgattattattattattattattattattattattattattattattattattattagagggccatggaaattggttcaaattaatctccaacatcttttcttttgatatatataatcccataatcgtttgaagccatgatatacttatcaaggttaattattaatgatgtcagatctcttccttttcttattttcttgtttccaataaggtgggaaggaatcattgttgttgttaggattttgggtgagaagtaatactaaaggctttcttcatcaacgcttttctttaagagattctctgccaattgggactccataatagctttcgtctattattaatttgacgccattgtacatactaattaccttaaacttataagaatggttttcacctttatattaatggagaaaatcttaacacgtagatcgttaggtaattgatccattatcattatttcagctctttctttaattattttttttatgagaatacgtacatatataaaagaaaaggtacatactgttaattttatttttggcatatttaattgacaaaaatattttattatttaatgtgtatttcggctggagtgtttaatatggttaccctatttgtgtgtatctaaacttggaaggaaagttgtctagctttcctatttatggaaattgaggtaaa

SEQ ID NO: 298021 - DNA, 3005 bp, Cannabis indica
atcaaggatataattgtgcttaattatcgtacatttaaggtgccactgttctggtgcgattgggcaaatattcgaactggtgttaagaagttggagttctatacacttgtaaattttaatataggagaagcccaatcgattagggatccatttgtgttagcgtcacaagttaaataagctttttatgcaagggaaaatgagtcaagtaattggtatatagctttaaaggatccaaatagagggtattttggactagaatcacgtgattgtctagaggatgtcattgaagaaaatggagttctctatttttttttctaatgtactttatgtactttgaaaggaataaatttatttactcttttttgtatctggcttactattactctgtggcttaatgaaaaatatttagttttattaatttttggtgtagtatatgagtgaaaaaaaaaattatggtttaccttttacgttcttgtttgactttaaatgaaacaaatttggttttgttattctatttcaatttaagaagacaacaatatgatgcatatctgatttcttttctcatgttattttttgtttatattgcagaaacatcaacttggaaaatgagtacattttgaaaatctccaagaaaacacctttgtccaggtgctttatgtaatattgtggccaaaaaaagaaaagaatcattaaagagtcaagctgattgagatgatacgttgcttgaaaaccctattttaaagaaaaagagtgctcttcgtaggttttttgcacctgttagagttgtaattgattcaccacccgctcttagtactagagcaacaactcgtcgtacggtctataatatagagccagatccaaatgataatttggaagacatggagatgtcacttggaagttcaaaaactagaagatcccttaactatgaagtagaaaaggtagctaaaagtgtttatgaaaaaggaggaagggaggaacaaaatgacttaggtgatgatgaaggggttgctagagtatttgaagaaggggctgctacagaatttgaagagctggctgaggtagaacttgtacaacaagataaaatgactgacacaaaccaaaatggaggtacttcagatgttacaaagcagcaagcacatcaaactgttagaaaatctattagattatagaaaacaacagatgcaaatccaactgagcttgaataaacacctcaagatataaatgtgaatgaaatgaactcaacaaagaagactaggggcaagactctattggcaaatctaaccaagagaaataatgacatgaggataataaattggaatgaaaaagggcaaccgattggtactaactctgtacaattttcttcttttgtgggtgctctcgtgcgagaggttgttccttagactatttcagattggagaaaagtttcaccaatcatgaaagatgttctttgggaatccctccaggtagaatgaaaagtcttatgattgtatcatttattttctatttagttctactcctaacatataatatgttattatatatcctattgtaggcacaatatgacttacatgatgattggcaaaaaaaagatgtgctttgaaatgatggcagaattatggagatctggaaaatctagacttgtaaaggatattattgaagctaaaaatgagagtgaaagactagccaaaagtaatgtagaatggaaagcatttgttgctccaaaaactagtaaagaacatttggtaagatttcttatcaaatatgagataattaatagtgatgttgctgccttttttttttttttttattttcatttggtttttatttcatactattctgcctaattttttactaattttgttgttgctactgttgttgttcattttccctaaatggtgttggtttactattaaataggatataagggccaaatatcaagagagaagaaagaaagctattccacacaccttaagtcgaagaggatacgctcgaacaatcgatgatatggtaataattaagtttttaacagtttgtatttttgtttctattactatagtctctattttattttatttttatattgttgtattgtgtagaaaaaagaaaatggagatggaaaagtatcgagaattgatgcctttaggagagcccataccaagaagaatggtgaacctgtcaacccaacagcaactgaattttttgtgagtattaatcatttaatttttaaactttatacttattttataaggttataagttagctttactaatttatatgtagggagaattggatgacattctccacgaagacccaaaatctggaattacagacaatactgatgaggatgccttgacaaaattgtttggtaacccaaaatctggtcgtttaatcggacaaggaagaggggtaacaagatcgaaactaactatagttaatatgtgtaataacaagatctccaagttggaagaagagcaacacaatatgaagctcaaaatgactaaaatgttgaatctacttaaagaacacttggtgataattccttcttacacttataaaccttacttttttttaaaccaatgaaactaatcttgctttttatgtttaggctggtggtatagcaacaccaagcgaaggccaatttcgcaatgcaccacaatcgaatactatcccttctcctaaggtaaattatgaaagttgttatcacattaaagattttttttttaaaaaaaaaaggaaagaaaaaatcaaaaactaacatattgtcttcaaaatcaattttgtagagtattggacagaaaaatggacataactttactgaaacaaagaatgcttgctacttgttggacttgggggatgtaattgttgccgaaggtctttgggtttctagtgacccgaatgtaaatgtgttagaaatattttaccaggatctagatttactaccaagtatgtttgattaacatcctaatatgaattctaaaacaatgaaataaacacataagagttta

SEQ ID NO: 298022 - DNA, 2611 bp, Cannabis indica
cttttcaaaaaaaaaaaaaagttgttctctaatagtacctactccagtaaaaatttctcaatttcgaaacaaatcgaagccatgaacagtaaaaaaaaaggcaatgctatttacaggattggatttcatatttaaatgaaccatgaataatttttttttttttggaataatgtatattgtaattattaagcccttcttacaaaatttgcatgaaattcttaatagtgttgagagaattttaaaacaactagttcacacatgtataaaacaagtttataaaaaattacttgttttttatttttaatattataaattattcataatttttaaaataattttgtgaagttcaaaatatctacattgctcgtcgtcagaataatcctactgctactgataatgatacctgaaagaaccctgctacggatcctcaagattacaagagtcgatcacttaaatagattttacaagtttgaaaatttatttttaaagtctaaagtgttgcattgctcaatgtctcgagtgacctatatatggtacatggttaataataaaaaaatgcttacatatagtgtggtacatgccagacaagttaacacatagtagcatataataatagagccacatagatccaaaacaaaaaagaaggcatacacatgtgacattcatggtgcacaacaaaggaaaaagtgaatcaaggcaataacttctcatatagacacccgcttatatacatacaagtcccaaacaagtgtgcaagaaaccattgcgattggcccccacgatcttatcttgagttaatacaagctcctttctagtacaatgaaagactcctcctaacaatcaatcaatagtcattgcctaaactctccctactttgaccctcaactcaaaaaaatgagctcaaaggggggtcacagttgtagtttggtctcgaagggggatcacaattgcagtttgatctcgagagggggtcacagttgcagtttggtcttgaagggaggtggggtcacagtcgtattttggtctcgaaggagggtcacggttgtagtttggtctcaaaggagggccacggtcgtagtttgatctcaaaggggggtcaaaattgtggttcggcctcgggggagacatcctgactaccacatggtggtctcggggtggagcacccacaaatcctaatctcaaggtgtataaaacaacaacaaaggggttaattcagggtgaaccttgacctagtatctatggataaatctaaatggcaaccacgacttattgtagctctatcttggggtagctaatcatgacccccatagtcgtctctgagggaacctcctagcctcagggtgcacaccccgacccacgagcagatgtgcctcgagtgacaataaaaaaaattactccaactcggggtaccttgagattgcttaattttagagtatatatacactgaacctccaaacgatcaggccaaaaaaaccacggttctaagtgataaagtggcccgaagcaacaatgacaattacacacttcaaaatttgactaagcgtgtaaagaaaaaacaatacattaagtgtataaatataagaccctaagaagtagacaagaggccattatcaccaactcatgaagctgcatttcagttgtctcggggtaccacacccctgacctccatgagatggtctcggggtagtacaccttgaactccacttggtgatctcgagggtggtcgcaccccccatctctatctcgaaaaaatggcaatctcagactaccgcgagacaatcccatctcggggtaaaaaagtgggtctcgggatataggtctcggagggggatcttttggactacgggggcctatctcggggtaccacacctgacccccatgcggtggtctcaaggtggtgtaaacccattaccccgacctcagctcaacgttaagaaaataataaatttatcccgagacaaccccatttcagggtaagatggcctacctcagggtataccgaaatgtttgaagcagtcaagatggacctcccaaggaggtatcacatggtagccacctcgaccctatgaagtggtgttgcggcttggaaaaaataaggtgacttgaagtcacaactacaacactccccaagcaatgatcgttcaacaattttttccaaggtacatactatcttcacatacaccttttctcaatcttatgagaatgtaagcaagaagtgagggaaaaatcaaaattctccatgttcttgatgttcttctaaagctgaagagcactttgaaccaaaagttttaaaatcaatcattccatcaccaaatttcatcaaatcatagccaaaaacacattacccatagcctatgctacaaaacccaatcactaaacactcacatttcatcaaaaactcaaaacccaatgattcaatgccatttttggccatggaaaaaactacctagaagaagtcccaaaaacttcatcaaatttcaaatttaaagtaaggaaattataagaggaaatatggagaacttacccacaatgaagatggaaagctcaaagcttccaaggatcattataatgctataagtaatttatttattttgtctttgtaaatatttag

SEQ ID NO: 298023 - DNA, 948 bp, Cannabis indica
gataactattcagattgtaaagagttttatttagggcataaaacccaacattttataccttaagatgtttagcagttagtgcttcacctccagctcagcttgtcattcgaatggaagatttatgcttacttggaacccgaacaattttgatattagcattaaagaaacaaccaggcaatttatccatactaaggtttatcctaaacactctgccagctttgaaactacctttatttatgcccataatcaagctataacaagagatgatctgtggaaaagcttgagattattaatctctggtagtcaaaattctccttggcttttaatggggcattttcaatggtgtcatgaagcctgatgaaataattaattagagttggtaagatgactaaagacttttctcctttgaagagttgtgttgaagattgcaatctcagtgatgtcaaattctcaggctgcttttgtacttggaacaataagcaggatttggctacaaaattttatgcaaaattagaaagaatacatactaatcagaaatggatagatcttttccaaagtgctaaaattactttcttccatgaaggtgattttgaccattaccagatgtccttactgtctatcctttagaagaaatggcttaaaaccattttgatattttgacatgtggagtagacatcctgattttcagatgaggattatccaaagttagggggcttgatacaagggactcctatgtttagattctatcaaaagcttaaaagtttgtccttaaagagcttcatagagaaggttatggggagattaaggctaaagtcaaagttgctaagattgcttttcttaattatcagcaagcattgattcaaaatcattttcaagccaatttggtgaatgcagagcaagaggcaaggaaaactttctctaatgcttctagtgttggaaattatttta

SEQ ID NO: 298024 - DNA, 5326 bp, Cannabis indica
aaaatggtttcattgaatatgattctgataaaaaggacaaacttccgaaaaaaaaaaaggacaaaaaaaaaatcctcacctcttctgccacagaattgacaatattcaaatcacttctaaggtcggatacctgaaaaggggaagacaatgaacagacatgtaatgacaagaaaacacaaatcataagtatctgagaacaaataaagcaaagagattgtccactgacctgggaactaaattgtattttaaaagagaaaacccttagcttcgcctctacccgaggcactttcatcaattctaaaaagaactgttacagatattcacaggtcaattaattaaaacacatggttaaaaaggaaaatccaatccaacaaaaatccatattaaagtttcctgcggctacggctagtaaggacgataccaagttcagccattcatatactttaacaatttgaattttcgaacaagcaaatatccaagaaaataaatttgatgaggaattaacctgttcacatttccccaagttttccttagctccattataattctgagcagaaaaggataatcattttagaaaactatatcgttataaaagctctgaatactaaaggttcacactgtaacatggagagagctatgaattacaactaaaaagaaagtgttacatacttaccttaagcaagtccatctcttcttttgttggacagaactttatgaggttatcaatctgatccccatctaatgctgactcatccaaggcgagtaatgaactctagaagaggaaaaccatcgaaggccaagaaatcgagtaaacttgttaggggtctgccttcttaacttaaaagtgttgctttctaaaaaaaacttaaaaagtgttaagtagcattgtacaggaaataaattagatttactttaccatcaaatcaggcagaggtactttcactttcgaaagcatgatttcacaattatatgcccgtcttagttcaatctatacgaaataaaaaaaaaataataaaagttatgccaatatgccaaaacaatttacacaaatttgctccctatgtagaacaaatttccaccagtaattcttaatgtttgcaagagattgagaaaaattttagtcaaaacaaaacatgcaatttcagtcattggtaatgagaactcctgccagctacaaatgaaaataaaagcacagttcataataccagttggactttctcagtctttggtcctgatgtccgtcgatttgatttcccacctgggcttccctgatctgaattaggcacagctgcagagaaaagactctctagttctgacatgtcaaattctggagccctgacatagacaaagctgaataagataaacttaaattcctcaattatgcgcgaaaaatatttcttttacaatcaacgcttacttggaatcttcgtcagttttctgtgtctcggcccatagacttccttgcatggcccttgttaattttaaccaatgatacggcttcagattagtctttttaggttgagcttgacttctaggacttggacgtgagaggccacgtccttttccactcaatagagtactggaaggaggtccaggaatcgaaggcacattaccattactaacagcagaatgcgattgtggagaggcaataccaggttttgataaaccattgataagaggagctgggggaggcggtacagctggagtgtttgcaggctttttacccacagaatcccttgaagcagaagttaaaggtgggggaggtggaggtgctggagaagtcttggaacttgtgttcgtcccgtgaggcttaggaggtggaggtggaggtgggggccccgatttgattgatgtgctcttcaaagaaagcaaggaagaatttgaacaagatacggaagcaggaggtggaggtggaggtggaggagtagaaaaacaagtcttactagcgactgatggcgatagtattggaggaggaggtggcggaggtggggttggggcagaaaatgagttcttaagatttgataatggcgatgttcctggaaaaggaggtggtgtaggaggaggaggagtgcgaatggaatccttagcaacagatagggattccctgaaagaagaaggtggcgggggagggggagggggagggggaggggaagttaagttcttgacaagggaagacggggatgcctccaataaagtaggtggatgtgagggacgaggaattgaagctggcgaagaagtattcaacaatgtgatttcaggataagtgacttttgtgcttggaagagattgtatagataacagaggttgaggttttgatacagatacattactaggtgctaaagtcactggatgtgcaattttcttcttccttaatagatgctgcatggtcatgcagtagagctgtaattccaagagcagagggtgcactttgatatctcgatataggtaatggtgatgaaactggagaagacaaagaagtttgatgtactctttgagatataatcttaggctgggatggccgttggagaccaatctgtaagtcttgcatacccgtctggcttttagttacattactgttcttcatctcactcttcttcccaactgaattagaatttcgcaattcttggctttccattttttttctgataagattatcatctatggatggttcaaacaaggccatggattgctttacttgactcgtggaattgaggttgtgaatgttgctttccgatgcctttgatacaactttaacttgatcaggagttgattctcgaaactcattccctatttcagcattttgaacagatacactgtccatctttccatgtagggcatttgacgtcgagatttgttggagtgtgtttagtgctacatctgtttttggatctagccaatccacgtggctaaagatctcgtgaacttttgcaaaggcttcaataggaagaccttctttatcctcaatgccaggcaaatcaacaggcattaaagaaatgatcgtatccatctctgaaaaaagaaccttcattcaaatgcaaaatattagttgcaatcataaattctaaaaagataaaaatgaggatatgtcaagataaatggaaacctctgctctaaagtccttgggaaagtggtctttagcattccataaaatgtcaatttcatcacggttgagcatcaaaatgtttgatcttataaaggcggtattgaacatgactctaaacatcatttcttctcgtttcaaatcattctccaaagtgatacactcaagaacaacatcaccttggacatgacaatggatatcaattttggctaattcacattctgcctgcaaaatgtggtagattaaaaataaaaaatcctcataaataaaaggattgttcctgttacataagagtaagaaagatttaactacctgcttgtagtgcctaaccaacttgctcttctttggagttgagaacaaaacttttggagtccgatcagcagccatgaaaggatcttgtccgtatatcctaaatataggacgacaacctccctctccatccatatttggaatcaatctcagaatgatacagtccaatgtaagggctctatccaagggaggccattctgagccaacatttctccttgagacatattgtagatatctcaactgcgacggcattgggtttaacggggacatcaattgaagaagttctcggggcgcttgtttgtaaatcatgtccaacatcttttgttccccattgaattgtttccgataaatcaacagggcagctagcatgaatgccaaaacaggccatccacctcgctcacaatgcatcaagagcaaattttgatggccaagtgaaagccaactctcactagatctcaagaaatggtgaaccatttccatagtgagcaaagggcaaccctcatagtgtcgaggatagtccattaccgtcatatcatattctgacaatatactagcaatttggctttggctctctccctctcgaaagttgaagaccataaatgaagcatcagggaagtgatcacgaagttgacccactatacctcctatgtagactttatagtcatctccttcccaaacatcggtggtaaagcagcaatcaaaaactgaaaaccatattgactaaagcatatcaaacattttatttcaccataaagtttcattaagaaacttaaaggttaagattaggacatactagaaagctagttcaagcaaaggtctttttcatactattcatcacataacattgtcaaaacccataaattttgtttcttttaaattttaaaaaaaaaaatacataaacaaagcatttaacaatcttcaaagacataccatagggatcaattatcaatatgctttctttctccaaacaaaattatgtcaattaaacgattctcagactcgaacagtaaatgtgtgtacacagtaacatttcaaaaatgattaaaactcaacaaaccattatcgaccgccattaaagcataaaatcccatacattgaattcaaacctgagaaacgagtcattaccgtaaaccctttcagagatctccagaagcccatctggtggcttacgataaaagaacttcctgaacagcgccattgtcttctaagatccaaaaacccaaaaaaaaatatcattcacaaaaagagcctatgaaatctccaattcgaaccacattgcttccaagctcaaaagaaaaacacccagattaaataaccccaaaggtatggattttgctgagtctttaagaaaagctttctgggtatttctgttaaggctttttcccttcacactctgtatgtatatcagagaaacttagcttccattccaaccaagagaacgttgagctctagtagagagagagaaagagaaaaaggagtaattttgtgcttgtcttggggttgtttatagagagagaaagttatttgggggaaggggaatattctctcgctctgtgtgtattagaattagaagaagtaaatcagagatttggcggttgttgaagatgaatatataaggtatccaaggatcttaagctcaggtttgtttatgtctttgtctaatgccaatggattggacaatggtatttatgtatgtatataatatgggatgagtgtgagtgtgtatgtgtgagcttctcatctcttctcctctctgtatttgggtaatttgggctatagagaagagattatagattgattgatgataacgatggtctctctcattttgatactttccttttctttttcttttccttcgattttattttttattattattaattttttgtgatactatatactatagatatgtacaaa

SEQ ID NO: 298025 - DNA, 4510 bp, Cannabis indica
aaagagttttatttagggcataaaacccaacacaggaaacaacattaagaccaagaaaaatacaaaaactagatgtagatctccaatcatcaggatttgaagcccagtcaacatcacaaaaatctgtcaaggtaagagtagagacaggcttgaaatgtaggccaagatcaattgtgccagagagatacttaaggataatcttcacagttttccaataagattcaagtggagatttcacaaattgagagacgccatttactgtataagaaatgtctggcctagtaacagttgcatactaaagagcaccaatgatgctcttataaaaatgtgtattatcctaaagtttgcacatttgacgtgtcacttacatgtggcatagtcctgctagcctttaacacaacaagtgacttccatgcaaaaatgtacttggcagatcccatatgatgctaatatccatgagctctatataggcttccaggaaaaatcttgacgggccatcaacatgacggcgagagaatgggagattaacttaccttgcaagaatttttcacaagtaatccaacaagagagacaagtcttggaaagagcctggtcgagtagtcaatgtgccgaccatgagaaacgatgtgaagaatgattggcagggctgcacgtgcctcagtttcttcctcaaataacttttgcaaatatctctaaatgaatcctacaaatgtggatctgaatgatctacctgagtttgtaggagcttcaaaagatcaaaactgcactcaagaatataggaatatttactctttgatcactccttttatagagctaagtgtaacaaccttctccctataaatattgaatgaattcacaagtggaagggacctgaaatcataatctgacacttaagagcccttttttgaatatttctgtaaacatcttgagagttgtagctaaaattcactttgtcttccttagtgatctgcatgacataatctcataatcaatagaagtaaaaggagagtaggtcattacccataactaagggggcgaacgtctataattctatgtgttctttctatttatttattatccttaattccttgttggtgattaatcagtgtttgttaggctctgagtcagttggtaattttcccagtcaagatttttagtactttcattgagagcttcaacattcttacgaagatctcatctctttcccaatatttgatggctatggatcccaatgtttgtgttccaccacctggtgacaattttgccaactctgcctggccacctcgagcaaacccacctgatgggttccgactagaaggcctagttaatattaagcaagatcaacaaatactgggcagggccctaccaatgctagacaacctgcccaaagtaccatgggggtcctttaacaaggactacgcccaagtatacactggagaaactaggcctagggttggccaacctagtgttaatgaaccccatattgactttttgcatgattgtgagctagccaggataagagaggccatagggaaagtctaagatcatactaaactcatccatgaacaagaagaaacacgtgctactgtgagtgatgatttcgcccagcagagatgcacattccaggaatggatggatagacaagtcgtgatcctacaagcccactaggcaaagttgaaccactagaataggtaggcaaatgaattgattagaagattcaataaaatggctagatctcgggttgaaaagctgcctctcataagggatccccttaatggctgaaggatcgtgggaaaacctcacacccggtgggcccaactacttaccatgcagggccacctcccattcagccaaataatgaagaaatcttttgtaaaaaggcatacggtaggactaaccaactccaagacctgtgtaaggatgaaagaaggagggaagataatccacctaactagggccgaagtaggtctcgcagtggggagtcttaccccaaccttaatgaggatggtaccactagccaccccattgatgggcacactaaccagaaaactcataataacaccggtcgtaataacgaagttcctccctggaatgctcaaacgcagtctgacttgaggcctagggactctgtgtttgatagaatgggccctcgagttggagaataccttcagaataacttaaaccatagatggaataacaaggatagatatatctcgtcttaaaatgattcaccaagggcacaagataggccaactcctatcgacccatacgactaacctcctgccaacccaagagaggagtcgattgaacaaaggaagactagagttgatcatgcagtgcaagcacagttggattaactaaagagccttgtacatggcctttttggtccaaagcttttctacccagaaattgacagggctcaaggatcgtctttttttgcgtgcattaatgcatttcccctaccaactaagttcaagatgctaacttggaagatgtttaccaggaaagaagatcctttggcaaatatccaatactttgagatccaaatggatctggaaggggtgataggcaatgtcaattcctggatctttctagcgaccttgttcgacaccgcacaatagttgtattctaagctgtcctccaggagatttgattctagggacgttttcaccaatgaaaaaaccatctcaattggaggacttggttaaaataaaagaaaaaggttgggagaacctttgaaagattatattcaaaggttcatgaccgaggccacgaaagtcaaacgtctgactgaaaaatggcggaatacaaccattttagggggtattgtatatctgagtgacctttggtaagacatcagaaaaagatcaaccaacaatatgagagagtttcaagatctggctgacgattttataaaacttgaaaaaactgtttggtaggtgaaaattggcgaggtagaagacagctgcccccaaaaacacagtaccaatactgcccaactccaaaccaacaacaataatggagggaaactgaataataatagttttggataaggaaatggaaggaaagggaaattaaacaattcccctacacaacaacactcttgggaaaaggaggagaagttcacttccttcaccgtcctgacagacacttctgagactatctaatggcaacacaagccattgttccctacaagaagccacctcggatgaaaaaagacatcaataagagggatcccaccaagttctgctgattccataaagattttggccatgacactaatgagtatataaacttgaaagaagaggttgagttcgtgataagaaggaataatccccacctatgtcggtatgtcggagccaaccaaaactaggcacaagtccaataaaataacaacttattggccccactggttcctggtcatttacaagtcatcatcagtggaccccacattattggggatttaaacaaagcactggacatatacgataaaactctttgtcatgagcaaagaaacaaagtcatggctgtagaggaatgaaatctaatgtagccaaaggtagaagagcctaccatcatctttactgaagaagatgatgcccatgtcagattccctcataatgaccctctggtcataaccactaaaatagggaatatgagggtagcgcactacatggtggatgatggatcctcttcgaacatcattttcaagacagtgtatgagaatatgggacttcatttgaaagatctaacaccctgtatccagcttatgtatgggttctcgaaccaaggactggatcctctagtgtatatccgattgccattgacaatcgatgaaagtcttgcacaaaatgcagtcttggtctaattcataattatagacatggaatctgcattcaatgtcaagatagggtgaccaaccctgtatgacctaaaatcaatcacttcaatttaccatatatgcatcaagtttccaatcaagcatggtgtcaggtgcctaaggggagaccaatattctactcagtaatgttacaacatcgctctttccaaagaaaaaaggaagaccttcccaccaagagctcgaacaatgagtccggcaaagggcattaatgatccacccaaggcaaggaaacagacatagatcctcgttttggggatcctaccaatagatttggacaagtggaggaattagaagaagcaaagatcaacccttccatgttgaccaagaaactaaaaattagtcaaggtttagcagtacaaataaaattcaaattgatcaaatttctaagggcaaatcttgacatttttgcttggtcacatgaagacatggtgggaatcaatccatttataatttctcatgcccttaatatagatccaaacatccatccagtacaacaaaaatggaggctacttgataaagagcaagcacaagcattgaaagatgaagttcaaaagctacgcgtaaataactgttcgaaatattttacctggatcttagatttactaacaa

SEQ ID NO: 298026 - DNA, 6185 bp, Cannabis indica
attattctgaatttctcaaaattgtgcaagacatcttaaataaatataacgtatacgactataaaaaaatttaaattataaaattcttatagatgtcgaaatagttagggattttatccgtgtaaccattttaatgggattctctagtccctatgctcttcgtagtgacttactctgcttcggctacgactttgagattgttccctggattttctccacgacgtccagtctcattccggctccgagcaacactgaattcccccagtttgcggcttatttgtgctcctctctttggcatgctagaaaccaactcttccaccaaggtattgccccctctccttcggctattattgagaaggttttagctgctcttaatgactataacagggagtttgagagaagtcgggcctctgatggagaccctctgttggagtcttggagaaatgcccaacctgcgcctaaaatggtgaatttttttgtggatgcggctgtccgaggtgatcttgtgttcattgcggtggttgctctgaatggggagagggggactttcttgatgcggtgactgccaaggtcaagtgtgcatctccttttgaagccgagtgctgggccttgtgccatgctttctctctgtgtttgcagatgaattgtgtggatgccaacttcttctcggattgcctctcccttgtctctgttgtccgtggctctaccatcccctcttggaagctcactaatctatttctgcatttattttcttgtctgaattttgatgctaaatgttgtgtgttttggattcctcgtaaggacaattccctggctcacaatgtggctgcttgggctgcgtcccataacatttttaggtctctttgtgttggggatgtagcactccttgttgctacgcttgactgacttggtttttttttctctggtttattgaagttttcggttcaacaaaaaaaaaaaaaaaccaattttaatggggtgcatattataaaaaagtcacatgcaaatttttcaaaaatttgtaaaatgtcttaaataattgtaatgtacaataacataaaaaaaatcttgattagctagatttccaccataatctctctttgtctaccaatagatgactcttatatcaacaggcaacgctttcgttgagtacatggcctacaacttatttttttatataatattttaatgatatattaattgtctaataatatcaaaaataaaaaaaaaaattaagaaaagcacttgacagaagaaacaaacattatattttagttgaaaaatcaacaattttttttttgtataatgagcccatttagcattaacattaatgttgatgctcttactatccaattagcggctcctttagatacacgtactctctagtagctggataatctgcatgcatgtcacaacaactcacattagtcatatagttatatatctaatctcttcatatatgttgtcgaattaatctttcatcttaattattataacccatgtaaggcacataactttgaagcgtaacactaataaaagccatacaacgtcacaattcaacttttaattaatctccttaaccatattcttatgaatgactctacgtccctttccaatttttaatatctctacaactgtttttttcaattcaatatattatattcgtgcaaaggtatatatatatatataattaccatttcagacaaatttaagatttctggtaatggatgtgatcaatcgatcgacaactattcttctcctctcattattaattaatttatattatatttgtttttcagacaggtctattttgtgccaagctaaataacgttacacgtgtaaacggccaagccccacatatgtactacttccaagttcttcatttggcgctatcgatgatccacgcagtacgtacatggattcgaatgtgtatatatattcaaatattaacacatatatatatatacatacatatttatgatagaaatcttcaacaatcaagaaaatgaaagctagtaacagttagaaccactggttagagacagtataaccttcctcagatatagacatacgtggtttgtgttaaccctaaggattgggtctagctgatcatcactcaatctctccttattaaaaccccatcatctcccaaatacttacctcttcacaattttattccttatctcagaaatattcaaagcattaatttaacaagatggacgtttggtcatggatatgtgagttgcctaactcagatcaccactggaccgagtcaaatccatcatttgaactagccactaccgctgcatcgactcagctccacagcctaactcggtctattcaactcagggccgagaaatcgtcaggctccaacattgatgacctagtcacgttctctgtttgtcttcagggctttcacagctcccaaaacataatatgggtttctgacacgtgttcactctcatccgataagccatttcttcctctggttcttcagcttctccaagaaattatctctcgttcacccactgcgcaagatagcacctgcccacgttctcagcttcagaagctgaaacccgacgtcgtatcatggattatggattctcacacgtcagagtctttttctaccttcttcaatctcattctcctcacgcgcctcttctgggtctgcgcgttcgattcccccaccgaagttggatccttctacttccggtccttgttagctcccaaccttgaaactacgtcgtttaatagctcaccggctttgaagacgtttttcttaacggtaggagtagatgctgagctgtgtttcatgcgcacccttgggtacatgttagcaaaatggtatattttaagggaagtgggcgtaggattacaaacgttaactccgttattgtcgtctccgaaagtcggattctcttacgcgacggagtctcatggattttgggttctcaaggggtacgcgcctgtctgggggatgaaactcacacgccccaaaactgagatgagtaagagtaattatttcccggcttttgaagcgaaagacgcggttctgaaatacgcgctggcgcaccagcaactagaagtagttattcagttggaatacacggttggattttacgaagggttgattcaggtgaacgcgcgcgtagacaaccttcgcgtccacgtggtacaactcgggtacaacaaagacgatgacgtggagttcggggaagagaagcatttcccgtcgagaataagagtttgggttgggccagaagttggagcaaactacgtggcgggactgagtctgggccggtccaccaacaatggggagagagagatcgtggcccagaacatagtgaagggcagtttcgaaaattcaaagtctccgaataaggtaaaaagaattttatttacacctcataaaattataaaaaattctattttaataatttttttcttctttcttatatttttaaataatatacttataaaataaaataaaatatataaaattttatttcgaaatttttttaaaaaatcatacatgtaatgatttaaaaaaaaaaaatgaaaaaaataaaactattaatattaaataaaaatatgtaaaaaagtaatttaaaaaatatatattaaaaatgaatttaagttaattattttttaatattgaagtgcacttataattttatggggtgcaaataaaatttcgttcaggtaaaaaccacggcgatgacatcaaatagtaggaagcaaagcaattggcgttgggaccaggatgcggaggggaacgcggcggtgttcgatgctgtgttgcatgacaacgtcacggggcaggaagtagcggggcgtaggtcatcaccgaagggtggcgataattgttacgaggggttgagggagcggtacagtggtgggagtagggtgtttacgaagaaaggagggttggtactagcgggagatgagtatggacaaggagtggggtggagattgagtaaagagatggaagggagtgtgttgaagtggagaattggcggtcaagtttggctgagttattcgcctaatcaaattaagagttctcattttgagacgaggtgtgtggagtggtgtgatgaggttgacttgcctctcattccttctaagttgttttcttattgagtctgaaaatattataagcctcttgtaaaaagcttgtctttttagtattatcttaaatatggacactttatatattcaattacacgtagtgaagcatgtatgttgtatataaaaaatgttattaaatgaattataggagtgcgtagatgtgagtgtattgaacgttgtcctacttatataatgtataattagcaacatatatcatttacgtatatatacgttgagaatgaattaatcaatgggaatttgaaaattatgtctatagtgtaagaatagaaatattgtgtaaaaccaactctatacttgttactaaaaaagtaatgagaatgatgattgtattaattcctactagttttccgttttatgaaatgtttttttttttgaaggaaatatgcatgtgtgaaggttaataatgtagggtcaaacatatatgggtatattatatagatatctaactacttgttttctccgatacaatagaaataatagacaaggagaatcaattttgggatacttttgcctctttgtattgatattttctaactgacatttgggagggagccacccaatgtttgggcccatgcttctctgacatttaaacataaaataaataaataatgaaatttctactttgatcttcttagtttaagcctacaatcaaatttgatactgtgtttatccattaaaaataaaaaaaaattaagaaattgattggcttcatagcttaaaagttgactttattttaaaacaaaaaataatttttaaaactaatacgggttgtttggctaaaaattttaaaaattgagttttaaaaaactagaaaactgaatatattaaaatattattttctactttcaaaaataatttttttatctaacacattatattttatattttttctcacatacccggactctggacttgaactccgatcctgacctggacctgaccccaaccctgacccggatcgcgactgcgacccaaaccccccacccgaacctggactcgaacccgaactagacccggacccatacccagaccccgaccccgactcgtacccagactcagactcggaccctaaaccgcgatctagacctggaccccggacccaaaccacagacctcggaccccgaccggaacctcgatttagacccgaaacccgaacccagacccagacctcgaccctgaccccgaccccagaccttaaacccgaactcagacccaaacacaaactcgtactcgaaccctggacttgggactaggtccgaggtgttaggcttggtttaaggtcaggttcaggtcttggtttgagcttgggtctaggtcgacatctaagttcagggttcgagtctgggtccgtgtacggggtttggggccgagggccgggtctgagtttgggttcgtggtcggggtccgattctgaatcatggtctaggtctggggtctaggttcagatcgaggtccggagtcagggtccaaagttggggtttggggtccaagtacgggtccggggttcggatttgatatccagttctgagtttgggtacgggtcgggggtttgtgtatgtgtctagggtccaagtccgggtctagcattagggttcgagtttggggtcgggactaggtccgagtacgatgcctgggttcgggtcttagtctggtttcaggtttgggtccgaggtcagagtttgagttcgggtctggatccaagatggggtcgagtctagggtttagggttcggggtcaggtccaagtttgggattagggtctgggttcggtccggggtctaaggtttgaggttcgggttcgagtttgggtccgagctccagttcggggtaggatgggttcatgtcatggtatattgtagaatactttttttttttttagttaaaaaagttctaaaaatagttttaaaaaaatctgagccaaacaccattaaaaattttaaaaataacaaaaaaactactttctattctcaaattttaaaaaacaaaattactgaaaaactaaaaaaactgaaaaaatataagccaaaacaaacctct

SEQ ID NO: 298027 - DNA, 1650 bp, Cannabis indica
aataaaaaaattaattaaaaaaattagtcaccatatatttgtttatatatgcggtaaataaataccacttattgtatcatttaaataattgatagtatatttgttaattattttataattaagtatataactaaaaattccccgtaaattaatatatctggatctgatctgccttgccctgtcccgtccaattttttttttttccagtttcaacatattaaaaaaaatgattggatcccaaattcctaattaatctgagtcgaagactcaaaaagtgaaactggaatccctaatctatctaactcaatatatctacaagagtcgttctcgttctcgatctcaatccctgatccgctcattcatccataatcagtcggttctcgttctcaccggaggccattcttctcaggcagccaggtataagattctttctctcttctcagtgtaacggcaaggcctactcgcagaggtacttcgctatgttttttatgttttgactgagagtgttattgagttcgtacttattggattcgtgcaatttgtaatttgtcaatgtgtgaagtaagagttgaggtgggtgttaactattaatagtcaatattgattttacgaagacgatctagtcggttgaatactgatattacccagctcgtttcaggtttcttgttttcattttaatttttattgagtttttccttttgatattagtatcaaagacaaggttgatgctatagctcgtatggtgccagtggtgttcaataagaaaaaaatgaattttatataagttttgatataaaaatttttggaataaagaaaaataaaagagagaaaagccgaatccaattcgatccgaataagtagtgtcggatctgatcagataatccgattatctgattcagtgggacgggcaggcaaagtggatcattacatgatacctaagaaccttatatggtgagtaaggtaatgctttgttagtacacactgctggagacagggcatagacacaagaatgaacctgttctatctttggatgcccacgagtccactcacggaccatccacgacacggttgttgcgggagtcaggccaaaatagaaattgataacacggcttttcactttatatagtttcaaatatatactaatggaaagagagaggttaaaaaagtgcaccaaacgaagattactacatagcttgctatcttgctgaaaagtgtcttttattttcatcatccccattagtaatactcccagtggataatcagaataaaaagccacttggcttgaatgtcccaacccaagcttgtgtttcggtgtggtccaaccaaagctttattatatccttgttttgctgtcatatgtattaatatgtataccaagttcaattaatatatatttttaatgttattactattattgacttatcaggtcagtaaaatttgagtttctagctttttgatgtttttctattttttttattatttttttacatttttaaaattaattttgagtgacgacgtgatctgaaattatttttaaaattttagaagagagaaaaataaaaaagtggaaagaaggagagaaaaaagtagtgtaagagaaagaaaaagaaaaaaaaaaataaattaaagtattgaaacatactaaaataa

SEQ ID NO: 298028 - DNA, 4848 bp, Cannabis indica
gtacgtcagcgggagcaccctcccgaacaagtaatgagggggcatcctcatcagaagaatcatcatcttcttccttgaccaccacaaccttccctttccctaccacctggtcggaaggactagggctgagcatcggacagtttggtcggttttttctctatataaaaatccaaaatttggtcttcggtttggattggtgcaatccgaaaatcgaccgactaatctagaacctatcttaaaaccgactgtttaaaacctcggtttggtcggtttaaaccgcttaaagtgaaccctttttttaaaaaaaaataatccaatttattctataaatacattattctacattttacaactacaaatatacaaattaattgttcaaaaactaattattttattcttttaaccttaatattaataaaaataatatattattttttatatattattaataactataatacatgaaaaaaaaattaataaattaatatatatgtataacgaccagtttcggtttttttggtcagtttattacccaaaaaaaatcgaccgttcaatggcaattttaaccgttagcggttttttcagttttcagttttatcggttttcggttctaagagtgttcagtaggtctttttgaacagtttgtttggtattctggattttaagctcacccctaggaaggacgagcaacctccttgggatcatccctaatcctgatgggtcgttcaattggcacttgatcaccttaaggagccttcttcttcttcttctttggagcctcttacttagttgtaacctccttggtcacttatttgggctcttaaacctcattagacgggtagagcccatacttgatgaaattactctcagtggccaaaagagaaatgatccgagccgacttcgggagttaaagaattttttgggctcttgacctaagacctagagtaaaagtaggacgacagaaaaaaaataatgtgttggaaggagatgtgattggtacccatgtccttgacaaagtagtaatctttgataaacccatcaatcttagtcacttccttgttcgtggtgctagtcagccatttgcactcattttgggaaaagtagaagtacccagacttgttctgcttggggctattttaagttgaacaaccagttagtatcgtgagtggacggctggccccatccttgggtagcatacaacacgaacagtgcgaccaagtactttatgcctttgggagtgaattgggtcagacatatgtggtaatagttggccatctctttaaagtatggatacaaaggtagcatttcaccttgttttgcatgtggccctgaccatgcacaaaatccacatccaggatttgtagcaagttacccaagactaggtaggaatgcctccaccttcccgaggaggccttcttcaaagagattggtcaatctcttggatgttaacacggatggtggtgagacccacagagcaccattcataccttagtgtttagaggccaagcctctatgtattcctcctcaacataatcttaacctgccaccaagacatctcccacattggagacaggttctctgaccttattgtagtcgccaaaaggaagttctagaacctcttccccttcttcatcttcttcttcttcttcttcttcttcttcttcttcttcttcttcttcttcttcttctccttcgaccatggagggactggcaggatgggcattaccctggtcgtcaatctcttggacctcaatgtccccttcaacaactacatcatcctccctcagaggcctagcttgttcaacctcagctgctgcaaacagtcgggcaagatgaggattagatatcgaggccttcctcataatttacttggttcgtgccatcattctatgtctgggcagtggtttcaatttagatgtgtgtcttgcaacagtaacaacaatattagctacaacagtgttactcgtagacgaagttgctcaaccttatagaagtgtatcaacaacactaggatggaccttatacatccatgaagcaggaagataatgcctccaaccttttttcagctcacagataaaacgatcgtacccctctccatgtatttggtcattgatagtgttacaccacggacttcgaggactctgtatgattgctgatgaccttccaatcttcaaaagtggaatttgaaaggctatcactagacgaagatgagttcccacctagctgagtatgattctcatagaggagttgaagaagatcctggtcggtatgatgatcacctccccagtactcaccagggttcatctaccagaggtgggagacaaagggtgagagtttgatgggggaaaaggagaaaaacatgtttgatatgtcgactcaccaatttaaatagaaaaagaaggaatttaatttcaaaatggaattctcaaacccaaaaattcaaagtcatgaagaatatctggaaatttttagaaaccaatgaatgggtgaatatgaataatctcaagccaaaaatgggacgagattaaagaattagatgacctaagcatatgttagtcgaaattaaaagttctaatgtcttctaccctatgatcaatcaagaatagttcaataatacataaattttgcatcaagaaattcaggaaataatgcatgaattcaacataaattgcataaagaaaaggaaaagataacttactcattgtttgaagctttttgaacgtgctcggagggtttcagcaatggagattctagcaaggtttcttcaaaaattcaagaatgagaaaagaaattttttttgctctggttttctgaaaactaaaatggctaaaagagactctccaaaggtttaaaccccttttataggtaattgatgggggtaattaattgatttaaaatttaaattttttgggtttcccccttaaaaggaatattaacactcattacaacagtccaaacatcacgcatgttgtaccatataaccgttagtacgtgattcgatgtacaacgttcaagatgtattaaatatctcagacatctaaaagacgttcgatcaggtcacgttgtcggatcaaaggtgataattagacacgcgtcacccatccgatcagctttgtggccagatacggataagtccacgcgcgaccaagaagatcccgcggagacttgatgggcaaatgttatctaaatttttgtactttgacgtgacatccatctaggtgacacctgtaacatatttcataacatgggcggatgattctactcctggtaagccgaataggaaggattgattctcaaagtcacaaacagaagttttggcatccgagcagagtgtgcataaacatccgaccaactttcatcgagaaggtagtttgcatacaccgatcaggggatgcaagttagcaattttttagatatatctcgtatatctccaagcttgcaagccacgacacaatccctacattcatgggatagattcatgtcagagaataaaggcaatcaacctatatttcctattatcctcattgtaattatgaaaataaactagtttcccattttattgattattgatttagggaaactaatttcatgtgattaatccctataaatagtggactcatctcactatttagagacgtgaaatttatttagagagagaaatctcaatctaagagtaaaataatcagagattattgtaagagttttcgagagagaataagtcattcttattcattttcttataagttaatataacaaaaatgggagtaggctattaccgtctataaagggtcgaacctctataaaatctggtattttcttaactttatattatttactttatgttatttagttattctcaatcactttaatttaacttactattgttggtatgaagactgatattctgcacactccctggctacctcatgactcaagtccgtatgtggctactacacacccgggtttgaataattttaaagttcaaagcctaatgcaaatttctagccgtgagtgggacttggaggttgtctcggatctctttgataccagggatcaggccctcattttgagtgtccctcttagtaataatgctgaggaggatacgtggtattggaaaaagaatgccactggtttctatactgttaaaagtgcataccagtatctacaggaagttaaaggtgcgtggggattggaagctgaggatttagcttggaagactctttggaaaatcaaagttccacctaaggttcttcaccttatttggaaggctctctctgggtgcttaccaactaaatcacaattacaatcaaaacatgttttagtggggctggagtgtccattttgtaataatgcagcagagaccattgagcatgtgctcttgttctgcaatttcagcacttcttgttggattcggtctgggtggggaagcgcaccagctcaacacgtcagttttgtggactggtttaatgctctaatcagtcggcaaacaccagaaatcattgaagagggagtaatgatgtgttggtctatttggaagtcccgcaacgatgtcgtttggaaccaaaaaaattgttctgcagctgatgtagtatgtaccgcgaagttaattcttgctcaatggaagtacgctcaatcaaggaagtttgatccccttcatgtgccggctggtacttttgaaggaagcgagcgttggtcgaaaccggatgcaaatatgactaagattaacgtcgacggggctgtgtttgctgctgaaaatgcttatggttcagggatggttgttcgtgatgatggtggacggttgattgaggctactgctagcttcgtgattgggggtactcaaccggaatt

SEQ ID NO: 298029 - DNA, 4558 bp, Cannabis indica
agtagaaaactaaagttctaataaagaaaaaggaatgtggaaagaaactcatacttcatgaacttaaaaagataataataatacaagaacaagagtatggtgagtgaagctatgaactagtagatagtctatggcagccctgtacatcactttcaagtttcgccttcatccctttacattataggtcccattttgcaagtcaaggcatgatctattttctttttaattttttgttccgtttttagaattacaaattaaacctcaacctgttctcatattggaaaaagtcagtctcacctttggctctgacaggatgatggggggttccattgtgggggacatggctccataccaagcatttgcaataggaggtcttgctagtgtgcgaggatacggtgaaggtgcagttggtactggcagatcatgtctggttgcaaatagtgaattgacatttcctttggtatgttagtttgacctaatattttaatagttgtttgaatgttggttattgctattgtatatgtacactatgctattgaccaagtctagtctagactccagcggtataactaggaaagtccccgtgagtaatcaaataccggccatcacgaggacaatgagtttcagccactaatactgaaatctttcagtagttttagaagagagtgtagtagtagctaatatctatcaatgccgattttacaagcacacgatggtttgacttaagcttttgaaattcttctatttagcagttagcacacagttttcgctgatatgtgcagtgcaagtaaaaatgcagtgaaattgtataagaatctcatttgacactcttttcttcatagaaatgacaaaaataaagtgattatccaatttctttacctgtagacaaagttaatttcatattgattatcacttcaagtgtttgaccttactagatttctattttgtctttagaccaaaagcatggaaggtgctgttttcttggactgtggaacggacttgggatctagtcaacacgtacctggtgagtctcactagaatgaaaaaaaaaatcagtttgataaatctcctatgatgaaatcctttttataagctcaataattacttgatagttctagtgtacatttattataatcagattagtggtcctaattgggcaaactatcattgaatttcattggttaaaacttaaagggcttgtttagtatgccgttgtattgtattaaataataaataacactatgtttgaacaaaattgtattaattattacaaccaaaacttttaatacgatgtaagttgtattaacctcaatctccgacacgtacccgaacttgtccgaatgcagactcggaccggacccgacccgtagtcggtgtttcgagtttattgaaaatatattataactttacacaatttattaatacaagtcaataccaaacatagtattatattaaataatactaatacaatacaacacaataaaatacaatacgccgtaccaaatgagcccaaaagggataacaagcgttatatgccataaatacttgactgtctcctccacagttattgagaaaataatcattcagaataataatgcatcatgttacaatagtatcgaataggccagactagagtagttggattgaatctttatccatagttttagtactatattgtgtttggtatgtcattggggattaaaaggttgggaaagtgaatttgtaattttatttatgatgctagctttggaataaattaacaatttaaatttcatttgaatataagtaaagtactattttttttcttttacgttataagataatgtcagaagtaaaattatctatttttgttcaataatgcgaaaacatttaattggtctaatctgtagtgatctgcagggttatagagattgtttcatggtagttttgaatttggattttctgagctaatcttaggaccagcttttgagttatatggaatttgggtcaataatagattttaggatgactacttttatgtttttggtcagattggttactaaacttctatagtaatatttcggtataactccgttctcatctctcttgttcgggaaaaatcaacatttgaattttgaatttcaggaaatccagcattgaggcaaggaaagccaggatctggattcgggctcggatatggtcttcgtttcaaatcgcagtttggccattttcaagttgattatgccataaatgcactgcagcaaaaaactgtctactttggcctaagtaatcttgcttcatgaactccccacaggcaaaattcatgcatttttcatctgcatgagcatgaccttttcttgcttcattggatggttcaacagtccattttaagctgttctcctccacaattttaaagtaaaaagccattgattaatttcatctacttttttattttatttttttctcatgatttttcatttcaaggaaaaaaatgaattagcaaagtcacaagcttattaaattacttatctttactatgtgaggagatcagttaatgttattgttattattaatgtgaatattgtaacgaggaagataaggagcttgaaagttgaaagcattaagaacatcttctcaggaatttaaatttatgatatttatggagttgcacacaaataaggcttaatttatggtgtggtggacttgatcaaagggtggtaattcgtgttcataggtcctttttattgtgttaagacttaggtattacgagcaaatattgaactctaatctgaatccaacccgtttataaatgggttgactgactcgtgtaatccaattatataaagatttatacttaattttggttaacttatcaatcgttgacaagtttataataaatttaacatgttcatgacttttttatgatacatttataaataatatatttatattttatttaactaatttaattcaatttatatgtaataataaatataatagtgtaaattttaaataggttgttgttgtgttattttcaaattaggtgtgtcaactcaaaaatgactcgttttataaacgggtagccgtgttgactcgaaaaataactcaaactcatttgagttaaacccgaatctgtttattttgtacgagcttcgaatcgtgttatcatgtctgacccatttaacttgatccaagttttaagtttaactcatctttcactcttaactctaattttgattctactattggagtgagtggggtgtgcataaatcgatctaatctaatgacaaccgaccgatccaattataaccgactgccaaatattggatatccaattatgatcggatcatattggatcttatttttgaatatacaattggatcgaattggatattagatggagtgtccaacaattcaatacatcccacatccaattgaattaattaatattttcatttagattaaatgaaaaaataaattttatattattatacgtaaaaaaaatatatgtatatatgaaaattaataataaaatttcacttttttattttggattagatggatccgatccaattcaattcaataaatactgaatctaaaatattagatggatccaatctgatccaataaatactaagtctaaaatattagataaacccaaattaaaccaatagatattcatgaaatatatctattggatcgattaaatagctgaaattaattagatcggatcggatgataaactctaacatctaatataaaaatattagatgtagttcaacaaacaccctaagaagtgaaattgacttggttactaagttgggatatattatagtatatgaccgaatggggagttcaaataaatggagtttgggttgccattaaagatgttcataaaatagtcgatccaatccaatctaatccccaaagtacgaatatctatacttgtgcagatttgattggattggaaaattcaaaattcatacttgtgcggtttggatgatgacacgtaaaagtaatcaattcaatccaataaaaaataaaaaattatatatacaattcacatttcaatgtaaagtaaatagtaatttaaaagtgtaatacaaatataaaaacttaagagatcaaatgtaaattctattcttatatataattttttttacatacaatttaaaacaaaattaaacatttctttatacatattaatttttttttcctttgaatttgttatttattatattattatttgatttgttgttgaggatataaaataacaataattttttttattttgttatgtggaaaaataatatttttttataaatattaaataatttaatattaaaaaacaaccaatccaaaataattagattagatttgagatattatgcggattgaattagattcagaaatataaaatctacacttagtgcaaattaaatgcactattattaaaggaataattacataagacacctattttttgtaaaatatttacatttttacgttcaaagaatgttttttaaaataacaacaaaaataacatacatataacaaaaataacatacagataacaaaa

SEQ ID NO: 298030 - DNA, 4974 bp, Cannabis indica
agtttgggtaattcatttttatttttatttttttcggttgcttttcaccttaaactcacgtgactcccaaaacacacaagaataaataataaaaaatttaatatgattctcaagtttcaactcaagtacaactttcttccatgattttttgtttctccctttagtattaaatgttcagtttattggcattgttaccctctctctctacccatgtttagattcagttatcgatttcacctgtgacctgtgagcaaccaacggtttctgggcacttaggtactttggtactatccctgaaaggactacctaccatggtgtgagaagctttataattttaactttatatttatatgtggacagcttttttgaatatacattttcattcaactgtatgatttaactgtattgatttgattaatacagggtggctctggcactattgttctcattcttggtttagtttcagctacaatgtcttgctccaactcgtataaaagcctacacattttcaatgtattggattatggagccctgagtaatggcataacagatgattcaaaagtacttttttcttttcctggaaaactttggttttcttatctagtcaaattttcttttagccaagcatataaacacatttcattgtgaaaatattattattacaggcatttttgaaggcatggactgcagcttgtgataacccaagagctgaaaatccaacagtggtcattccaaaccggaattttctgcttaacccagttgtgtttagaggtccatgccaagctaagaacatcaattttctggtgaggttttccacttatctattctttaagatcatatgtatggttttcccatgtgtttttgtgtataatgaggtcaaataagttacataatggttctacttagttctgtttcttctaagtaagatttttgcagattctaggcaggattttggcaccaacttcaactacagcctgggaagggctaaacccaagtcaatggttggctttccagggcataaccgggcttaacatcgccggtccgggttggattgatggccggggtagtggttggtgggatcagtcatgcaagtatcatcctaccctggtacatttcagttacttttcttaatattacttgctttcttacactaacttctgttttctgatttgtccaatatttttaggaaggatgcacaaaactggccccaacagtaagtggtattcctatgtacatatactttccacacacactatgaagtgtttattatgagattaaagaatatattttgttttattcgatgtgatatgcaggcagtaaagcttgtatcatgcaagaacagcagcctcagtgatattcatttcatcaatagctctcaaacccatgtgttgataatgctttgtgatggaataaaaatcagtgatttgacaattcaagctccttataacagtcccaatactgatggtatccatgttcatgcctctcagaatctgattatcaacaacattgtaataggaaccggtaactgattattacataaacatctaaatccttatcaaacccaactctccaattctcttcatttgaaactaagtgacattattaaatgaataggggatgattgtatttctattggggactatacttctaatgtacaaatatcccaaattcaatgtggaccaggtcatggaataaggtaaataattttttattgttttgttttttaagtggatggtgacatggtttaaaatgcaaactttcgatatcttatgttttggggaaaagcattggaagcctaggaagaggaggaaactctgtgcaggtagagaacatttatgtgagtagagtttatctcaatggaactacaaatggagctcgaatcaagacatggcaggtatatgatgaatataccacaaagaacctgaaaattaaaacccttaattcatttagcatatcattaaactatgtttggaatttaactaagtttacaaataggttggcaacggttatgtccgaggggcgattttcgagcagttctactgcacttatgtgaaaaacccaattattattgatcaaaactattgcttcatcagaggtgcctgtcaagaactggtaagaaattattttaatgaaactcttattcttaaaacattatctatataaatttccaaaaaacaaatcattatctatgtggaaacacttagtcaagtccttttttctttcttctctctgaatcacacagcaaagaggagttcaaataagtaatgtgtcattcagtgacttttatgggacagcaagcactgatgtggctatcaatctcaattgcagtcgaaccattgcttgtactggaattttattgtcgaaaattcagctaaagtctgtcaaacctgaacataacctcacctctatttgcaccaatgctcatggttatagcttgggaggggttgcaccaagttcttgtcttcaaagctaaccttttatctttcaactctttgtggcttgtatgaaatttatttccaagtgttgtaatagccttgtttgttgtgtttctgtgagtacattaaaggatgtgcacaatagatcatggactcatttggcctacttgtaattctacagtttatcaagtgttggggtaggatagctttgctttgaagaataattttgagtaatttatatcattttttacaaaatttcaaaggccattccaattttttcggttagtcaaggttactccataaaattttagaatcagatggaacttcagagacacatgttaaaaaacaaacactggtgcttttccaaaattttatgaaataacgcaggcagtagtaaaacatgcttgacgcctgattatacaacaaataatttatatgtaatgactgttacacttggtatcataatatacaaaactataagaattaatactaaataacaagaagcctgaaatttacagtcatgctcttatgtctcccagaacattctcatgatactaacttttgaatagacatttccttgagtgaagttactaatcttcgaaataccttcagattgtggcctactttttcctgagaaaccaaagtaaacaagaaaccacattcaaaatccattcacaaatgaaaattataataacagcaggaataacgacaatgatgtccacaataagaatcacacctcacttagtaactcgagcctttctaaatttggaagtaactttccacttatcaaagaaatttcatcttctggttcggacctagaaccgtaagtaattgttctcgtagctccacttgcctctgttgtaattgaactgccgaaaggaaattcaaacaaaagggaactaccatgtaagcgaaatatgaaaggaaatcagagaaaataaatcaacccatcaaattcacagtgaattggtaggtaggagctttcagtattcccaattttgagatgagactttaaggtcactgacatatataggagttataatcaacagtgcatagcactctcgtgtagatcaactcctagagttcgaaaaataaaacaatattagagcgaatcatacctatcctggaaatgaatgaggatgatatttagaacctgttctgcaacagggagcaataaggtaatcaactgatctctgttgccaacgacctgacacatttccaccattgcaacatacctcctgccaaaatggggagagaagagaaaaaaaagcatcacaaacattttctagcaacgaagacacgtgtaagaaggaaaaactactgaggacttgtttgtttacaaagaaccaatgtctagaagaaactggttgacattaaacaatggaacaaaccgcaatcgagatagcaattaattctacagccaacaaagtgaatcattctatgattgcaacacctcctagcatagcagtcaaaacgtcacaagttgcacaaagcaataagcatacacacactttttaaaattgaaattttttgctcaatggcatataagtaaatcaatgaatcttgaggtatggcttcagctaggagttagttccctagattgcgtcagttttgactgggcacaggtcattttaatatgtacacacatgtctgggaaaaatatcaagtgttttgtgttgctttttcatcagattatgtaaaatagttcggtgggaaatatatcttccactgaatcatatacttgtttaattaaacctaagaaaaatagaaggataagggaagatggtaggatgagatacaagcaggagtgagctaaaactattctacaaggagaacgtaaagcttgaacctcttttggttatgaaccagaacagtttaataaggccataacaaatacagccaaaagaaagcaaatacaagaagtgatgaaaaaaaaataaccttttctgtatattgtcagatgaggaaacacaatcttgccgagcacacatagtgagaatttcatccacctcttgtcttgatagctcattaatgtctcgaatctgaaaatcatgagcattttactagtaaatgaccaggtagaaaaaagagatttaaacaaacaaacctaaaatcaaaatttaccctgttcagtaatagtgatttttcctctccagctctttcaagagcaactgtcacagaattgagaagagaaccaagtaaaattaatgtaggctgttgaatttgaactgaagtatggtaatcagatacatcattcgaaatctgcagtaaggcaaagatttgattggagaagttaattatgagtggaataacaggtatactaacaagtgcaaacaaggttaaatatgccttacctcaaagaaagaaaacagaaaagaataaatatacctgtaatctcaaggattttttcctgatgagaaaatatagatatgagctcaggctgaagcacaaccgaaatctgtttaattctgttttcctctgattctggtttttgacatcaatgaaagaaaataattagaacaatattctttttcttaaa

SEQ ID NO: 298031 - DNA, 1252 bp, Cannabis indica
tccttaatatttttaaaccaaaatgaaaactttaaatatacacttaatagtggtgttaggcactatagtgcctagcaatgctcttatatttgttaaaataaaataaataaaatctaattaatatatatatataattgctgcacaagtaataatatgatatctcatagtggtattagacactataagtaccttagagcatttctcataaaatatataataacatacaaaatttactatgttttgatagtttgctcaattatggaaaaacaaatctcataaagtttgtatctatctttatgtctcatactcaattaaaaaccatggtatctttactagtggtaactaaatctttgtttaacatctatatctaatgcataattagtatttatgtaactttcatgcataaaaatatgtaagttttattgatacttatttattatgaagtgatatttcatttatgtaatagttgtcttctagtatttgtcccgtaattagagtagagcggcatatatatatatatatatttatttattatgtaggagaaaatattgttaaataggaggggcgtcatgcatgacttggatttttaattcaaacatatctttctcacaatataaatcatcaacaaattatatatctagatgaagtagtattgatttagtcaaatcattaagcattctattactatttaaataaatgtatagctttgagatgacatttgttatattttctacaagttatagttgatactatgccatttaataattatgcgacatgtgtaatcaacctagtgatactatacttacaaagaaaaagttcaaagtttgaatttttcttctccgatgtcaaaaacataaatagttatatgtaattttaccattgtgttccaaaatacattgtttgatatagaagaatttgacacaattggaataaaaatcaaattttaaaacttataagcttccacttaggtgcatgataaaatttgttacaattttgaaccaaaccaaaatattagactgagatcaaataagcagagatagatcctcatatcagtttataggatactcaaaaagataagtaaaataaaagattgttaaggtatgttaattaagtcaaatgtatttaataatttgattctcttttcatactaaatgacattaacatttagcattaggcggaccagttggattatctattttgattttatatgcttaaataattaaaaaaatttattattataccaaaaacttaa

SEQ ID NO: 298032 - DNA, 8218 bp, Cannabis indica
tccaatccgcactattgcagattggattggatcgggtttaaactattatgcggatcggattggatcgaaaatatgaaatctgcacttagtgcggatttgatgttgtttgaccaaaaaagtgtggatttgatcggatgaacacccctatataatataagcacgagaagactaagcaattaaatatgggaagatggagctcaagcacttaaactaatgtttttcaatcacacgacttatataaaacaaggcagtacaaggttgaccgaaagtaggactactcagatcaggaacacatttccgagaaagaaccagttcatgaagccacatcactatttattcattaattttgtaaagctttattataattactccgtacgaaattggaattaaccactcaagccttttttgtctgtatgtttaatatacattttgctttcaagtactatcttttgcaaaaaaaaaaaatctttagcaaaaaaaaaaaaaaatcctgtttcagatctattatctttacagaattcattaccaacctccacaaacacacaaaaaaataaaagaacacaaacatctcgacggcaagatttctaagtctcataaaagaaagtttcactaaagattaacttaactaacagtaacgacaaggctatttctatttttcttgaaaagctaataaggttacgacattatggaaaactttgctttgctaagaaatttaacatgtattacttgtttgtagtacaaactttgtacacaagacttatttctagaatccaagacttttcctttttccacacgattgtaataaaatttaattttggaatcaagttaagaatatctgccattcaacaatattcagtttaaaacaaggtataaatctagatttcaaaattttcttcgcatttcctactagcaattatcaggaaaaaaaaaatatactactgcgtgcaaaaatgtaattaagagagagaaaggccatttcatgatccaaaatgggagtttaatacacagcattcacctcctgaagaagatttggaagtttgagatcctagtacagaacaatgcccagagaattcaattatatcccttctaaagaataacatcacggctgccgtttggtgcgaggcattagagcaagaataatctttttccttggaccctgcaaataaacaatttagtaagtatgaacattgcattgggttcagatttaaacaacagcattatatagggacgagggtaaatgggattatatagagtgagacacggacaaaaaaagaggctttgtagaaatcagagcaactttttaaatttaaaaatgaagacaaaagttctcataagcaggtttacccatgcatataacttaaggttgcacaactatgttcacggtcaagtaatagttgttaacgacaacaaagaagtcacagttcatataatcctatatcagtggttacagatttctgctgcctatactttgaggctacatgatttaccaaacaaacctccatggagaacacaatccctgccatttagttttcacaaataatgagctactgatatccagaaaggcatggaccaaaatttggttgtcatatcctgtgctttacttgtagccaataacaaaggaataaacatgcaattttgcaagaaccaactgacctcaaaaggaagaaagcagattcagaaaaacaacaagcgtgtacttgaggccaggtgatactttcaaagttaatttatcattccacaaaagaaggatagaacggaaagcaataagcctgattacagcaatagttacctgtaagcccgtttgggtaagctttttaattaaagctgcttttagcttttaaaattaagaaagcacttttaggagagtttggatagaaaataaaagacctcctctttatatattttttaatatcttttttgagaagctaggttttgaaaagcgacaaggaaaagggccttataaagatagatccgcgcaataagttagtgttagattatgagaaaatattttgtgaactatctgatgaccaatataaacatttagcacgcttaaacatcatcactgacaaaatataagcatcaaatcgcataagatgaatgtcattcaaagatatcaaacaagatttatcaaaaaggaaaggagactaaccatgggtattcccagctctttcaagtcgttttctgacatatgcttcaacgcagtcatcaacctgaacaataggtcagcaatgttgatataagatgaagtgaagaaaaaaaaaaagacagcggccacaaaggacgttataccccggagagagagagagagatcaacaaacatggcctactaaacattgacagctatattaatgtgccctatgttaattttcaagcttgcacattttatgtaacctaagacataacttagggctggcatctactaattgcaaaatctagatcatcagaacaggcaatacttaaataacattataacgacatacaacagtaataagaaatagcaaccgcaaataacgtacttcctcggccttaaaaaggatagcatactttccaagtcctaatacatgaagcaagccatcaacagtttgttgttcttcaacctatttgaacaacaaatgaaaactgtgaaaatgtatagataattaaaagcttaagaatgctgacagaatcagataacgagtctcctaccatatatgaactttttgataccatgccactcgaagggggaagttggcttaaatgtggggctacatgttttacagatccaggaggcaatgcagagtttgttgtgaaagttacagtacccataggcctggaggtatcaataacacttttactcgtatatgcaattgatctgccatcgtccaatgccctgcttaatggcctcctccgaatttcttccacatttctttgaggagagagacccctagatgtacccagaatcctatccggtgatcttcgtcttacttgatccactgcccaagaagaatatgaatttctaggagattccatcttatgcaaatcatcagcacttcttgtagaaggaattcgaccaaagacagtattctcttttggttgaggtatgtgctgtcgtgaatcaagggaagacattggaggcctaactgcctttgtcagcttgtcacgcaggtctacaaccttctggtcatcgttactgtgtgctcgtctagatgcatttttccgcatcagttttaatcgaaggtcatccttaccaatgtgcgcatcttggtattcaatagcaaaaaaaggttagaaaatacaagataactcagacatacagtactacagtgacattacttgtcttgggtggtcataacattagctcaaatagaaaattgcaatgttatggaaatgtttaagccaattaccattcaaaccaaaaccattagctctaaaactcgatgtaccaatatcccttcgttggctgcaataatacgaaagagtgtcatatccatgagaggcaagactataagaagcaaaagcttaaaaaatcaccaacactagcagaatgtagagtatgaatgaatgtgtctatacgtacacaattcaccatcacaaaatcgcaagcaaccacattagagactacagtagctagaacaatgaagtaaagatacgcaccgtttaatgctaccattgtataagtttccatttccaaagtaaccatctccaatgctacttcctaacctatctcttacagaccgctttgttcctgctgcaggcatagaaacgccgaaaggaatatcttcgccagacgcttccctctttactacctgtcaaaatcgacaaattataaccgaacaaaaagcactgcagcctccacaatactcaaaaacaacgaaaaccccaattcctatgcgtcgctacagcaatatctagataaataattgaaagcattgaaacttctagcaatgtgatgtcctctccgtttcttctcggcacccaaacagactatgaaattgcattctaaaaaaaaacccttcatccgatcgaaacttcgccaagtaaaacactgtggaaaccatacttaaagaaaagggtacgaaattacgtacttgaccacttcgccccagagtaatagtaacccgacccctcggagcttcagccatgaattgaatcagtatccaaaatccaaaatccaaaaccctaactaagcagcaactcaatcagaccacaattaggattgaaatcaaggagaagagaaagcatcgctgtctagaaagcaaaaccctaaaatcatcgccagccaaaggaggctaaatggaaggagagatgttctttattagagaaactttctcgggaaaatagtccgatttcgtggattgggttgtaaagggagaatgtgtgggagtaggagtgggagtcggagggaggcgaacgtcgttcgttggtgagttgagggaattgttttgtgaatcattattgaaaggtcaaagcgccgacttttccaatatgttttttgttttcctttttctttttaaattttttaatttttttttccacaaaaaccaattctctgtttttttttttttgccttagttctcacaaataaaacctgtgattggttgctgatgtgaatttttaacctgtgattcctaaatttctaaaatgaaagtctaaattttgtcactaagtatgtttctgaaaatgtaattggtaatgtgtgattgatttaattgataaataatggagctattaaattttgatttatatgtaaacttagtgatgtaattttaagatttaatgattcataaaattcaaaataacactacacattaacatcattttcataccatttgttctatcgattgataactttgaccagttgtaaaaagagaaacaaaatacacataaaaatttagtttaaagttataagtaaaagcaagttatcaagtaaaaaaaagcagctgaggagattttgtctgtgaatgtcaataaagtgttgtagcactcgcagagggttttttggtttctgaggagacaaccaatattggctgctaccaagaacttaacagacatatggtagatggataagttggccaggaggtcacatagagttggccttccgatcatcacgttgtacggagacctggcgccaaccactatgaaagttgtcataatagtattttgcctcaacgaagtgtcgagtcaacagttaatggtaatttgatcttaccacacaaagtaactccattcccactgaaattataaatgagttggtcgcatggttccagatcttttaaaggcaaatccattctgtccagtgtaatgactgcatatgtagaatatggatttgagaggcaattaacattaattatttatgttttatgactatatgtgaatattttatattgtaggcctatttttaaaaatagagattagggttaataactttttcaatttcttggagattttattaaatatgacatatgtgaaaatttacatttttgtgatttttgctatctaacgatggaaatgcaacggttagagtcacatgggttagtttagaaccttttatttagcaaagtgtatgcatgttgatatttgaaatatagggtttagggggctgtggtgtttgaacattttacccctaaactttgaatttacttaagtgagaagcaagggtaatttggtcattttctcttagaggtggatttttgtttttaaagtatgtgtgggatttttctagtataatttaaactttatttctttttaattaaatcaaataattaacctctcatatgtgttaaccttagaatatacaaagtaaaacacaaacctaattttctctctccttctttactttggcaccaaggaaccaggggattcaaaggttatttttctgtgattgttggtaatttctagtaggatttggaagcgaagatctgaggtaaggtcctaggaccttttttcttgaattttttggaggttttagtgagctcaagcatgcaatttcttgaattagattctgtccgagctaggttttgtttttggctgttttatgtgttgtaattgagttacttgaagctagtttgagaacttcttgctggttatgtgtgaattttagcaagtttgagtactcaaacttgactcaacaatgaggaattttgagtttctattttatttttggttatgttacttgggatatgtttattgtaatgtaaataggtaatcaggagcttagtttaatgttcgaggttgttttgattttgaggtgtaagatcaccatcggtcggtgatcgtgcagctccggtgcgtgtgatcggacggtgagcagaggtgggacgtcggtgctccacaggtggtagttatagaggtttgtctttggtgttttgaagagagagaaagaaagagaaaagatagagagaaggtgggtaggggcgttcaaataaattaaaaataattttttgagtctcacccactttctttattaatccatttttactcggtttgaccgagtcttcacataaatattttaaattatttgttgcatcgctataagtatttaaatttgtagtttcacgaaaaaaaattaacatatttgaattaatatcttattatcattaaaaataatcataagcatcacatttattttataaaatataattttttaactttttttaatcaaggttgagtaatcatcatattcctaatcagaacggtctaccgtttttgacaagaacctagaaaaacattctaacatttttatagaaatagtctgccatttttaggcagtttttccaaagtctcgtttttttttttttttgcgtttcctcaatatttagttttttatcacactatttatcgataaaaaaacttttagttttcagtttagcaccccgaaaaggttttaacaagttgtttacctattttgcgtgattgtgacatagagcctccgtccagcatgtgaattttcattcaggttgaccgacacacttgaatctggaaacgaggtaagattagtataaattgtatatacatgtatgtgtatgtgtgttatatgcatgctgtattataaaatttgtatactactaaaactagtacgattgcattatggagtgtattagtacaatatatgatgttaaaagggtatgttacagtgttaccaacactagcacaagacgagtcagagtgcatgtggtacaacactcagtggcacttaaagtacgattcagctctgccaacactaatacgggacgagtacttagcgcatgtggtacagaggtcgtacttctgttaagaacgttcttaatgcatctaaagtcgtgtgaataggtgtatgggcacctaaatacaagtcagtaatatattatatgttttgtgcttttcctactaagtctgtcctcacatatattgtttacatgtgtaggtaaaagaaacgcgaaggctgagcaccagtgattccagagctaggggatgattagatttggagtgtttggtctcgagacgacttgagccttcattttgtagtcgcattgtgacacttttgtaaaagtgcattttcaataatgttgtaaaattttaagatgggatcccgtttttattatggttaaatatgtataaaagtttaaagtttaatttaaagttttaatttaacgcaaatttcaagaaaccctttgattagcaaaggcatatacagtaactggaaaatcactatagcagtcctaatcaagtgggacgttacaatttggtatcaaagtcacaggttgtttaccgaagactgtcaagatatgtacaatcatcgtcagagataagctcgactcatggttcagtaatcctttacttatttagtttatttgataaaaaaaagcatgataggaagcatgttagtattatgtgttgggttttgtgccctaaataaaacccatttcaatataatcagtgttggcttcgcttttagccaacgacaatgagtctattttataagcgataaacgatatgtagtaacagatatatgataaagcaataataagacacaggaattttatagagtttcagccccgagcagttcggtaatagcctaatcctcgttatttgtattcacttaagatcaaggaagaagattccttttcttatagctcttacaacagtatctctgaatatgtaattcttagataatagtatagtcttagcttagcttgctttttgaccgatctcttgcccagtgaatatgcatcactatttatagggctaggaaacttgagga

SEQ ID NO: 298033 - DNA, 1516 bp, Cannabis indica
tttgggtacaatacatataaaaagaggtatgtttcaaataaatataaaattagaggcaaatttgattaattgattaataaaagagacatttttcaacttaccccaaattaaatttcggagcccctatatatatagtttaattgttatcaaaatgataattttaatattttagtgtaataatactaaagctttaaaagagctctaaggttcaatccttcatatagttacataatttttaatttttttaatatgtgtcgactgatgtagtaattggttaagcagtcatgtcattcatttatttatcaactgtaataaaatttgacaaaaatactattttataatattgtgaattatttataacggtttaaaaaattcaagaacacaatataatacttcagtaacaatatatacagatcgatcaccaagatattactattaatttatgtatttatttaaaagtaaaattcagtaccaaacttttgtttttaataaaaaaatgtgagaacaacttttcgcaaagtaatgaaattaattgctggctgtaactaaacgtacaccaaattattatattaattttctatactgtgttttgctacgtaacaactctttttaatcaattgtattatacatgataattaatatattaacatatatataatttgttctgacattacgtatgattatgaattaaataattaattaattaatttaaaatttagagaaatgggggaatgcttttatataaatacatatatataatttgcaaccaaaaaaaaaaaagtaaatatagaaatgtaattgcaataggtaaatactgtcctcagttaagttaggtatgagttaaaaatctctgattaaaaatgtattttcgtatatatatgatttggtttaagatattgttttcacctgagtgagtactttatctctttccctgaaattttaaaatataattaataaaaatatttttttaaaaggaaaaatgtgaatggctaaaactgatttctagaaccccatcattacaaattagaagtcaccattttgctttttttacatttttattaagttttatcaccaaaaaaaaaaataactaaaattattaagagtttttagattattgggaaaaaatcaattacatatagattttttctctattcctttggtagctaatacaatctcaaaaatcatgtgccaattgtactcgtacttcatttttttcttaattgcatggatcatgggtagtgttgtaaatataagacgaactttttgacatgacacgaatgacgagtttgaaagacacgagcacgacccgacacagaaaaaatatgtgcttaggcacgacacagtatgacatgaaaaaatatgggcttaggcacggagtagctcaaaaacatgacacattaaaatgtccaataatttaataataagaagagaattgctagaatgtattactggtgcccaacaccttcctcagtgtcataccgttattggtataattaagtatcaagtctcatataac

SEQ ID NO: 298034 - DNA, 4110 bp, Cannabis indica
aaccccaatccttagatcaaattctctcatctaacggctgtcgtacatcaagaaatacattctctgaaagtatatcagacgagaaaatcgtgtacatacattatttatgtacatatcattatttaaagaatcttaagattaagaacaaatatttgctacagtattatttttgtatatatatacacacacatacctgacctaaacaaaatctccttctagggagaagagcttttacatagagaccataaaacctaaacttgttcctttccccaactcctcaaaatactcactttcactctaacctgagctgaacagagcttctcaacttcatcatcaatggcgattcttcaaagatctgtatcactcactctcattttattcctcttcaacattttaggtactcttttcacatttccactcttaacgacgtcgtttcgaaacatttcactaaccattttttctttcttcttatttattattattatttaacagtaaacgacgtcgttttggccgaagcaacaaccctaacactactaaacaagtgttcctacacagtctggccagggatccaacccggagccggctcacccatcttggctcgcggcggcttcaagctcggacccaacaaagcctactccctccgccttccaccgctctggtccggccgattctggggccgtcacggctgcacattcgacgcttccggccacggccactgcgccaccggagattgcggcggagctctcttctgcgccggaaccggcggctctccaccggctacattagccgagatcacactcggtaacgaacaagatttctatgacgtcagcctcgttgatggttataacctcgggatctcgattactacttcccgatctggcggcggcggcggcggcgcgccgggaaagtgtagctacgccgggtgtataagcgatcttaatgtgatgtgtccggctagtcttcaagttcgttcagccgatgggaggcgcgtggtggcttgtaagagcgcgtgttcggcttttaattcgccgaggtattgttgtaccggaaaatacgggagccctcagtcgtgtaagccgacggcttattcgaagatatttaaggcggcttgtcctaaggcttattcttatgcttatgatgatccaactagtattgctacttgtacacgtggcaactatttggttaccttttgccctcgccatcaccgttgatttagatctatttatttatttttatatttttattttattattataggttaattaagttaatgaagaatattcttcttattaagtattattatatatataatttattagtattattatgatagttgagtaatgattctggcttttgttgtattgatgagattatatgtattaagtaacttagtagaagtattactattaattgatgtttttaatgatttgttatttttgttaaaatgtggttactttttagtaaggatttgaatgtttgtttggttgagaaaaaggcaaatgagaaaagagaaaagaaagcatcttattcaaatgagcattgccaagtgagagttttgttaaagtgtgagttttgttaatgagtttgtagtagcattgaaatacccgtcatctgctagcatgcaaaagcaaacgagcaccccactagataatgagaatactttttaactcgcaaaaatatgtctcacgcttaattggacactagtaggaagacaattggaagcagccttctatactaaattcttgactttaggagaaactcttaaatcccacaactctttccaaatgatcgagttatcaactccaattaaatcacccttaagttcttgaagaagcccatacacacccttgaccgaataaacacaagaactctcaccattccactgcatatatcgccagacattgagaagaacaaaggaatgtttaaaataagttttacatccacgtctacgaaagtatctttaagaacataatgggtaccttttgatttgtcaaactaggatgatctaaaatcataatgggttatctttatctggaagccaaggatccctaattatatgaatactcatctcagattgaacaaccatacgatcctcttttcgaataagagactaagcttcgtggatacttttccatattaaactcagattgcttccaacttcgtccccaaataggacccacgaggataataagagctttaaacacactgctaactaaagaattttgacgaaaatgaagatgccaaccctatttcccaaacagcacaatataaaaatcgtgaagcttccgaaactcaagtctcccatgaacctttggacacacatccggtcccaattcatttagtgaatgccacttctgttcttacccgacttcttccaccaaaaagaacacatttattttttcatctcatcacacactttttaggtaaaagaaacacgttcatagtatagttagagagagattgcactattgtcttcaataaaacctctttaccaattctagataaaaacttactatcccacccttcaatctgctttcttatcttttccttaaaaaagctctacacaactgacttgttgcgacacatagcatttaattaaactaataaaattcaaaattaattttgcacttcaaatatctgatataaagaggttatcttcttatcatttttgcaacatcaaattgaaagaattataacattgaatagtgttcaatattctaaagaaaagtggcccttgcataatttttaaaataagaggtctattgtgaaattaggaaatatatatatttacgttaataaatacgtgtatctagaatttattttttaaaaaagaagtaaatattttaaaattgtaaaatatagttttaatcaatagattagacaaaattgggcctttaaaattaacccagcccaaacatcatatatgacttgtatacttttctaaaatgagttattagtgagttgtaggagagatccaattacacaatgtgagggaaaggctagtgaagtttaacattgcattcaaagaaggtattatttcacaaaaacataaaaacaacaaaaaaaattacaaaaatacggtttcataaaattttaaatatttttacgatttttttgattttatttataaaaaatacggtatttttatgttgtaatcttgttaatttgttgttgattttttgttacatgtatgttattttttgttgttattttcatgttacttttgtgtagttttcttgttgattttatgttgtttttatgttattttttgaaaaaccgttttctttaaacgtaaaaatataaatattttataaaaattggtgccttatgcaattattccttcaaagaactcattcagaaactataagggatacataatcctaatgggcctggactttaggagccccatagaaaatatagtattttggtaagaagttgtatataaaatggtacttgccaaaactacggtcctttctacaaaaaagaataacattttagaattaaaaacttgaccaaagtagttgggaattggtataaaatttgaaaataatttttaaacaaaataaaatcataatttttatattttctaagctttaaaattattattctactttcttattatgagattgtaaatcaatcacaaactcaatcttttaaacctcaaaaacaaaatttctcaatcacaattgagtgattccctaatacgttttcaaaactatacgaaaattattgagcctaactcaccctaacaaatccgacttgttgggaagtattaccctcgcgttatgaagtgaattgagtatatgtctccaattaatacgaaaccctaatatgctctctgacgcgtatcatggaccatgtcaaacaatatgaaaaaattgatattgaaaggcacacaacattataaaattgagtccactctaaaaccatattaagaaagttattgatataaatttaccattctcacagatttgttattggacaccttcgtaaaaggccttataccaatagagtgtggggaaaaacaataaacttcaagcgcagcgaaataacaaagaaacgaagcaaaacaatttactcagtttggtaaaattaccaaacccacaaaga

SEQ ID NO: 298035 - DNA, 1683 bp, Cannabis indica
gttaaataataattccttcaatcattatagttatattattattgtaataataatattaattaatttttagtttgattttatgtagtgagaaattaagttattgtagttaggagttaatgttttgtacttaaactttccttaaaaaaaaataataaccgttgattgattattcgtttggagtattttgaactacatagtacatttggttaaacgatctatagaactaaataaatccaaaagcgcctaataactctagaaagtatagaaaatttccaatcttgttcttgtttattgtctttgaattgaaattttattattattttatatttttggtcataaaaccataaaaatggggttttgtaataataattcattcaccatcatattttatgttgttatagttatataattgtaataataatattaattaatttttagttgacttaatttatgtagtgagaaaataagttggtgtagttagaagttaatgttttgaacttaaattttccttaaaaaaaaattataattgttaactgattattcgtttggaatatttcgaactacataatacatttaaattggttagacgatctcaaaattaaataagtccaaaagcgcctagtaactaagaaagtataaaaaatttccaatctcgattcaaagttctcatttattgtctttgtgtatttgaatttatttttgttaaataataattccttcattatcacattttatgtgttgctatagttatataataataattatactaatgattaatttttagttgtgagaaaaaaagttatcgtaattaagagttaatgttctgtacttaaactttccaaaaataaaataaccgttaactcataaaagtaatattattctaaccgttaagtgacaagtttaaaagtgtcaaataactcaaagagtatacaaaaattccaatcaatctcaatttaaaattctcatttgttgtcactatatgtctttgattaattttttattttattcttatgctttggtcataaaaccctgaaattattaatccatcacatttgtgtgtcattatattgtatataataatatcaattaatgtttacttagttttatgttgtgaaaaaagaaattgtagttaaaagttcgttttagtttagttagttaatattttgtattcaacttttcttaaaaaaaaattctaaccattaactgataagataagaataatttattcgtttagagtctttcaaactacgtatcatattgaacttagttggaaggtatacaaaactaatcaagtttaaaggtgtcaaataactcaaaaagcatgaaaaatttccaattcaatctcgattcaaaattctcatttattgtctttgaatcgaatttttatatttttatattttggtcataaaaccctaaaatggattttattaaataaatccccatcacatttatgtgtcattatatttaatataatattattaattattttttatttaattgcatgttgtgaaaacataagtgttgtagttaagacttagaaatgagtgtacttgtatgttttgtacttaattttctttaaagggtaaatactattttggaccctgtgtttaggactctgagcttaatttttgacaacttttttttttaatacaaccaacttgaagacaatgcttaatacgaaca

SEQ ID NO: 298036 - DNA, 1380 bp, Cannabis indica
ccaacataggagagtcaaacagacgaaagtttttggcagaaaaagtctgacagtaataaccataaaacatttctccaacatattaacacaaaagagagtattaggcacacgggtgccttgatcttggaaatcccatctaatgataggcagataaacccaaatgaaacaagtgatcattttatctaacccccaaaaaaaagcataggactttgctaaattccaattcctaaaacaaattttacagttaattatataaataaaaccatacattcgcaatcaaaaacgtaaagaaatctcacctggaacgaccagaaatcctctgaccatactcgtcttcctcatcagaatcatttccagaattatccccaatttccggcgattcctgattcctacgcctcctaacatttctcctatgatactcaacaccaaccaaaacgacatggacaacacactgtagagcatacccacaaatccatagacggatcggcgtgttagggctttcaggagcagtaacaaacagcatcacaacagaaaccaccacaaacgcggtgttccacatcacatccaaagccaccaccggcttcgagtacccccaatcggctcggcgctcctcaagctccctagccgccgtttccctcaccaacatggacgcgccgcgccgacccgtagcccttcctagaagcatcgctaacgtagcgggccgagccgccgaagctatgggctcggaattcgcatcatcggtggactgccgaggctggagcagaggcgcgtgggagtcacccgagggttccgtcgacatcaatgacagattaaatatacaaatatattaaaaaaatgataaagactttagctttttgagtcaagtagggattgagggggttttggggtttggaagggggtgtttggggggcgagaaagtgattttctttagagagaaaattgggattgcgtgaggtacaagagagaatttagatagaaagaaagaatggtagatacatatatacatacacatacataataatattttaagtgacagttatggatatggactttttagtattttctgttatgttcttctcttctttgactcaccggtttatttttcatttattttatttttaattgaatagttttttggtaataaatatttgggaaattctataatgcacttccttaaaaatgatacaccgatacatctctctttgttttagtattcgaaataattttttagacaaattttttctcatggtcatgtaaattctagttgtttaaaacatcctgcaaaattttaagaaattcgaaaaagtttaacatgctgaaaattgtgttcaagcagtgtgttgcacgtgtgactattttattttatagtcgtgtaaaata

SEQ ID NO: 298037 - DNA, 3837 bp, Cannabis indica
ttttgttttgtttttttttcttggggtgcagaaatggcggttggtgtatgcatgatgaagcaaccacacattatatagacatgattgaccaaacaacactaggccattactacattaaatcacagttcaacaaggttcctagagctgggtggcaaattgacccttttggacactctgcagtacaagcttacctacttggtgctgaggttcataacatttcaataatttttcaaaaaatgacaatttttttgtttcgatttctcatgatgaattgtggtttgtggtcaatccactagtttttattagctattattcggtatgttgatctttcacatttccatgtttggtacgagatttttctgttttaagttcagaattttttttactctggaaataagattacctttttatgttgcagcttggatttgagtctcttcattttgcaagaattgattatcaagatagagcaaagcgaaagggagataaatcgcttgaagttatatggcgcggttccaaaacttttggttcttcttctcaggttcagttcatgattcattctattttctctatacaattttaactcacatgtttcagtgattctgatgtttgttacctttgcagattttcaccaatgcctttccggttcactatagtcctcccaatggttttcatttcgaagtgtttgatgactttgtacctgtccaggttagcttatgcttttctaccaaacatatccaaaaactagttcccattgtatctcacttttcactttttgatgaaataaatggcaggataatcctaatctttttgacttcaatgttcaaaggcgagttcaagatttcatcgatgcagccataacccaagtaaactttttacctccatgatctatatttgacagtaatttttgttttccaagcttcttcttactgattaatcatcattctgtataggctaatgtgacaaggacaaaccatatcatgtggacaatgggtgatgattttcagtatcagtacgccgagtcatggtttaaggaaatggacaagttgattcactatgttaacaaggtgaaattttccttcttgttcatgcaaatttcttagttataacttgcatttaaactgtttaaatttatcaggacggtcgagttaatgcattgtattcaacaccatctaagtacactgatgcaaaatatgcagcaaatgagacatggccattgaaaaccgaagactattttccgtaagtacttttttgtttaacatagcatgacttattgaattttttgtttacaagcctttcttttcatcaattacaggtatgcagatagcaaaaatgcttattggactggatactttactagccgaccaggtctaaagcgatatgttcggcttcttagtggatattatttggtatttctctcgattcactaagcagaagaagtaatatttagtttaggctaattaaactttttactccccgaattttgacatgtaccaaaaataggcagcaagacaacttgaattcctggtgggaaagcgtctctcgggtcccaacacttttggccttggagatgctttaggcattgcgcagcatcatgatgctgtgaccggtacagctaaacagcatacgacagatgactatgcgaaacgcctagccattggtttttctgaggtgaaaagctataatgcctttagactttactctctgatgttgaatttcttcattggtatctgatctaatttattgacctaatcttaacaggctgaaattgtggtcaattctgctctttcttgtttagccaagaataataaatcaggagatcaatgtgaaccaaaagaattgaaactttcccaggtaattctatttgattaattgcttctatcttgaagttttttctgtttgtcatatttctagattgatgtagctatttctattagaggtgggcgagatccaaatcaatccaattgtaccgaattaatcaaatccaatttaattataaaaaactggatatccaacattggatcggattggatgtgaatagttagattctaattgggttggattggttattggatgacactttcgaaatctaactaaaaaccgatccaatccaagtttcgaattgaaatctaataaatgaactgatcaaatctaattactaaattaattgaatttgattggattttaagtctaattcgattgaattggattagaacaaaaaaagttggattagaacggatgctaattccattgtcctcttctttacaatgatttaaacagtgtcaattactcaacattagttactgcccaccaacagaggaagacattccagaaggaaaaagtttggtaatattttttgagattttcatacccttttcagatttttaaagattcattgtcttaatttctcatactatttcaggttttagtggcatacaatcctctcggttggcctcgtaccgacattgttaaaataccagtaagtacatgtttgctcggtctgcattatactctcttcaatatggtctgagaatcacaattttcgacaggttaatgatgtcaatctagttgttcaagattcctcaggcaatacaattgaggcacaatatgtaagtttagacaatgttacaaagaacttgagaaaattctatacacaagcttacttgggaaaatcaacaaaacaagctccaaactattggcttcattttcgagtttctgtacccccgttcggttggaatacttactttgtttcaaagggatctagtagtgcaggtaattgagctctaatttgaaacatgagttcattcttacgaaactcgccattaatattatgcattaagaggcattaacttctaaacttttgcaggaaaacgcaggcatgtactgtccaagttgaagagtccacaaaatgacaccatagaagttggtcctggaaatttaaagctgacattttcgtctacctcgggacaactaaaacggatgtacaattctaaaaccgaggtaagttgtttaatcacaaaaagtagcatattacaaaatcaggcaaaccaaccaaatttaactttagtttatatgtcaaacttattttagaatttacatactaaaataatgctgatttgattgtgatatattacaaggttgatgtaccgatacaacagagctatctctggtatggttcaagcactggtagcgattctgattctcaggtaagcacttcatgttctacggtttttcgagttattctaagcaataaatttgtctaagtaatgtctttagtacttaaaatgatctgtcttgtaggcttcgggtgcatatattttccggcctaatggcgcgcctccaactattgtttcaagatcagtaagcactttcttgaaagtatttcacattgttgtgtttcggattaacaaaaacaactcaagaacttaacagaagaagtgaactaaggaccaaaaacaaacaatcttaaacaatggacaccgagctaggctctcacaactaaaccagaatacaatcatcgaaactctctgtgaaaaaaatagaatgaaaaactcggtgtctaatccgagtagactaggcttatatacatgtatacagttaagttggttaggcttaccactaacagaaataacagaatatatagataatgtttgagatggaatccaagtgtctggttttcacttctgatttgttgttttttcattgcaatttacaggttcagtctaaaggtcattcgtggagctttagttgatgaaattcaccaagagtttaatccatggatttaccaggttattaacatattttacgggttcaagtatcttaggaccatattgcaatttt

SEQ ID NO: 298038 - DNA, 1537 bp, Cannabis indica
attatattttataaatcaaatcactaattattactatatatataatattctaacaggtaaatgatccggtaaaacgtaagaatttcatcaagtcaagcattgactttgctgaaaagtttggatttaagggtattgaacttgcttgggaatatcctagaacagaagctgacatgactaatctagaagatcttttcgaagattggtccagcgaagcatcgggatcagggcttctattaggtttgaaagtttatcgggcaccagaattacctaccactaatgcgaaaaacaatctcaaatatcctctaactgatgacttcatcaaatgtgttgatattttcaacataatactttacaactactttcctatcacttgtgcacatagccaagtcgatagtagtaagacagtctctgtcaattgcaccagcgatgcaattgctctttggagcaaaactaacgttccaaagacaaaattggtgatgggtattccgttgttcggtaaggaatggaaattggcttatccaagtgatgaaaacaaaattgggtcacaagttattgcttacaatggtaacatatcctatggagagattcaaaacccagaaggaggggcttttgatgccaccactaagacaatgtacatgactcaaggtgattcttggtatgggtatgatggtaaacgttccataaaatcaaagattgactatcttaagcaagaaggacttggtgggtatttcttacatgctatcagggatgacgacgatgaccaaacccttgctaaaactggtacatatatctctcttatattaaatgtaactatctaacataaattattagtttaacgatttttttcgttaaaattaaccgttaacgatatttttagttataaaagtattttgtaaaagttatttaataaataatattattttttataaaaaaaaatatatttataattaagtgctatttataaaaattaaatataataatattaaaaatttattaaaattgaattttatttatttgtttatttgctaaacataataatgtttaatttagtgctatttttttatttgtttaatttaattactttatttatgtttatatatttattaaaattgtataattggttttaattatgcagcttcaaaggcagccaaataagcataagtgcgatcgagattgatcatcaaaaatatggcaaactataaaattaagcttttcttaattaatttggtattaatttatgtttgttctgttgaataaagctaagagagggataccttttattagcactaatgttattgtattctactactattttctatcttatgtattgtggaataattaaataaaaatcatgtctttgtgttttatataacttgttaaattcaaatttattaatttgtgatgactatactattgattcagaattgcattcctaattttatacaactgttaatgtgcataatatagagatacgtacattataaattatacattgttttaattatatcaatcaatgatcctctatagatgatctaca

SEQ ID NO: 298039 - DNA, 4958 bp, Cannabis indica
taaatatgtattattctatgaaatcaatacacaattcgaatcactattttctacaattgttattagttctatgatccaaatgattgtgcttttagactgaattaaagtcttaactaaaacattattactcatgaaatccttaagtgctattagcaatgtaattcaataatttgtaactgaaaacaattgggtggtgatttcttcctctcactgtgtatctctgtgttgacagaggtgtatcgcaatcatattcaaatcagcgagacaagactatggccaagttaactaaacttgctgttaaccacagaaggtttgatgggagggccccagattcacctgcaccactttcaaaccaggtttctgcctctacagtgattagagcgataaattgttttgtctttcggaaaatgaaaaactaataggaaaataaacaattataaagtcctcaagtatctctttctctttttttatgtagtggtcaattgggtatagaaaatcatctcaactgatgctaacttactatgaaagaaataatccatataatgtatccaatatttaagttcaaacgcgggttgacttccagtatgtcattgaatggtacgtgaacttaggctgtgtggctttgcttttaatccatttatttttttggtgtcagggagttattactcaactttctgaacaaatctctacgctaaatgagcgaatggatgaatttacatcccgcattgaagaattgaactccaaattttctctgcgaaaagtctcagccagccaacaaaacttggctatgcaggctgaaacctgcaatggctctggacccacttccctttttgtcaccggactaagtaatggttctttgactggatcgcttctgcccaattcttcatcttcttctcaattggctaaggagtccccactgatggaagaggtgatgagtctgattgcttttccaaaattttgtatgataacaataataaatctatttaagctttatgcacgctattgaactcagaagctatgtccccagatcatggtttgcatttagagcatgatttgattttgctagcttaattattttattctcacaaactgatgattattcatatttttcataattgatccaacagatactagccatttcccgctcacaacgtcagatcatgcaccaaatagataatctgagcaatattttgcgtgaatatccaggagatagatttcgccgaggaagaatagaagggacaagcagcagaaccattgatgctaattcattaagcgtgcctcttctactaaccatagcactaggtggtttaggtatcttcttgtttagaaatgtaaatctgccgaaataactttcaagattagcatacacttccagcttaatgtgaatatcaacaataccaacaataatcttagtctgcaagctccaaaataatgtgggacttgggcttgggtgcaaggctgagtcgcgcagggttcaaattttaatgtcacttatcaataataatagtaataataatgataatgataataataataataggagtgataacgttgtccggagctttcctttcagcgaaaaaataaagctgtcctgaactctgtggcatatttatgtttcaagtaaggcatgtttttatattacactttatttaaatagatatttttattagaacttttttcatttttggacaaaattatgacatcatattttaagaaagagatggtctttattttcatatatttttaggatgactgtcaatgtttaagcattggccttaattgcattaccaggatggcttaagtatttttattagaatgtaagcacacagaattatactattattttattgatattgaattacaagaaagaagcctttagtatatacatgcattgaagatgtgcaaaacagaaatcgatgaccaactaattggttaagagggataatctcccgtattctttctcagagattaagagggatcatggacaaagttatatctcctctccaagccgccttcatccatggaaggtggatagtggatgctaccttgcttggtcaagaggtggtgaacacggtgagaaagaacaggagcaaaggtgctctaatggcgatcaaaatagatatgcacaagacgtatgaccgaattgaatagaagttcctgcaaaccattctttgtgctcatggattctttgaataggctattaagagaataatggtatgtctcacgagtacatcctatgcagttcttcttaatgggaaaccactcaagaaatgtcttccctcgcgcaatttacggcaaggtgatcccatctcaccttttttattcctgtgtttcgatgtgctttcacgattactacaaagggctgaagaaaaaggagatatcaaggggatttctattgcctgttgtactactcctatctcacatctcatgttcgctgatgatactatgatatttgcttatgcaagtaagaaggcggttgtttatttgcgtgagtgtatcaagaagtatgagatgtggtccagacagctctgcagtaagaataaatcaagcattttgttctcaaattgctgcccaaatggtaggaaaaagaaattgaggatgagcttcagacaaagataacagaagtggggggtttctacttgggaaatcctatgttgctgtccaaaaatagaagcaacgaattctcctttgtcattgataaattgaagtcaaaactagaaggatggagattgaggaccttgtcttactcaggtagattggtggccatttactcggttgccctggccttgcccgtttattctatgtccactttcttactcacagtaattgtgtgtaggcagatggatgctcttgttaggagattttggtggactggtgggtaggatagatatcattttcttgcttccaaaatttgggagactttatgccaactgaagcaaagaggtgttgtgggattcaaaaaatttaaagataatatcagagctttagtggctaaactggtgtgggaaatggccagcaatgaggagaagatttgggtcaaagtgttctgtgagaagttctgctcttgggaatcgttttgggcggtgagacatagaattggagatcctagtatttggaaaggaattttagaagcaagggatcttatccttgatggaacttgcaccattattgctaatgggagagacattaatatttggtggcagccttggatatcatggatgagctatgtagaataacgttacatcatggagcaagttagaatcaaggccccgcggctagtggctgatctacttgatcattcccagcgtggatggaacataaggtacgtttgttacttgtttggcgatgcgctggggatgaaaattgcatccattgatattgttgtatgttgggaagggacaaggttgtttggaaaagctcctcgaatggttgtttctccgttaatgctgcctattggatagagcaggatcatcggtttggacaggctcatccttgctggaagttaatttggtcgaacaatttgcatccacgattgagcttgctgttatggagggtgtgtagtggagccctccctacccaagataaggtatggagtgagggtgaaaggggctgtctcctgtgcaattgtgctgcagagagtccaaaacatctgttctttgagtgtaactaggccaaatttatctagtttggtgcccctttgtcggttagaacggaggatctacagggatagaatttgattgaaatttttatgtctctttgcatgaatcccagggatgaaagactcaaaagtttttttgtttgattctcagtgatctgtgatactctgtggaattacaaaaatgttatcttgtttggtggaaagcttcgagaagtgcgaagcatagtggaagaagtctcgaaaaagtttcatgagtttgtaagtgttgaactgactggggggatcatctctcctaaatttgtgttattgataccggggcccccttcaattcaaacttcttattcactgatggagccttcaaggatggctggtgtggaatggcagttttgtgagtgagcaggggaagtttaactggggaacaatttgcaatagctcttagggttggaattggagctgaaagccatctctgaattgggcgataggcaaaaattagaagtcagtggttctttttttggattgtctagtggctgttaaggctgaagaagagatgtatgtcgaattggcaattagcctcgtgcttttatgatattttggaaaaaatagatacatttgtgtgttgtaagatctattcgataaagtgtgagtttctggtttgtgtgaatgatcttgctgtccaagctaggatccaaagagttgtagactcttgtgttgttggggaaggattgcctgtcaatcctactttgttgatttgatcttaatgaactattgttctctttcaaaaaaaaaaattaattgattaattaacttacttaaatgactaactgtctgtaatagtcccttttagatggggtataaaaaattttacatctattttggaaattatttattgagatttttggaaactgttataaataataagaattgaagaaacaaataactaaaagagaaaaagtaaaaagagacatagttttttatgtggttggggcgttaactagcctaactttacaagtaagtgttattcaatagttctttagcttgaaaagcctttggaagtacaatgaatatatgttctcaagtttgcctgagcaagttttgcaagagaattcaacctttaatccataggatttgatatgtatatatagtagtttgagaattacatttagtttctatttttcctctattggggtacttacaatgaacaacaaacttgcgctgcttcatgaagtccaacccaagaaggagaggatttgctgactaggcaaatcagatttagttggatttggtcaacaccgtgtacttt

SEQ ID NO: 298040 - DNA, 2581 bp, Cannabis indica
gggctctaaccgttgaccattgtaagatttgtttcccagagcatatacattgactgacattacttgtcaaatgtagatgatttcgtaaatttcattgttagtttgtttgattttgttttttttttgtcttgttgggaaagatgcagatgttaatattgctatatgtttatgtcagttcgtgtccttgtcacttattaacacagtggtaaaattttgcagactattgcaaccgtctctgcctttcttgcgtgcaaaataaaagagacaccgcgctatttaaatgatgttgtggtcgttagttatgagatgatttacaagtgggatccttctgcaccacgaagaataagacagaaagtatgcaagcacacaaattttttcgacaatcagataattttgttttggtttatgtgcttattgccacttttggtcgtgcaggaaattttcaataagcagaaggatttgatcttaattggggagagaattctgttgtcaactattgcttttgattttaacattgagcttccctacgagccacttattaaagctttaaagagattaaatatgtactctgaccttgctaagatggcatggaactttgttaacgattggtaaagtttatattcaccccttaataaccttatttcatgttgagctttgatgtaaacacttctttctaactgttttctccttctattgtcaattggaatttaggcttactacgacactgtgtttacagtacaaagccacctatattgctgctgcttcattgtttcttactgcgaaattactaaaggtgaagctaccaacagaaaaggaaagagtttggtggcaagagtttgatgtttcactgaagctattagaaggtttgttgttagattttgtcgtataccttaatttctttttaactttggttgtaaataagttatgtcgcaataggaacattcttgctagtgaactctcataaaactttgaataagtttccatgtccttaccttgttttgtattggagtttgcactttttcgaacttcttataaggttataactttttcgaaatatttttcagaggtcattcaacagatgcacaaattgttggagcaagacagaaaggaaactcaaccatcctccaataggaacaggaggccatctaaagcttcagttgacaaaccattggaaagtagctctctatcttgtattacaagtgaatccgtaactgactgccattcaagccgtggagggtctaaagaatcctctgttactcattgtggtcctaatctcgcggaaggtgacagtagtgttattacaagtagagctgttgagaaaggtccaagttttgcaacttccaaggtttgtaagatccaaccaacaacagtggacacaattcaaaatgcaaggtctaaggcttgcagtagtactcaaaataaacatggcgagtttgatgttattcggattaaggagatgttgaagaaaaggaaatgcaatggagttccaaagaaaccattagaagccattggtgcagagagagacatcgaagccttgatagaaagcgagctcgaaaatgggatagatcttgaaattccattgacaaagaagaaacagagaaaactataatgaggctctgaatcgaaacgcaagttgtgcaagctgctcattgaacttaaaaccaacttcttctccctgaatgaggttcttacatattggtatagtactgtttgggttagtttagtttctataaggtttctttcttaggattaaaaactcattctaagaattttttgatataaataattttttttccaatttaaaagtccttttagtattctatttattactaatttactgaaaaatatttttgaagaatttttcataaaaaaaaaaagggttctaaagcccaattttttatttatcttatactttaataagctaaagtaggagcttagttgtttatagtaatgtatttttttgatgttttgctcttcattctttacataatagtagtaaggtgtgtagacaataagtagttttctcatttgtaattaaacacatatttttaatcccaaaagaaaaagaaagtaaataatagtcatttggttgaattattatcaatttttttttttatatttatttaatttgacaccgatttatttatttatttaagatggttcgattatactaattccttggattgtatggataatctttcttgttcataaattatgaatgatatgccatatagatgggcacagtaattatttaattttgcagggtggctagtaatggactacttcaagcatgtgttttctttaagaatgtttattctaatctcaaaataaataggaatttatacatacaagtttaaatttagtttccaaaaaattaaattagttctctgtattttttcaagaggaagagtactgagtttttagcagtgacgatccattaaagagaactctgaaaagttttataattcaaaaaataaggttcattatttgtcacacataatgaaaaataattacaagtgtaaacaaaatatttaaattttattttttgttactataaattatttagattttttttttaaaa

SEQ ID NO: 298041 - DNA, 2852 bp, Cannabis indica
aatcacgtaatacgcctatgctagttagggtgttacagttttggagagtttggcagggtttggaggagtttcggttggattggtattgttaaaccaggtttagccgtttcagcagggaaaaacaattaaccgtttttactgtaaaaacgattaactgtttttccagggctgaaacccaaaaaaatggtgaaccgtttaggaaaacaatgaaccatctggggtgtttttcagcgcctaaatttttatgttttatcaatatttaaggtattacaatgctatttatcaatagaaaaactttcagttttgagtttaatacctaaaacagattaattgatttatttaccagtttgccattatcgtgatataggtcccgagatcgtcgagcgttgttccacttaggttggcttgcacacctcaatttaaatctgaggtaagaaaagttaattataccacattgcatgactaattatgatacggtaattatcgttaacacgaaggagttattactctatttttgaaaccactgttaggtttcttgctaatcggtttagtctcattgggcaacgatagtgatattagttgtctcatttggaaatgagagttatgaagtatcgagaataatttgtcttattagaaaaattattgaattattagtattgtgttatactggataatctatctgactatatgcttgaatatatggttgttattgattattgttatactttgtacatgaatttgtgttttttgcttttcttgtagagtttttgtgactcataggtgttttgtggtataggtaaggaaaaagaaaaatagattgacgatgagtcataggttttctaataaatgtacatatcagccccgctatctatcgtgattagttgacaggatcatgttttaaagtattttgaacatgtatgagtattttgtaataaaataatacaatggtactttagtaaaattttataataaggggatccctgaactcattaacttttaaaagaatgtaatttatattttaaaaaataattagtaaagtcttaattaaaccacaattttttaaactgttagtttattattgtaaactaatttataaaagtacatacgtagcacccttataggttagggtgttacaccactggcaggtctcgcttgctttgcccaccccttcctttttacccttgatgtatagacacactttgacgccccttactctcttaggatatgtgtttcctacaagaaaacacattcccttgcaagagatcagaacgaaccttatgaaggtcctactaagttttgctccccctaggtactggtgtagggttatctttcgtgactaggggatcttcagaaggatatttgatgagactagacatttttctcttcgtttgtgattttcttggggttgcagggggctttcttcattttcgccaagtgttggtgggacaacgactggatcaacatggaggcctgcctgagccaaagcttgttgcatggcatttaatgcctcttgcaatctcttatttgtttctttttgctttgccaactcgacatcacattgtgttgcatgtcttctgagagacacgactcgtcttcttcaccgtcttcgtaggtttctccttccaacgaacatttgggaccattggtatcacctccttcaccatttactctggaggctatcctctcctctaagcgtattagatcatcagacaattgtaaaggccgctgactgtttcttgttaccaccattcaaatgcatgtttaatttttttgtgaaagcttcccacatctctcaataaaagcaccaaaatattaaccgatattttttgcaaccactaattatgtaatagtaaatagtaaagatgattaagaaaaataaagaaattttttttacgtgattttagtattaatgaactgtagtccacgagtcacttttatttatagtgagaatgttctcttaattagagaatatttaagttatagtataagagctcacttttgtatgctagtccaaatgtccctttttttattacacttccaagtatttataggaaaaagaagagtcaaatgacgaaaaaggtacatctctcttcggtctataggtgctacttagccgttgtggtaggagttcagtgagacaatatttgttccatgtgcggctgatgtgacagtgtatagtcatcacttttatttgccgaggtgaatgtgtcgtcaaaataatatggcttcgtaaaaatgctactcctacaccgcagtagtcatgtacagtgatttgctttagaatctatgttaggcaaatgatggagttccagaggacctataatccaggaacttaacaccttttggatggctaaaaatttgcttgatcatttatcttgatatgagagacctacttccggacacacctttactcgaggagtccaaatatggtgtaattccacaaaaaaaatataatttctcaatgaatggaccccctctgccaggtggagtcctgtatgcttgtcacatattttgataaaaagtaaaattaacgtatacaataaaacttatcataatatccaataacttgttaataataattaaaatcagaagttaattacatcatacttactattgctcacttgtaccctaattctcataagtattagaaatttttacatgaaaaatcacttttacacaatttattaccaaaatactcctacacgcctataccaacttttttacttacaatgttggttttattacacaaataccacttagtcatcattccatccatcatcaatcaaatcctactctcttccctctcttttttcattttctattaatcaattcatcatttcactctctttttt

SEQ ID NO: 298042 - DNA, 5420 bp, Cannabis indica
aaatggggggtcattggaagggacgtttccatgttaccatttctgattatggagatgatatttttaaggtaacttttcaatgtgcaggggataaaattagagttcttaataaggagccttggcacttccaaaatcacttgatagtaatgtacactccatctgttctgcaaaatgtctctaagaaggacttcatttttgtgccattttgggtccaagtttatcgcttgcctttcttaagcaagtccaagccgttggctactgctttgggaaatctgattggtgattttaaagatgttcatgaagactctcttgatgagggttggggcccttttttgcgcattcgggtcaaccttaatgtaactaaacctctgccccgtggacgaatgattagtctgcccaaagttcaggatgaattttggattgattttcgatatgagcgtctcccggagttctgtttcgagtgtggtatgcttggtcatccttttgaaaaatgcattgcctttatggagagaatggattcgggtaatgatgatgacttcccctttggcccatggatgaaaggagccaaacttccaacaacgggatatgataagtatcgtactgacttcgccaaaggaaatgcttggccgttgttgacacgtttagcaagatcatctctcacttcgactattcctcgtctgaacacacttcccaagccacagccccatgttttattgcaaggtgaatcttcaacacccctcccgactggccataatctttcagatatgcacaattcggatgttgtgcatcacactataccggttgtaacaccaaaccagcagacttcccactttccttccacttccacatcacctacaccctctgctactatggttactcacaccagcaacactaccatctcccccactaccattagctttcccaacatcttcgtacccgacattggaaatgcttcccggccacctatgccgtatgccacctaccctcccaacacaactatgcacaatctacatagctctccacaatccttaaccttatcatcaaacactgctactgccttccctactatttccaccaccaaacctgtccccttcccaactacaccagcaactacactcaaaaaccagcagaaattaaaagggaaagaaaatgatcctccagctctctccccaaagcgacaaaatgattccccctccatgagacaatttttaaagagatgtcgcaatcaaagccccatgccttttacctctgttctgtcacacggtgaaggttcttgtcagaatgtttccatggacttaatggattcagatggctctgttgacagcgacgcggagattgctttgcaatcccgcggctcattatgaaaatcttgagttggaatgcacggggattggggaacccgagtgcgtttaggcaattacggctgcttgttgaacaacagtcccccaacattgttttcctcatggaaacaaagctatgtattaattcaattactcaagttagacaatctttaaaatttaataatggaatggaggtacctagagttggatatagtggaggtttaatgcttctttggaaggatactgtggacttgaacttacaaaattatggtcgtggtttctttgattgttttgttactcttcatggtggtcatgtttttcatttcacagctttctatggggaaccagccactcaaaatagagacatgtcttggttattgttgaagcgtttggcagatgtagcacctttgcttccatggttggtcattggcgacttcaatgaaatcttgtcttccggtgacaaagaaggtggttcaattcgtagtgatgcccaaattagctccttccaaactgctcttgatcactgtcaactccgaatactgccgtatgttggtgaaaagtttacatgggtgaagaatcgcaagtcacttgcaaccattaaagaaaggctggactggtgttttatcaatcataagtgggatcaatcttttcaatcaccacagctaactcatcttgactttcatctttcggatcatcgtgccattacagcagaatttatgccactcaactctgtctctaatgttgacaaaagaagaagtcgctttcggtttgaaaggttatggttatcggatcctgagagcaaaggtattatctcagctagctggtctcattttgatatagctgacccgattgcagctgttcttggcaaaattgactcctgtgctaagaatttgcaatcacggcacatctctaagtatggtaggatgaagaaaaggattgctgaagcccaacaaaaagtctcacattttaataatgtacaacatcacagcagtgccacactcacatctttgcaacaatctgaggctattttagatgatcttcttgagcaggaagaagtttattggcaacaacgatctcgggtggattggatgcaatcgggggataaaaacaccacgttttttcatgcgaaagctaatgccagacgggctaataacaaaattgtttctctcaaatctgatgcgggagtcacagtaacatctaaacaaggcattgctgatgttatttgtcaatattatgctgaaattttcacagcagaccctaccaatgatgatgctattgctgccctcatagatgctattccaacaactatcactacggaaatgaatgatgatcttactaagcctttcacagccaatgaagttgaacttgctctaaagtctatggctccggacaagagtcctggacttgatggaatgtcagccatgttttatcagcaaaattgggatatagttggtccacaagttatagctgctgtcctttgtgttctcaatgaaggtgttgatccaactccgctaaactcaactttaattacacttataccgaaagttaagaagcctcagttggtcaaagactttcgtccaattagtctttgcaatgtcatttccaagctcatcacgaaggttttggttggtcggttcaagcatgttctaccatatgtcatctcagaaactcagagcgcttttcttccaaatcgattaatcacggataacatactagtggcctttgaactcattcatggaatcaagcataaaacttctggtcgtaaaggagtggcggctctcaagcttgatatgagtaaggctttcgaccgtgttgaatggaaatttgtgaaattaacaatggaaaagatgggttttcattccaagtggatatctttgatcatggcctgtcttacaacgaatcacttcacttttcttgtcaatggagaagttacaggctccctcactccaactagaggtcttcgccaaggctgccctttatcgccatatttgtttctcatttgttctgaaggtctatctagactgcttcagtatgaggaaaatcttggaaatcttcatggctactccttgactcgacactctgcacccatctctcatctgttctttgccgatgacagcctcctattttgtaatgctactgagagttcatgcttggctattaaacgttgtttggacatttaccatagggcatcgggacagcttctaaatccagacaagtcggtaatgtctttctctcccaataccactttagctagccaaatattcttgaatgagaaatattttcagccgggggtaaagaagtcttgctaaaagcggtggttcaatcgattccaactttcgccatgagttgtttccaacttccagttgctacatgcaatcaacttgaatcaatgatggctaatttttggtgggggaaaactgaaacgggcaataaaatccattggaaaaattggaagctgctgtgcaaaaccaaatcgcatggaggtatgggatttcgttcttttgttcacttcaatcaagcacttcttgcaaagcaagcctggcgaatactcaatcacccaacatcattgctgtccaaaattctcaaaggcagatacttccctcggacatcttttttggacgcctcccatggccattcaccatcgttaacatggcagggaattctacatggccgagagcttatcagagctggtctacgttggaaagttggtgatggcaggcacattaactgtggttcggatccctggatcccaggatgttataatttcaaaccaacacattataatggacctccagcagctatagttgctgattttatttcagagaaccgtgaatggaatgtacctcttttggaaagctgtttttcaatggttgatgtggaaaaaattcttaccattcctattagctatttccagagtactgatactttgatttggcatcacaccacctctggaatttatagtgtccagtcgggttatcaccttgccactgaacttgaagaatgtatacaacctgctgctacctcctccgcacctgcccaatggaattttttctggtctttgaatcttcctcaaaaaattaagatcttcgtttggcgggttctccaagatgcgctgcctgtagctacttctcttgtccgcaggaaagtaataacagatgctacttgctctctttgtcatcaagcttgggaatcgattggtcatgcattctttggttgtaagtatgcccgttcggtatggcgttctgcatcctacaatcttgattggacttccacttctacaatgatcaagggtgattatctcctacatctatccaacatcttcaccaaaccagaaatggaacatataatttgtgttttgtggtgtatttggactgagcgaaaccgtgtggttcatggtaacaaggccaaaccagcaagatctgttgctttatttgctgctaattacctgctgcaatttcgcacagcccagcagaaattcaggccttcatcgacaacatccacttcacatcaggagtcctcggctgcagcaagtaattcccaacacaacctggttgctcctctttctataccatggcgacctccacctcactcatccctcaagctcaacgtagatgcagctgtcgacacacagcgacatatcattggtgttggtgcggttgtgcgagactccacaggttctgttgttgctgctatgtcaaagcctcttgttggcagctttgcttcccatgaaatggaagccaaggctctcttccacagcataaattggattctacaattggaagtaccaattactcacattgaaacagatgctctcatggtttccaatgctctaactgtttcttgtaatgcaatttcttcttttaaggatttaattgtagacatttcttgccttctttcctctctccctaatgtatctatttgtcatgttaagcgtcatgctaatatggctgcccacgggttagctagatatgctttagggttggaagaagcttgcttttggatgggtattatccctcctccgatttacgatgttattgtaaacgatatcactttggttttatataacatagtatttcttct

SEQ ID NO: 298043 - DNA, 1853 bp, Cannabis indica
tctctctctctctctctctctctctctctctctctctctcttctttttttcacaaagaaaaagacaaaaatctacttgaaatgctctgtatttatttgatcatatgtagtttgtagctctttgttctaatctcgtagatgacatctttacacatacagaaatgtattggcttatttagtgcaagttataaagcagatgctcattatattatttagctgggaactgcagtagggtaaaaatgggttgttcttttctgtgatttgaatggtttttttctcctcttttccagctcgtcaatgacttggaagcattaaccatttttgtatatctctttcttgttttagtggcacacattttttttactagaaagtggcacacatttagttactgcattttaacaattatagtgatttgcaacttattacgtaattgagggaccaaaagaaaaaaatcgattttttggtagttatgtgctaatcaatgtaaaagttgagtctggatttggaggggttggggttgttgtatctgctgctaataacccctttgcctatagtacttgctaggctaccatttgctgaactttgctttatgtttttattttctgatgtgaaaggaaatgatactacatcaaggttgaagcagttgggaatggaattcactgtctgggtatttaaacatgtaagttttttttttttcgtggattctcttttctacacccaaaaactttttctctattttttttaatatttatctttttgtctacttttaatttcttgtgttgtgcagtcacaaatgaaccagctgaagcttatgggtccagtgatactgaatgcaattttaaagtcacttgacagttattcaaatacggagtcaggtttgtcctatgcattgaagtttattggattaatattgccatcatcatttttatttatttattttcccaaaagaagataaaagaaaagtgacatttctattgtaaatattcaattggtcattttttttaagaagaaaaagaattatggcatttgtggtttttaatcatatgacaatcatgttgatttatagtataacattgttttactgtactaaattcaatcagatgctgctgctaaggataccaaaacttttgcttaccaagctattaacatgcttgcacagcgcatgcctcaactttttaggtacattcttctacttctttcttctagtactaagtatcatccgtacaagttatttctttctccaagtcaacatatttgtttcatatacccaagaggggttagctcaaatggttagacatgtagtttgctctcacaaggtctgaggtttgagtccctcctgggtacatacatagtaattgctataatttcctagtccccaagtattgtatggttaggtggatcctagttaaaaaaaaaaattcgtttaatatcccccttttgtttcctttaaatgttaatccaaacttttaaagatgagattttaaaggtgaaactctctctttccagagataaggttgacatggcggtgcgactttttggtgcattgaaactggaggcacagtctcttcgcttcattattcaagaggcaactatatcactttctagtgcgtataaggtatgttagtgtttacaccttccttgaaactatgatttaaaactttttgttatatatatgtacacacaaatctatttttcttattgaaatagtatgtcagtacttgtattactaataataaaaataatacaatttttttgaaagagagaaaaaggtcattgtcacccgtccctcctgatatatatatatatatatatatatatgttgctgaaaattattaattactacgcaagtgcacg

SEQ ID NO: 298044 - DNA, 2644 bp, Cannabis indica
aaagaacttgcgtactctgcttctagtatttttcgtcttgtgttatctcaaatgaagaggatggttgtatttatagatcaatgatatgaattccaaaggtgatggcttcaaacaactaagtagttaattcgtttaagacttaaccaacttaactcgctccttacaatgagaactctaactcagctcttggcattgagctctctccagacatgtatcacgcttccaacggatgtcccaaactgatgaagcgcaatctggaagaacatcccaggtaggcacaaagcctactggaacagactatccgaaaccccttattggaggaactagctatagcctttcggaactcctttccagacaacgaccagctttctaaaagattttttttggatggacaagccaccctttcaaaactccttttcagtcgaggactaactttcttaaagactcgtcttgagaccttttcatttagaggaactataccacaaattccacctagttcctttaaattaaaagtcatggtaatgaagaaagtatgcaaccatcatggttggtgttccaggtatctcagtgtgctaatttctgacattgattaagttcaggcagtgtcagaacttgttaattgttaggaactttgttccaacttcaaacggattatcttataatcaaacattctctaatccaactagaccttcttctatattttctctgatctaatagagcccttatgtctatatgcttgctcttttcatgataaattaggttcttgcaaagatagataaatgattggctatctgagtacacaattactcctccttttatctatttcaatttatgcaagatccctcgaagccataatgcttccttgaacgtttccatggtagccataaactctacttcttttgcggaaagggcaactacatattgtaactaagctttccaacaaatacaattaaggcttgtcatgaacatgtaggctatggttgatcttttggtatctttgtttgacatataattggcatccacgaaccctttcaattccagttctctttttcctttctcataggtcagactataatctcatgtgtccttcaaataccttaataaccatttgaggaccttcccatgttcaatgcatggattggatatgaaccaacttaggatgctcaaagcatgagcaatgtccggtatggtgctcaccattacatacattaagcaccctaacaccactacaaaagttacatctttcatttcctttaactctttagaactggtcggacactgttcttttaataggacaaaatagaacacatctttcattttctccaactctttagcactggtcagacactgttcttttgacaggaagaaatagggtacatctattatttcctccaactctttagcactggtcggacactgttctttcgacgaactgttcacccaatggtatggatgtactctttgcatcttccatgttgatgtatccagattgcttcaagctcattgttttatttttgaaggaattggttgtgtccgcatctttttccaccaagcttgtgtaaatgtggtgttcgaggttgtagggctgaggttgtatagtaagctatgggctttgtggtaaccagagttggcagtgtaagttccatgagttgtaaagggccaatagtaggtgttaggagtggggatagtggttaagggtatggttagaatagctcaacagacgtcaacgggaaataaggtgtgaatgcgagggatgtcccatgttttggctggagtgataagatctgctactacccgacttccatctgaaaggtgtctaagataatttagtttgtcatgtcctgggatctaggcatcatgataaatagaaatggttgtaccatcacctacagattttcgaatacctgacatgagaagttccttttctcaagaaatacaaacaagagagggcttacgacccttaccaaattcaaggaaggaggtgtggggaaaatagcaggatttagtaatgttgtaactaaggagtgtggagcctgaagaatttgccaagcttgtttggctaacattgcctggttggaagctttcattgaacgaaagctaagaccgccatgaaactttgagaagctaagggaggaccatgttttccaatggattttacgattgtgttcggtcctccccaccaaaagcgagccattagggactcgatttttgtatgaaagaaaaaaggaagcttgaagcaagccatggcgtaaaagggtatggcttggaccaccgacttcaacaaaacttatttgcctcctttggagaagtacttagaattctatttgttgaaatgagaccaaacacgatcctgaatgtagttgaaggcttcttttttagatcgcccaaacatttggggaaaccccaggtacttctcgattgagtcctttataggaataccgagtagggaagtgatgtggttcatgatttcctcgctcgtattagggaagaagtaaagtgacgacttcccgtaattgaccagaagcgaggctatagtcatgcaggatttccttgatggtaggtgccactaggggtgttcgcggtgcgggtggtgcggtttttaaccattttttcaaatcaacccgcacatgcggtttttccaatt

SEQ ID NO: 298045 - DNA, 3921 bp, Cannabis indica
acagacacaacaatagctcccgcagcacaaactccacttcttgcaacatccactttagctcttcaacatcttctacaacaatacctattgcatccaccagtgttattccaaacatgacagtcccccacccactgtcaatgatcactcaatgacaaccagatctaaatatggagtttaaaagcctaaatcttatcatgccaccaaaacatcctcttaaagagtgcattctacccaaggctcccacaactctcaagcaagctcttactaatccaaggtggttcaactctataaaggaagaaccttgctttaaagaagaatggtacttggacattagtgccttatgatcctcacatgcgtttagtgggcaaaaaatgggtgcatagagtcaaactcaactttgatggcacaatagacaaatttaaatatagacttattgctaaagaataccactaaaatctaggtattgacttcacatacatctttagtccagttgtaaaaccagccactgttagagatctactcaccctagttgtttctaacaattggaaaatcaatcaactagatgtttccaattcattcttaaatggattgttacaagagacagtgtttttgccccaaccacctggctttgtggatgataccaagccaactcatgtctgcaagctacacaaagctttgtacggtcttaagcaagctcccagagcttggaatggtaagttgaagcaaaccctattcaccaaagggtttaaagcctctcggtcagacacatctctcttcataaaaggttttggacagaccttgattgggttactagtttatgtagatgacataatagtaacaggtcccaatgaagatgatatctccaaccttattggtgaactgaatcaggtgttctctatcaaaaattttggctccttacactatttccttggggtggaaaatgcaagtgaatacatgaatatacttgtgtcaaacaaagtatatttctaatatgttattaaagttggatctggaaggagtaaaacctagtctaagtcctacaagctcaacacaagctgtctcttacctgtggagaaccctttacagatcaatctctctacacaagcacgttaggagccttacaatatctcactttaacctagccagatgtggaattcatagtcaacaaactgagtcaattcatacatgccccaactaccatacattgggaagcctgcaaaagactatttaggtatctcaaaggtaccataaatgaagggcctcatgtcagaccaacaacaagactctatttacatgcttacttagacgatgattgggcaagttgccccaatgacagacgctcaacaagggggcacacagtctactttggaggaaatatgatatcttggtctgtcaaaaagcaacaagtggttgcaagatcaagtactaaaagcgagttttctgtgcttgccaacacagctgcagaagtgaattggttgtgttatgttctttcttaactaaatttcactctaatctctcctccaattatttgggatgacaaccaaggagctgcttcattagttgtgaattcaatatttcatgcatgctccaagcacatggagatcgatttacatttcattcgtgattaaatcttgaccaaacaagttgaagtgagatatgttctagctcatgatcaaatagttgatattcttacaaagtcggtgtctaccgatctttttgactatcgcaagcacaagcttcaagtgtgtacaatactctttcacttgaggagggatgatagagaaattaatcttattacttagtgtcttgagttagttttttagtttaatataattacttgttcttacaagttgtaaattatgttacagtgatattatgtatagcttcatctcttgtaaatcctctatataaataaaactccacacaaagactcaatagcatttacaagtctttgaattgcattctcataaattgaattctggtgagactatattggtaagcaccttcaaccaataatggtatgttattattattattatttgtgttgcttggcacctcaaaataggcattggaatttttctattagttataaatcaaaataatatatatatatcaaacttagtgatcgattattcattctcatatctaatcctcccccataatccatctcccatatttaacccaacaacgaaatcaacaattgagtttttctgtgagcttcagaccagccactctccattggagatcataagatttgtcgctcactaaagatcgcaagacaactgtcgcccatgttggccaacatcatctgcgaccacgacctcaatctcggcacccatcacccatcttcgacctccatctcgtcaccgatcccccaaacattgtagccatccatacattttagttttaagaaattagggttttataagtttaggaaattaggtggtgtttggttaggaggaataaaaacgtaggaatgggaatggaaatgaggataggaatggaatagaataaaatttaaaatgcatacaaaaaattgataaaaaaatcattaaattttttctcatgttacattggaatggtctttccttccatttcaaaacggaatagtcattccaccaaaatggtggaaagggcattccattaaaatgtcattccaatactttaaaatgcaactaaacaaaggaatggaatgaaaattgtttcctttccattccattacatttcattacctccaaccaaacgccaccttagggtgtggttgtgggccggtgtggtttggggagtttgatggtgagtgtgatgaaggtcaaatcatggatggtgggtgagattagggagggtgatttttgggtttaatttgtaatttggtaatgattttgggttttatttgttatcatatttttatttaaattgtttgagaaataaaatatttattaattttaaattcaacatatattaattttataatttaaaatatcaatttaactgttttagacccatgacagagtgacacatgttattatggtcaacactagttagccagtaatagagattgaagatatatacttacgcggtagagtgaaagtagtttacaagaatgtcatagtctgcgatgttgtttacttgtactgatgggaatgtggatgtagaaccgagcacagtctttcccgtaaacataattagtcctttgcttgttattaaaggcacaacgtctaaacgtgaagggtctccaccatcaacacaaactacaatacttccagagattttctttatgtccaaagatccactataacactttctgcacatttagtatataatttattatttaataataaattcttttacaaatacaacgttactctatgtgcgtaaaatatgatattattacataaataatatatatattttaattcgtaaataatgttattttactttatttcatgctttttctttaataatgttttttatttcattttaaaatatgttaaatgtgtattatgacatatatatatatgtataatatgtttattaatgttatcatccataacatgtcaattgatctaattaattagttacatgtttttaaccatttcttgatgttttgatggtgtgatgacacttactctgcaattgacacaactgaagaattaatagcagcttcttttccaattacaaatggatatatagctgaccgtgaaagatttgaataattaatgccaagtgcctaataaaaggaaagaaaacaaaaatattacattccatacttttaacaaaccaaataaaaaagcttattacctcaataatattctagatttttgatttggcaaattaaatcaatatacatttaatttgcaataataaccatatgcgtaacaattttaaaataatattcatcgtatatatatttatactagcaaa

SEQ ID NO: 298046 - DNA, 2601 bp, Cannabis indica
ttgtaaagcgttttatttagggcataaaacccaacaccaacagagaatatataccactttacaagtcgtattcaaactccaataattatgttttgaatcataaattgcctaagtgttgagtggtttgtcctttgcaattacataattttctttgttgtatttgttgaaagaaaagaaaagttaaaggaagaagaagaaaagaaaaatagtgaatgttatttgagtgttagtttagtattttattttaaagattatcaaagataattaaaaaggagaagaagagaaaatcatgagaaatgcttggaattaatattgtaataaattattgtttttcttatttggaaatttaaaattgttaacgcagttcgttaattaaataataaattttttctgtaataaataagcttcagaattcattatataataataataataagtgtcaataaatgataagagagtttttttttatgtggttttaaagttaaatctttgtagtctacgagtctatcttatttaggattataagattgtatacagaatacaataataccatttttcatgaatgaacaataaatacaatattgtctaaaatctcaagattgattgtcctttattttttgggttctgtccctatttataggagtctagggtgatagttattcccttaggatagaatcattcgtaattgattatgaaatgtaaacattctccacgttttatttttgtgcatatggaataattatatataaccttatttttatttgcagacaattatgctatctatgcttcgttgttctctcgccattcaagtaatacttttcttaaatattttcgtggaaaaacatccaagtgtatatttatagtgcattggctatccacaaggtatgaaggcttatacgcttatggatattgagacgaaacaaattatgtctctagggatgctgtcttctatgaacagatcttccctttattttccccaacatctccatctgaattaacaacttgttttctcacactgtgcttcccactgttaggcctgtgaagcagactcacaggccaataacgaacaatctcatgctcacaccaccatcaaaactagttaaaattggtccccatcttagccagcaaaagtcctcaatctactaaacctgaccaaattaaatcaacaccagtttccactgatgctacccctacataggcccctatacctgcatctaaatcccgagttcagcaacttcctgctgcaccaattaccactggccgcactagtaaaaaactagcctttctacaagattatgtgtgtcatgcagcctctactactcatccaattgaaccttttttttttttatcttacattaaattacatccctaatttcctattgctgtcctaacaacatactctcacattgaacctaaaaactatgctgaagcatctctacttcaacattggctccatgtcatggacaatgaaactcaagctttagaaaaaaataagacttgggtcatcactaaactctcctctgccacaaagctattggctgcaaatgggtttacaaagtaaaatacaaccaacatggggatattgacatgtttaaagctcgccttgtagtcaaaagtttcaaccaaagacaaggcatagacttctctcagacctatgcaccagccaagttcaatacactcaaaattttcttggcaatagtagcaatttacatgattggcatatccaccaattagacattaacaacaatgccttcctccatggggacccccatgaagaggtttacatgaaaataccccctggatacaaggcccctcccaactctattttcaagttgaacaacagcatatatggcatgaaacaggtctccagacaatggtactcaaaactcagtaccactctcattcaagatggcttccaccaatccaaatctgacaattcattcttcatcaaatgaacaaactctaatttttcagccatccttatttacgtggatgatatcatcgttgccgacaacaatgtctctaatatcacaaaatttaacaattctcttgactaaaagttcaaactcaaaaaccttggaaaacttcattttttttttcttagccttgaaatcagttgtactaaagaaggcatatccatctctcaatgaccatttactattcagatacttatggacacatgctacataggtgccaaaccatcttccacacctatggaaacaaatttaaactcattaaagacaaaggtactaaaatcactgacccgaatgcctatcgtagcctcattggcaaactaatttacctaaccattacaaggcccgatattacatgtacagtcaatcatctcagtcaattcctatgtaacgtccccgcttcaagcctccattaggtccttacacccacggaaggaatggctctatacacgagtacgtcactctggttgctttaaggactgatgactgaccctacagaccaacacgagtgtttccagcatgctttgtcctcactcgcacgcttcttgggaaaacttcccaggaggtcacccatcctgaaattactcccaagtcaagctcgcttaactgtggagttctttcgtgatgg

SEQ ID NO: 298047 - DNA, 1033 bp, Cannabis indica
atgttttgattttaatgtttatatatatggatattcttgggttatggtacagtaagaattagatatacgaattcttcagctatgtaccagatttagtaccataaaactaaaaattagtatcaagagcagttctatgaatgtatatacattaaatattttgtgggttttatatatttatatatatgtgatttgtatgtgaatggatagttatattattgtgaatgtatgagaggtgattaattatatgataaaaatatgtgtaagttttgttgttatttttttaagaaaataatataagtcgttatggggcataaattttttttaatgtaattttaattttatattatatacccatgtaatgtacattacatgtgagctcggattttaattttgaaacatgaccctgcacgtttgaaatcacatgtatgtgagctcgatttcgtggaggaaccccgaccatataagaccacctgagtggtcttaggttttgtgcccctccactccttcaacgctggccagccatggaagccgattgcatcgagggactatggcccctacgatcagcatcgatcttcgccagcatggtggtctgaccactagtagactaccaaaggaccttcggggtcctcgttttgtggcctggacatagcatgcatgtcatgcatgggacttcagtcgtccatcctccatgcacatgagacccgattaggtagtgggtctctcgaccctgctactgtggcaacgtcattctcgtggcctccattgccaccgtgagccaaagtgactattacagccgccacccaccgtgactccatggtggtggttggtcctctcctattttgaccctacctgatatgtatatatatagttatatatgtgtgtatatatataatatatatattatattattatatatagaatataatataatacatatacagtgtatatacactatgaaaaactataaattatcatattatttgttaaccgaattaaataacctttttgcaataaatatactacaaaaataaat

SEQ ID NO: 298048 - DNA, 1497 bp, Cannabis indica
attacgaaaaaaactgtttaaaaaaatattgaaagtgatttttttttttttttttgtttttaaaattttgatttctaattataaaattgaaaagtaaaaacagttttatagaacatgtttttgaaaaatattttcacttttccacttttaaaaacagaaaactgattaaaaaagtgttaccaaacgccacctatgataatcaaacgatgttcaataatagtattgtaataaaatttgattaatactttagtgatgcatatataagtaatcattcatgtgtcgagtttttttttacagtctttgttatttttttttttttttttgttttcaattgcttataaatttagaatctgttgatcagtttggattgtctaaaaatatacaattttaattattcaagtctcaagctatattatggcctcaaacagacaaatcttgaaatttgttattctatatctcaagtttaacgttttactcattctaaacatgtggatcttgaaacagaaaaaagatcaccatgaaagtcaaaattacatgagtgaatatcatgtgtcatcaaattagtttaatcaaactttatcctaaatattttttaccattgtttttgctaaaaaaaaataatttttatggtgtcatcgttaagctttgttttacgccactattgcaaaaagtatcgttaagcatcaataagctcaaaattctacaaacttttagatctgaaaaagaaagggaaaatgtgcaaaaataaattatgtatagctatgtttgaaacttttaaactagtgttttaagttaatattcttgatggttaagttttagatttaattttgaatcactagaacaataaaagaaaaaaatggtgcttcaatattagtgatgggaggtggcgagattaatattaatggcaatagcagcattaatgtcgtgttatgcagttgtggggagatatagacagagaacaacacgtgaaaaggtaattactttattattgtaaaagcaattataccaagacttaaatactttatcttgatcacaattcacaccaagcactcactctttttatttactagatgctcaaacttaaaggttatttgcacactatttgatgggacactcttttagaattttgttgggacttagttgaacacactaagacatacttcacttttacactcaagttatcactcaactcactatgcaccaccaaaggaccaactcctatattatgctactcaaaggataatgcattattatactagaatattctagcaaattttcattttactatagcttaaaactttcttaaaatttcttttgactattaactctctatgattttaaatgattctataatattaccaaaataataaaaaattctaaatacttgtagaggaggtattgatcttttaaccctccccctcaacactgactcatcatactgagttgttctctgagtttttgaaatcttgtagttttgagtcctttagtgaatatgtc

SEQ ID NO: 298049 - DNA, 4039 bp, Cannabis indica
ttggatcgtgcggattggattggatcggatacttgtgaacacccctactgcttataaacaaaataaagttttaagttgtttagtaaacttaatattttattaagtttttaataattttattaattttttagaattaataaaatatcataatttttaaaattaatttttttaataaaaaagggcaatttttttttattaatctaacaaaagagctattatatgttaaggaaaatttttaataaaaattgaggataaatatgttaattattaaaaaaaaataataatatatttttaaagattcgagttgcttacgtgtgcctggtggagagtttatacgctccccttttcctttgatcagatcccaatcgttctgttctccttcgaatcatctctttcctaacccccattttactttgctttctccatcgccacctatccacacggtaaaccaattatcttttcctttcttttttcactttgatttctttctgacattattttctcgggatgaatgtatttcttcttatcctagaagattattgattaattttagagattgttttggttgaaatcagaatgtttatcttttatggttactccatacttcgttcaatttgtttttttaattccctttctttgaatattattgttatttgtgtatgtttttcgaattgggaagttagaaaagcttacctttgttgttggacttgtaatagtgctttgatttttgaaatttacactttgttttgtcagtttctcttgaatttgaatgatgtttttgtgttttaagtttacaaattttaacatgtaatattttgtgtacagaaaataaaggagaatggctggtggcggaaaggtgtcctttaaagtcactcttacttctgatcctaagctcccctttaaagtgttagtaatttcattcttatgttcctcttttctttgaatgatttttccttgttttgggtttcaactgttttgctttttcaggtttagcgttccagaagcagcccctttcactgccgttcttaaatttgccgctgaagaattcaaagtgcctccccagaccagtgctatcatcaccaatggtaaattatattctttccttggtcttctttatcattttatatatatttacatttgtatacttatgaatctaggttctgctgaagaacttatttctctgttgcaacaagtgaataatttctttatcctaattgggtattcttaatgaattcaggtctaatcaatctaattgttatacaatttgggtacacaattagattgtattttggccaacacttttccaactttctatttaattatgtttcctagtgctcagtatatgtttttatatgaaaggctgcagttgatcatattgaaagaccatgtttagggatcctatattcgtatccatgtcttttttatttttaattttatctggttaaaaagggagttttacaaaaacggaaaagacaataaatagctggcttaaaccatgttttatgcagttagtctattttgatggcttccaggtgtgtgagccttggtttaattagtacagagatgtttgtataggctaagataggagtataatgtggtagaaataattgtttaagggatggagttctgctcagtccaagacctatagttacttggtctaatagacaaaaaaatgtattcatatttaaaaaatttattactagcagttaaacctatgctgatataatatgtgttttcctcatgccttcacaccactcaagaaattttaagaaagaaaatatagtcctgaaacaccacttgtgtctatctcaagtggttgggtgttatgtggcgttttagaagtactccagctgggttaatctatcaaattgctaaccacaaactgtaaagaagaagaaaggctaggcaataaggattttggtctgcctaggctctattggaaccaattgcatatttagttacaacctgcacataagcatatatatatatgaaacatgtagcttcccataaaagttgctgcataaaatgcaataatattaaacattcatctcagtgctttgtactattttactaggcagaaatactgttctgtatcttatcttattaagttgctgcttctcaaatgattacttataatgtatgcagatggagttggaatcaatcctcagcaaagtgcaggtattacattgcttagtgtttcgttattactcatacagccgatttataactcataatagtatttgcctgcattaagcatccacactttcctttccctgcatttgtcggttatgttttgcgcgtaaacagttgcattatgagaactttgattgaattctcagggaacgtctttcttaaacatggttctgaactgcgcctgattcctcgtgatagagttggagcttcggggacattttaaggctgtgcatttatcagagtgaacacgagtgctctactttctctatttaattttagtcaaatcttttaaatagttttacatggtatgaagtttggagcattttcaacctagtttaatatatgttaaaagctctatgaatattgaaatgttgatggaagaaattattaataaaaagttagataataataataactatcattataaatagttacttcattgttcataatttgatagcttgagttaggtagcaaaatgtgtgccttttttatgagcacgtgcccatacattacattaattaaggaagaaaatagaagatgaaggagatacacttttgtttgagtttgttatgaaatgaatgtaagaagaccaaaattatgtgttctttgatgattagagtccttatttatgtaaatgggacgaacattagttaaaactagaatggtaaatctgctgtcaatttctcttctatataattaaataagataaaaagaaaaaatcttaccaatatattcctaaaaatccatgggaaattttctcataaattcataatgtgtggaaaaagtctatttttaatgaaggagccctatgcgttctagtaaagatataattatttcatgatgtttatcttttccaaactaagccaatactgtaattttttaagaatctaaagaaaataaaattaatctacttaagaatggattggtttgatttgaaactgcatttaaacccgtattgtccatgaagtttagatcaatacaattttattgtcattagatttcaagcttcaagttgtaggcgccctcacaaaatttcaaggccaatattgggcaactttgaagggaatttttcgcttaattattataaattatatgttggagtgcttataaattagttgtgcatgcttttagtataaattgtaaattcgcttgggtgaatatttttttatcatttatattgatgtattaaactcatatggttattattgaagagtttatatattttttattttttaaaatatatatttaaatttttaagtgtacctaacaactatatatacattaatttacgagtgttgtggagtgagctgtactctctagggtttttttctatcttctctagtgtcaaacatcagtaagtgtgtgtgtggagggctgtgaaagagagtgttgctctgtgaagtaacttccctcagtgtgaggttgttgtactgatgcaagtcaccattgtgggttgtaaaagatttatatctcattttgtgtattgatgattgtgaagaccaataaagaaattcttttaccattcaatctgttgagatgagagtttaaatctttaatcttgtttaatttcaggtttaccaaatctttctttctgctgcatattatgaattcttgaactctcttaaagtcttgttatcttgttgagggtgatttttatgtaacttctgtagagatcatagagtgagaaaattgttggtttgagcaagacagcatagggtagcttattgaaggctaggtgtttgtgtagaattttaatgcattgggattatggtgtattacttaaataattagtgccgttttttttttgaaagaaaaatagatgtaggcttttgttgggttttatgcc

SEQ ID NO: 298050 - DNA, 5485 bp, Cannabis indica
ttatttttttaacatcccttaaacatttacttgagagagagaaaaagcatctatgggtaaaatatagaataacaagatgaattctcttacagaaagcatgaagatttccatctttaaataataagaataaaaactttttcaaaagaaatttaaatttgacatgacattatttttacccactcagaaaatatagtactagttcctccttctgataacaaccgacagataaatccaaaactttcccagatttgtttataataatgacatatttctttttcgacaccttacaaaatttattattttttggtcaaaataattttttgtgattaaaaataaaaaaattatgactaattataaattattatttttatgttgtgactaaaagatccgtggttaaaagtattaattactaaaattataatttgttgtgactaaagtatttttacacaatacttgttgtgactaaaactaaattaagaacaactttatctaatactatattttaattacaagtaaatttttattgtgactaaaaattatatttagttacaaaaaatttatattatactaaaaaattatcactaaaagtagcaattttttactgtgacagtttttcttttcaaaaatactaataaatattatttatatcaactacaagacaatgttttagtcaaaaaaaaaaaaaaactaaaactaacaaaacgtaactatgtcgtaagtaaagtactaacgaaaagaaaaggaagtcgaataaacttaattaaaaaaaacaaaaaaaaactaaaaactcaaatttctattatttcaactcaaaaaaaaaaaaaaactatttacattactatttttgtatgtaaaaaataagggaaacgttacattataaaattaaaatcaacgtaagtactaagtaacaaattaaaaaaatttatatttaaaataactgtcaattttcaattaaatattaattatcaatttcccattttgcttccgatacaaataccacttctggaatcttccttttccacccttttttgtgtagcgtgacaatcacgcgccttcctttcctttgccgtcaatctaggccgttcatttcactaatcccaagatcctctcctttttcaactctcttctcagattcagatctttcatctccaaaaaaaaaaaaaaaccttttactcacaattcaaacaaacttcttcttcttcagatctaaccctacattctcgagtttcaactccaatggcgaacctcaacagaattcgcagcttcaactccatcatacttcatcttcttctactcacattcttcatcggattcactctctccaccgcctcagatttctcaccaactcctcctccggaaagcggcgctgattcgcctacatcgccttcttcttctcctccttctcctgcttctgctccatcggccgattctcctaactcatcatcaccaccagctcctacaccggacaccgcagattctccctctcactctcctgttcccgctccatcttcgccggtttcggatcaatctccttctccttctccttctccgtctccggcagcggatgtcagcgacattaaccataaggacatgaacgaagaatcaggcgaatcgaacgattcatcaggagacggaatgagcggtggaaagaaagtcggtgttgcctttggagtaatcgcagccgtttgtttggttggattgggaggattcgtttacaaaagacgtcaggataacattcgccgatctcaatacggttacgcagcgagaagagaaatgctctgaacagattcattctttcgaggttacttgatatattttttttttcaaatttacagccattatcgtctcttatttcttctgtatgttttctttgatttgatcatattttggaattgattgattcaattctcgattattcttgatatttttttttagtttcttttaagattcttaaatcatcatatgattcttgagatactagttagtaatcgatccatgtattcttgttcatactagaatatttttagtattattaaataataaatttgttttttggatcttctttgtttttttttttttttaaatttaggttcgtttatacttgaatttatttttattattatatatttataggtggaaattaaatgaagtcaagtttttttttcttaattgggttgaccatattgttaaaaagcaattgaatattattttatttaaaaattaattttggaatttaatgcgtttttatattcaatgctgcaattctcatgttgattgttatttaaattctttccctggacttctaataataataataataataatacaacaaaaataaaactataatggtttgatttactcaggccatttgaaaagttacaaggtttaacaaggtaattgcacattaattattggacttaattaaagggtcttaagaattgaaaaatgtaattacaaatttacaatatattactatttttagataatatttttttttaaagaaaaactagattaatagcatgtataggaccagccctccaaaccaaatcagtgttcaaatctagcaagatcatgagccgcagcattataaagaaacatgacataaagataatattaggaatcaaatcactgaatctgttatgctgatcttgaattaagttcacattattagctacaatcagcgagttagtttcaataaaatgaataggaattcaaacatgaagaaataactgatttggaaatggcagccaccaccacatgaccctgcgagtttgaatttgaaggtgccgtgaggagggattttccattgttgaattcttttatgtggccgatcagtggtggttaaagggcggctattggcctcatcgtatttttagataattaaaattatgaaattatgtaatttgccaaacataaaaccaagaaatcatatacaataacacaataatgtattttaaaatacactttatttactctaattattaacaattactcccaaatacatcaaatagtatcatataaaagttttaaacccgttttttctatccaaagtgaataagaaactgagaaatactaaaaggcacaagtagtgtcaaaaatatcgctattggtgtaatttagtatctgatctcatatagtttaatataatagcttttaaggagtattgctagccaatcgtaatgcgatacgtccaataacaatgctctaaaagaaatatattttttacattgtataacaatttattaatatttagagacaccatttgataataatagtaataattgggccacaactcgataatttaataataattatggggataggtagtgtaaaattttatgttttagtttgtcaacatgctatcttatctcatttaaagagatgaacataatttaataattcagaaacacaatcaaattgtggtaaaatgtgtcaagaatcatgttttaatttttaataataatatgttgttgtgaagtaccaattatataataataataaagatatttgttcaagaaaaaaataataatattaaagatacaattttgtttttaccaaacttaaatttgttttgagccacccaatttgagttatgctttgtttttttcttcctagatttaagactcgttttgtgagttgctaagagcctcaaaaatagcattaaattaatattgtatgaattaatattatcttattatgctaaatgccaaattaacaacttgtatgatctaagagagttttagagagctgatcaaagattgtcatatttgattgaataaaaatgtcaaactctattgattaagctcttgaagatcttacaaactaattaaactatgtgtttcaaatttttatttttgggttggtaaaaatcatagtgtgctctcatttttcatcatttcaatacttaaaaaaaaaacagacaactgtgttctttctttgtctgctgcccttttattttctatctaccgacgacgatgatacactttcattcttcgtccgagggtggttcaacccatcggccatgatcttttattagctgaatcaatgcatcggtcgcttgttccattgcgattccacgctgcactaccgtctgaaaaacataatccaaatttccatatcgatttcaaccatacattctttcgaaatataaataaccgaaaacataatttaacagatagaaatatttacctttccaacgtaaaggtcaatctttccgggagcaccaccgacataaccgaagtctgcatcagccatttctccgggtccattaacaatgcaacccatgattgcaatctatcatacgaaaagatcgaaaagagttaaatacaaaggaataatatttcaaaaaaacgaaggactcgagtacttactgagacaccgggcaggtgtgatgtcttctctcgaatctctgcactaatttcttgaaggtcaaacaaagttctaccgcaggatgggcacgagacatactcctgcgacgacattttagaaaagttggacctttttttcttccgaaatatatttcgaatcctttcaaatgataaaaaagcttcttaccgtctttgtatttcgcattctacaaccttgaagtaggttgaaagaagtatttctgagaaaatcgaaatcctgatctggggcttctaagaggataccgtccccgagtccatctactaaaagggcaccagcgttgctacctgcaccgatgactaagtcatccctgcgtgaaaacgattttgaagtcaaaattcatgactgaatagaatatctcataatctttcatagtcaaattaagagaattcaattcatacctgtggattccatttggaaattgaatgtggtgtattacaggaaagttaagagaattatctgatagatactcaaataatctgcagccaatataaagtaacatattgagtgttaatataagaaattaaataaaataatctcgtgcgagtaaggtcattctaatgcaagacgaaaaaagaattattaatttttgttatgcatattaaattttattctacagtcgccctgggattggatgtgccttgagaaaaagaaaatggataattacataatatactattttttgtaaatttttttacatttttatgtttaaagatttcttttttacatttttacagtgttttataaagacaacactaaaacaataagaaaactatataaaagtaaccgaaaaataacatcaaaacaacaacaaaaaataacatacaaataacaaaaaatcaataacaaattaacaagagtacaacatgaaaatacatcaaaagaccgtattttctgtaaataaaatcaatctatacaaccgcatgtttataattttttattgtttttgtgtatttgtaaaatattttcaaaagaaaaattattatgccttgtattaatgaaatgtagtatttttgaaaaccaataaaaatcatggtatactttttaaaaaatatatatttttttgagacacctggattag

SEQ ID NO: 298051 - DNA, 1519 bp, Cannabis indica
gctatcaaaggtcaagccttagccgacttcttggtagaaggagtaaacttaggagaagactctaaaacaagaacagattaagaaaggtggaaattgttcgtagatggtgcattgaatgagagcaacttaggggcaagtgttataatggcatcacctaaaaaatttcattttcacaatgcactaaggttctaatttaatgccacgaatactgaggcagagtatgaggccttgtttgcaggactctggatcgctgaagctttaaaaggtaaatcggttcaatgttttagcgattcacaattgatcgtgaatcaagtattggctgaatacccagaaaaaggtaccaagatgacaaaaaatttagaggatgttcggaagaacatggaaaagtttgattactttaaaatcaagcatattccaagagaataaaactctaatgttgatgccttagaaaaatttgcatcacaatttgagttagataaattgaatcttgttccagtagaagtattaagcaagccaagtatctacaaagctgaaaagcaagacatggaaatgatatacgcgagttccacatggatgactcccattgttaagtacttggtaaaaggagaagttctagcagacaaaggtgaggcacacaaactcttatattcaatttcgagatacacgcttgttgatggaaaaatttatagaagatggtattccatgcctttactgcgatgtgtattcccatcaaaagcttttaaaataattaaagaaattcacgagggcttttatggagatcatacaagatggcaaagcctatctaaaaagataattcgacagggttactattggcctaccataaacaaagataccaatgagtttgtcaataagtctgacaagtgccagtgattcttgcatatagcaaggatacctcctattgaactttgtatgatgaccacgccccacccatttttcatatggggattgatctgattgggtctttaccaataaggagaggaggcataaaatatgcagtggtcgcagtcaatttcttcaccaaatggattgaagttgaacctttggtatcaatcacttcgaaaagaagtccttcatattatgattaagaacatcatttgtacgttcacgatacccataaaaattgtgcctgagaatgggactcagtttgatggagatgtattcagcgagttctgcaaaagaaacaaaattaataagagcttctcgtcagtatcaaggcctcaggctaatggtcaagttgaggttgttaataaaaccttaaaagacactataaagaaaaagcttgacgcacctaagggaagatgggttgaggagctacgttaagtgttctgggcccatcgaacaacagaaaaaattgcaacgggacatactccattttcactggaatttggctcagaggaaatgcttctagtagaagttaacattgtgacaaaaaggtgtgaattttaggactagcaacaaaaccaagaactactcaaaatgtcattggatctgctcgatg

SEQ ID NO: 298052 - DNA, 1934 bp, Cannabis indica
ttcaatattcaccaagattgtcgattatacccaaaacgacgtcgcagatacgcttcaagccttcttctctacgcgccagctcaggcggataagccaagccaggaaatcgtcggaacgcgttacggcacgcgttggggtaatcttcggctgcggtcacgtgcaggtaagcgtagtcgaagttctctgcgaccaaatcctgagcagaagactggagggcgtcggcagcgaagccgtacttgtcggcgcactccttcagaactttcttcattgcgacgtcgtttccataggcgctgagcaactgagacgacagataagacgacgtggcagtggagttggccatcccgatcccaatcatgattgtcgcgagtcccttaacgtccttgtttttgctcgtgggatccgatttgagagaggagacacacagatcgtagtactttgtggttttgcaggttttgtcgatggaatcgttggaatgggctccggcgatggagacgatgaggatgaggataaaaatgggagaagcggccattatttgagtgaagttttgggagtagtgtttctgtttggatggagagaaagtaagatggaaaatgatgatgtcaggtcatatatatatagtgagaagctagctagctaggtaggtgtagggagtcttatcagtgttttgttgttgtatagcttcgattttcttattgtttgggaggaggtgagattttgactttcttcacgtacagtcttttactatataacctctacaatatctctaactagtaaatgaatggggttccttatattttgtttattaataattaagagtgggaaattctataatacaccctctaaaaggatatactgatacatttctatttgttttagtatccgaaataattttttatttaaattttttcttatgatcatgtaaattatagttatttaagacatcccgcaaaattttaaaaaatttggaaaagtttaacacgccgaaaattgcattcaagcaaggtgttctacgcgtgactattttattttatacacgtgtaaaatggactgtttgaacatttttttctatattgtaaattattccaaatttctcaaaattttataggatatcttaaatagctataacatacaggaatatgaaaaaaaaaaaaaatagactcaaaattttttctagatgctgaaacaagtagagggtgcatcagtacatcccttttaaaggggtgcattgtagaatcacccattaaattataaatttatataaaattttgaaattttatatatttttattttactcaaaaaataaaattaataatctaagaaaaattataacacaattcttcaaactagtaaacatttagtgcttcgcggcggatatataaaatattttaaattatatattaaaaataaattatgtattttaattaataataattacgtaataaaattatattaaaattttaactttactattaaaatatttgtgacatacatacttaaaataaagctatatttaagaataataaggctatttcaaacatctctatgatatggtacctgattttgattcagcatggatttgtacaatttgtttgctttaaaagtgccttttgctccaacagctgtgatgttggcttggttaaacttttgtcttatacgacaaagcttcctccaacaccaactcgtgtcccatttgagattgtaagaccaaaaattctctccttttaaatagacagcattcacccttttgacccaaagcagctctttcttcatcgaaattccccaagtgaatttagcaagaaattgttacgaaaattctgtttattacgcaagtgtacgtatcaagtagtatctcacgcaagtgaggttgaaccacagggaattggattaagtactactaaattatacttatgattctatttggtaaaataataagt

SEQ ID NO: 298053 - DNA, 5042 bp, Cannabis indica
cccaaatcctcatcagcaacttaagcattcacatagatatttaaaataacttaaagtgaaaccaaagcccataactttttttctaggaagcgaaaaattaaaagccacattctttcataggatacctaaaagtaaagacgagaaatggaactaccttgattctagcataaaggagctctttgaggacagtcagtatgggtcttgcagctggagtagtaatcaactgattataatgagtctgcaacagcacagtagatatcctgcatacgagttcaacctgaaaaacaaagaaatcatcacattttaacaaacaatttgaagaaatgaccattcttcctagcataaaagtattaagcagatgcatcttcagttcctactatttcaaaataccttgtcggaatttgaagtccactgctttaagtaagttagaagctgtaatgcatctgagaatggtaaagcctgcacattagtacaagtgtcattagaatttcattgtttacagtatgaaccgaaaatgatttgtcgatacatcaacaaaataagtgtcaccttgaaggaaggtttcaacacatttgatgcaatatagtttaaaaacagaaaaagtttatcatagacaatcatgcccaaccaaaacataaatgtaatcgcaccataagcaatgcataccagtagagtttgttctagatcacttgtctgaactttagaaattgctcgtaggatatactcagatggagacaacccaagcaaaagaacatttggctggaacggagcaactttgccctttgctttctcctcctgaaatttacaaggcaaagcaactaaattgaattgcataaacaacagcctaaaatactaaaccctcaaaatcatctataattatatttgagaaagtgtgaatcatagacgtacctcataatcagtaagtcgcttcaattctacctccgcaatgtccaatgcatcaataattgtatcggttgcagaaagtgtttccttagatttcttccctgctaaagcaacagctccctcctctgggacttcctccttgggagcatatctgttctcaaatgcattgtcgagatcggtctctaactcctcttccaaccttttctctttctcttcctgtacatccaaatataccatttttctagaattaacattctctgtaaattaatcatggcttggtgcaaccataaaaaagaaacttacctcaatgaagaatggctcttcagtacggtcccagcgacgtatagaacgatcatgggatcccgtgacaacaaagtcaccgcggttactgacagcaagacaccaaacatcagcatggtgtccttcgagagttaagagacactcaaacttatccacatcccaatattttactagattatctttcccaacgctgaacaggtaatgggtccgctgtacaaatttcactgctgtaatgctgttcaaataaaaaaggttgtcagataatatttcagaacaccaataaagccaatagtcttttataactcaaactatgaaagcatcacctctctttatgagcaaagagggatttgtgacagtcaccaaaatctaaaccccaaattttcaaatctttatctgcagagccagttacaatcagatctccatctgacgaaatatccatacatagcacaggcaatttgtggccatacaaggaaaggaaaaatttgagtgaatcgaaatagaaaacctgaaaaatgaaatacaagtatcagaagattagcaataacatcataacgcaactgacactcaaccaaaaataatcaggtccagcaaaagctattagcctattgccaaaggaaactttgatgcattttaataaaactttgttttactactctaataagttctccctgaaatttgccaaactaacaatgtgaaatactaaaatttgccaaataacctcatttaatttactcgcacagtgtaaggctatggtcgaacagtgtaattcatggtcgtttctgcaaccatgcaagttattttgctaataaaattttttgtaaagttattttgctaataaaaaatttcataaaggctatttttacaaaacactcattttcccttagcctattctactaagcatcttgaacttgtactatgatttttcagtccagataaaaattaattatgattgcttacagccaatgaagactttaaattagtatccatcaaagtaaattgtgtggacaacgaatgaatctgaaaaaaaaaaaaagtgacatggcaaatcagccttaccttcactgtattgtccaacaaagcaacagcaatatacttggagtcaggactaacagcgacagcaagaacttcgtcatccatcttcatagtccttacatttgatgccttaaggtgcttagagccctgcaaattaaatagctgaagtgttacttacccatcaaatatgaaaattgcaactgtagcagcttacatgtcagacataaatgctgaaatgaagaatgggagaaacaaaaagcttctataataacgatcaacatatgatataaacatttgacaaagtaggatggtacaaaattttgaagattattattaagagcattgctataaggcaccaatagtgtctagcaccacctagaggtgacgccatgtaaattgtaattgtttagcgatattctataatagttattaaattaaattatatttaattagatcaatattgatatgacacctctaggtagtgctaggcaccacaagtgccatttagtatatctctattattaattattaagatatacattcaaaaatattcacatatatttttgtaattgttggccctggcagtttcaccaaagaacctcccattggcccaaggtattttgagtccatgggggttcaaacttggaacaaatgcctaccagaactttcgaatactccttaccactagaccacccgttggggatattgtaaaatattaagattaatattgtgaagacagttttatgaagaacctacttgagtagattccgcttgatactcccagaacttaacatcgtgatccgcacttcctgttacaaaaccgttttcatggggaatggccacaatggagcgaatagagccaccatgggcttcaacagcttcaatgcaagtcccactgccaatgtcaacaatctccaattttccacctttagttccaactagtccgtacctattctgaggaagaatataaccacacagcccgaattcagaatcaatagtccggaggcaagaaccagtacttggattccaaatcttcacagcattgtgactagttgacatcaaaagtgtgttgtctgagctaagcgtaacacttcttacatcagagcggtgcccttgaagatcaatagcaagtgttttatttgctgcatcactatcaatagaaaagaattccaaaagattattgttcaatgacaaagctattgtagccaatgagctctttggggtgattggggagaatgaaattgaagaaatctttttgccagctctaatagtttgaatgagcttgaaaacatctggaattgtaactacagggctatgtttttctcctgttacatgacttatttctccattttctgtcacctctgcctcttctttagcagatttcttctccttccggtgaagcctacgttttgctttacgcttagattcagcctcgtccaacacacggaaaatttctacaatcttccctgcaacttggcaagccagcaaatttccagacttgttgaatcttagggttccaactctatccttgctttggcgctgaagttcaccaaactgcttcagaacactccatttatcttgggatgacgaattaccattattcaccacttcattcccatctacattatctacggactgctcagcctccgtctcatgcttaacagaataaaaccgaagctccgggtccgcagacccagtgaccaaaaatctctcctctggatcaacgtctatggaccaaatctcactatgatgaccaccaacaatttgcatacaatgctgtgtttcaagatcccacaccctcaaaaacttgtctttggaagaactaaccagtttcttaccggaatctaagaagacaacatcagtcacctacaaaacatggtaacaacaaacaaaaataaaagaaatgaaatgggtgggaaaatatatacttatactgtatatacatatatatctccattaagaatctgcataaaacatacctggtctcgatgacccctgaggcgaaatagaccagtctctccaactacatcccacagtataacatcattatctttactcccagatgcaagcaaagacccaagcttgttgtaccgaagaacagtcacagcccctttatgcccattcaatgtagtttcacaggttcctttctcaaaatcccaaattcgaatacttccatctgcatacccaatcgctacctgcaattaaaccctaacttcactcccggaagcaaacagaacagcagataacattaagaagctaaaatcaaaaggttaccagagatgaatgcgatgcatcgacagcgattgcggtgacaccgagggaaggaccacgagaagacgcagatgggtctaggtttttgatgcgaacgccttgtcgtacatgccaaaccccgaccttctcgagggccggggcaaggaggtgcttcccagagctgtcgtaggcgatgtttgatccgatggaagcgatgacgccaaaggcagaagctggctcgtacctcaagtaggatttcaccatggctttgctgctttgcttctctgctatggcggtagccggagaaaatagtgttctttctttatcgttgaagggtttaagggttttaggacgtaattcgggtacgggtcagattatgggcctaattggtccatagaacttgggatttcagcccatttaatgcccaatttttttttggaaaaacttacaaaactactggaatttgggttagcttttacaaaaatactgtcacacgaaaatcttttcaaaaatactttgtttttataaaataagagtagaacacaaaacagaacaac

SEQ ID NO: 298054 - DNA, 1296 bp, Cannabis indica
gataactaatcagattgtaaagagttttatttagggcataaaacctaacatatgtagtctaatttggtggcaatttggtttcttggtttgcaaagaagcaacaagtggtggctcagtcgagtattgaaaatgaatttcgtgcacttgcaaacacatctgctgaagtaaagtagatatgctttgttctccgtgaattacgtgtctcccttccttctcctccaattatttggattgacaaccaaggggctatctcaattgtcgcaaatccagtattttatgctcgcttaaagcacatcgagattgatctgcatttcattcgtgattaaatattggctaaacaggtactatgttccctcctatgatcaaacaaaagacattctaacgaaaccactgtctactaaacgttttagctatctcaaaatcaagattgaaattagtacaacatcctttcgcttgaggggaattataagtaaccaattttgttacttagagttgtgtaatttatttaattagttaaacaaactaactgactctgcctaatggtaaattttattaggtcattattttgttcagctcaaactctttgtaattcttttatttataaataacagatggtatcaaagactctgcagctgttgtaagtcttgaattgattctcatagagtgaattcttgctagattttgtataaatgaattcctataatgagacattgaccttattaaaacccgacaaaataaaaagaacttcaatgaaatatcattaattttacgagtatagatatgaaataagaatactaaatctaatcttatttattactttttaaagaaaattgtcacatttaagtaaaatttaatattattttacataataactaattatggtagttaattaatcttcaaattttaattaaatatttgacaaatttttatgttaatttctttttttgatacatatgggatctaactcctacccccaactcacacacctctcccatacaaatttttatgttagttgttttttaatatctaattaaattataaaataaataaatattgtttaaaatgtcaaagtgaactaatagacttgaagcacttgtcaaactaggaagattattctctaatatgattggtagatttgtaagattatatactatttcctaattgttatattcctctagggttagtaccatggtatgtgaagatgaaatataagaaccctagagattgagattggtaacccatcctatccccttaaagaaaaatcccattgcaccttttttttttgttttgttttgt

SEQ ID NO: 298055 - DNA, 6055 bp, Cannabis indica
cttttttgttttggtgattgattactgtctgtttggttgctgagaatgggattggaaaagaaaattgttgtatgaattcaatgcgttgctgtttttgtctcaatttagagaagatttcataatactttgctgagattcgaaggttaagcattaataatttaaatgcttttgaatttattgcttatttaaacttcaatttcagtttgtatgaatcttatttgcacctttttggtaggtttgtaattataatttggtgttatgttttttaattttcttcttttgggtatttgaggatgctgttttgttttttggtgatttattgtctggttggttacagagaaaatgtgagaaaggaaatgaaaattgttgtatgaattgaatgcgttgtttttcgtctcaatttatttaagatttcatagttttaattattctttaatgataatgcgttgttggaaatctgtgattcgatggtgaagcatatataattcttctgtgagttcctgtttggttgctgagaaaatgtaggacaggaaaaggaaattgctgtatgaattgaatacgttgttgtgtttgtctcaatttagataagatttcatagtttttaactattctttaatgataatacgttgttggaaatctgtgatttgaaggttaagcatttatagttctactttgagttttacttttcagttttggtgatttattaccttcctctttggttgctaagaaaatgtgggaaaggaaaagaaaattgctgtatcaattgaatgcgttgttgtttttgtgtcaatttagataagatttcatagttttaaatattttttaatgatcatacgtttgttggaattctgtgatttgaaggttaagcatttataatataaaagctcttgaatttattgcttatttaaacttcaatttcagtttgcaattatataatttcgtgttgtaaattctcttttttcttcttttgggtatcttaggatgctctaaggcatgtctttgcaagtaggatagcagaaataaaggactctccacaatggaaccgattatcatttgtttcatgcgcttgtaatggattgttactcatggatgagtctttgcaacttctacctgctgttgaaacacttgacctgagccggaacaagtttgccaaggctgataatctacgaaagtgtgtcaaattgaagcacctagatctcggtttcaataaccttagaacagttttgtcatttagagaggtacatttttttgtttgatacagtgttgtcacttgcaacttcttaaaagaaatttcgataggaacttcaatggttgacatgactgtgttttatgatttcagtttcatgtattctttactatgagttttgtatttgggaagttttatattggacccaacacagatgttgttggactatgcaggtctcctgtcctattgttaaacttgttttaaggaacaatgctctaactacattgcatgggattgagaatttgaagtcacttgaaggccttgatgtttcctacaatattatttccaatttttcagagttagagttcctagcgggactcccatctttacgaaatttgtggttggagggaaatccattatgttgtgctcgatggtatcggccacaagcattcagctatatcaatacattgatcaatgtaagtcatgctattacttggcataaatatattcttgtgttttattttcttcggtgtgtgttgttagaatgattagatgtagcattttgaagcacgcatgcttccatctcaactgtcactccttctaatacttataattttctttaatatgggtctttagttcaaattggatgatatggaaatcagcaccagagaattttggaagagacaacttattattgccagtagacagaagcgacctgccagctttgggttttattctcctgcaatatgtgatgctaagggagaagggtctgttaacaggagacgggtaagtgtttagaaaaatagccttcaaatcgttccttcattgagtaaattgaagatgaatgttaggtgctcaaggtgtaaagtcttctttttctttttctaagttattagaagatattttctttttggaataaatgtttgttctttttatccccgtgttattttttatatatataattatgtatttaatatttatcatttgctacgaacttggacaactactaacttatcgttattacactatgcagaataaggtaacccgtcttgcttctattgggggtgaaggtgaaaccatatatttatgttctgatcaggactctgtgtcaattgataacgaagtgcaaagcagagaggagaatgtcctatctgatgatgatgctgaaatacgtgatttgatgaataaagttgaactgatgaagaaggagcgttctgttctttggttgcgggagtttagggaatggatggatcatgattctgagaattgcatagaccacagtaaaaatagtgggacatcatctccaaggggagagaatttattgagaataaagacaactcaacgacatgttggtgaatgctcaagatatgtctccgactcggtcaaagcttctggagatgagaatagtataagtgttttggattctgatagttccttcatggatacatcttctggtttgcatgcccatcaatattttgatcaaattgttttaatgggccctacccgtgtaattagtccgaatagcatggggagaatggatcttaaggaggagtattcaaaagtttatgaaagagttaacagtttatctgctcaagctaaaagttcttttgctgatacctttgctaatcaagttggtcctgggatcgttgaaaatgtaagcatatcccctctgactaccattgatagtatttcagaatctcattcctctacacatcccggatcacctcctcagtaccgagaagatattcttcatcgtcgtcaaaacctagaggaagaaatcctgcagttatctgctgattcatattcagtggcttcatcagatagtaatactagttgtagcgacgaggattcatatgcctttgggccaatgtctgatgttgatcagtcacccaatggaaaatcgttgaagacaatttttgacttgcatgcctgtttggaaagttttgaacacaagtattgtgacccaactcatcgaatttctcaagtaagagaaaatggtcagtgttcagctgattctcgtgatgttgttaaagatcagtccattaaatcacgcggcaatgattgtcttgaggatgaagacggtggagatacccgtgctttcaaccaaaaggatgatttattaaggaagaaaaaaggcaaaagaaaaacaaaaagaagagttgttccactggtaaatgataataatttggttgggaaggtagaaacatgccaaaaatcaaatggcgaacttgattgtcataaagcagaaatggtaaaagatcaacatgttggtgaagagaatcaagtgttaacaagtgttgacagaactaagctaaattttgatgctgatgggtttccgtcatgtagaaagaatgatgattttatcgagaaatatttcaattcaaatgtagcagattcaagaaatgatgaaatttgctcgcagtatatgcgttgctactgtatacttgagaaggattctgtgttcggagaaaggtgacttttcccgaaactcttcaaatcattttcagatgtgtttaattgggttagttgttgatacgggttgtctaataatttgctgaacatcttttaaacatgtgaattaagaatgtctttttttttggttgacagtgaagtttttcccatcattgtttgtttagtttgatcatgtgtacaagatgtatttatttatttcttgtattaatgtcaatcttccaaaatggcgtaatttattgttattattatatttatgtgcagagatgtggctcttgtaatgagcagtgaaaagaagctatacattttccttgtttgcaccacaagtgatggatcaggttggtcttggactttttcttttcaaggttaataatgatgatagttgttctgatttgtgtttgctgaagcttagcataatatattttgcagaaagtgtctcaagtttaatggcttgccataatgttcaaaacatcagtgaagtcttagttggtatgggacttcaggttgtaaggttagtcgttttattatatatatttattttaaataattgaacttatagaaattcacttctctgatgatatactcttcttcggttgaggcagggtgtctattgaggagagtgcaacctacctatttattaccagaagtactgaagaattaagacaattactttgtaccttacaaattttcgattcgtttggagtcgataacaagtgttcatttagaaggtaaactaaccatttattttcacatgaatattataaactcacataggagtggtggtttagtgttctgcattgtctctgacattgaaatttttagaagtgtttaatagttcactatataccttttctttgttatgatatactggttttggaaatttaaatggcagtttggagcaggttcaggttgaattgttcgaaaaacaaatactcggtggttcaaaagtgagcatattccaatattctatggttctcttttggcatggcaaccatagaggtatgccttaagcagtcaaattattttaccagttttgtgatttgatgtctaaataattgtcttgagcatcgtttttcactgtgttgttagggttgtacataaccaatgacttgtgtctttaacttccaacgatattacaactatctagatagaattcacagaaaactagcctatgagagaagggtgcataggaccctaagctcgagaaataccaaaccgagtaacatctagcagtatgaagatttctgcccaaaatctaagttccatctctactcacaattcttagagaattcatcttccgagctaagttgtccatgttgtccgttacctcgcaaatgacttcactcagatcacattaaatggtattggctatgatatcctattgttacttacaactacttaggtaaaactcatctcacaaaacaccaacccatgagagaagggtgctccatttttagtagaagcaggattcgaacacagtaaaaaaaaaaaagtaaaacactttcaatacaattgtacttctatttgtcttgatagaaattcttactggttgtaaagtttgagctttaatgaaattcagcacccgctaaatttctaatatttattcattggtaatgagaattctattcaaattgtacagagggttcatggcttccaagatcattgtttgttatcggtgtccatctgattatgtgcgttgaagacctagcgaagttcgcctctctttcagtggatgcacactcaccgtcatacttctcgcttgattcatgttgctcaattgacagcatatctgagattgtaagtaatgttttctctatgattgacattaattgttctttgccttgtcccgaaattcgctaaaatctgtcaaccatttcacatttttcaggttgtagaggaggaggagaatcagtgcgtaaccttatccctttcccgctcaacaccgtcccctctcggttcttccttatcatcttatactggcaaaaaggtagaaacctcgtcaaacaaagaaaaaacaatatggaaactcaagtggttctcaaaagacaatatgttcaagttcgtattgttgttaaaggcgttacacgaaagaagcacaagctcatcgcctttgccagtaagatacatcccttgaaacccgtcatcctcttttcgtataatttgatttcatttccaattcaatttattctttgatttgagattttgctgttttgatttgattttagcttttcttctttggttgagtatagtgtttgtttgggctatttctttagcagtagatcgatcttgtgtaatgtacaaaatttgtacagtgtaaaatcatggcaaattgacttttaagtataatattagcactttatgatattttctcttgtataataataaggaacaactctaaga

SEQ ID NO: 298056 - DNA, 5399 bp, Cannabis indica
atatttaaatattaaattactaaaataaaaagactaaaatgccccttaaaagtagatattttttcctttagttttgtgggttgttaaggcccagttcacagtctagcttgttgtccacatataatgttgtgcaccaaagttctgcaagccaagtcctggccggtgatgcacttgtaggatataggatggctggccttgtgctatccaaaagttagtcggccatagggccagctaggggtggtcggccaggccccttaaggtggctagtctgtcactcgtcgtcccgtttgagtgttgggaaaccctgttggctagggtgttggggtagatgacttgactttcttgttagagagttgtactaccacatgatgctgatattggccatgtaaacatgccacatcaggtaggaaaaaattgggataacatttaccccccatgtccttgtgcggatgtctatgcatatatggacttttcaacttagttggaactgatatagcattagctgagtaaatgttgttgcatatgtagtctttgaaatacccactcttgactgtctaatcttattttgtgtagtaagttgatggcattgtactcctacatgatttttagttgatcagtgtgtggcaagtgaaggagtggtcccacaaaaactatataagctctatagagggaaagtcgtcttcacttttcactttctcattagaaaaattaactttgaagaagctcctccctctctctagaggcaaaaaccacattgctccatctcctgagatttttgcaccgttttgacgatccaagcttcccattctcttcatcaacgatttcttatagtggttaaactttctattcccgctatttacttaatttagttaatttttccatgattgcatgaatcgttttctttactttaaatgtttgtagattcctacgttagattataatcttttcagtattttgattcgcatgatagtcttaggatgtgtaatgtgtaatttctagacaaaatagatctaattctaattgtttgtgattcttggctctttgagtcatgaagaacacaaagaacttgtttgagttcttgaaaaaacacatgtttggatccattatgcgacctgggtgaccaaggaggtcttcttaaagacctgaccaaccatgggtctagccaaacatagggggctaccgtataggctgactggcctatgcctggaagtagaagtctaggccagccctagactgggtcatgggacctcgctgaccttagaaggcttaggaaccttggatgaccaaaaccaaggttccaagtggggcggtcagccttttgtccttttttgacctcggctaaggtctcgtgatggccttgtaggcatatacaactgtagtcttatgtgtggttccccttggggactctgtataagatctggtagtgactccattatagtcaagtgtgcaacttaggtttagttatttttctaagtagatgtccttaagacggtactttgtgtatacttagcgttgtacaatgtgattttcctagaaagtacccttgggtacggttgacaggaacattgcctatagctttgtcatgtttctcacctccctttgtctcttacatgcaggtgattttaagtgttgatctagggacctaacaaccattgtgtcataggtcccatcagctttgcttttgagagatagcatttagtttatccccttgctccttttatgtgattctggacttatagtcatggccagaacaaaacgatcagttagagtgcaccaccatatgatcctcatgttgccagagttgtaacaatggggagagtcagagtttttgaggagggcacacaacctcgagatttttagatttggaggttggtcaggcagaggtgccaaaggttgaccacggggtctagagttttgactccaaatttgaggtggaggagggtacgcctgttaggaggaggacttataaaacttgtgatgtccttcccaactgccctctagatggatatgattttaatggaaagccattgaataagcttggccaaccttcagtgataggtctggaccatgtcttgtttcattctttagagccttagaatttagatgctagatctcagggagagaagtttttttctcctgcatctattaatcctactgagacttttgacacgatactttctagtgctctagtaacgggtgtctagtgtgagatatacaccagggatcatagagcacattagatttccctcacttggatggcatggtcagagcgtcatattcagtagtgggcggtgttgcagttacatccatacttccatgatattgttgcttacttcaggatgtgtccaacacaaatcaccccaaaaagtatgaaatacctctcggtgatgtttattttatatgcagagctaggctggcctcagcctactcttcatgagattggatattactttgattttgaattttctctaaagcaaaaccgaactggatacttctacttcactcaagttgaccatcagttgttgggtgagaccaacaacagacctatgtcaaaagttggtgggtatgccaaaaactactttatttcttgagacatccataagattcgatactaccacttctagcgagtgccgttctacaaacactccatccctacattcaagatgaatgatagggcaagtcacatcatgtccctccctgtggagaagaggaacataattgggttgactagtgtagccaacttatagaagtacatcttgtatcctgctgcttctagagttgtgggggttgagggcccatcagttggtgtggatggagccttggcagctgatgaggtctgtcttggtgaaggacaagttcccgttatggatgatgatgtgcctctttcgtggatagcctgaggtctagtaaagagagagagggccctctcctagcgcttggctcccgggggctcagttggagatatttctctttagattagtcctagaggccaaagctctacagggcctactcaccctttgtctatctctaaaggcaagagcaaggcagttgttgaggattaaaatgattcctcttctgaggatgaaggtatttgatagttgattgcaccatattttatattcttgtcttgcaatgaatatttgtaacttgtattttgattttgctacttttttttacagatatgtctctcaggttgagaggtctagctgatggacctttagaggagccttcgggtcattcgagggtaaacgtggctcggaccactcatgctagaaatgttgcggggtcttctcttctcttcctcctctagggcctgtgtcagccaagcaacccatgatagatgaccctccagcaaggagtgaacgtccttcgggtaggggagtcctgaggcctagtggaggaacacgctcagccacgtggcaaagagccatggaggtggctggtgggcatctgaacaaagcctttccttctttggatgatgagctccaagatcttgatgacgacgagccacagaggctcccctttgctagcctttggtatttgaccgcggtgagtcacagacttaaactcattttttggcattaatatatgttgttcggcaatagtcactattgcatgaagttggccagccaatgctgtgtctttgagggtttggctagcctggccggccagtgttgtcttctgacactaatttttaccttattttgtttttagtcctttatgaagctgagttattgtcattgcaactactgggaggtcttcgggtgctcttggtgaacaaataaagagcttggatgctaatatcatggcgaaggaggctgatctcctggtaaagggaaaggctttagctgatatggaggttcttggcctacaaaactagaccatgatttcttgtttggaggccatgcttgacaccaggaacaaggaaaacaccatgaaaggtattgaaatctcaagattggggaatgacctcactaggggtgaggagaagctaaaggcaaccctcgatggaaagcaggccataagggacgagtagcttggcttatctttggaactcatctatgagttcaagctacacaacacaaatgctaatctttcatacatggggaatgcttctttcctagatagtaaacaagcctaaggaagagcattgttcaagagaaagttggaagcggaccagaccactgtctggccaaagtgataatccttgggaaatttgacaaggaaatgactgacccacctattgaggaggtgtctggctagggctttgaccaggtggccagctagccatggaggttatggccagcccacactgcgacgatccaaactctgcagcttttgatttagccccacctgtacctgcacacatgtagttttcagcctattagtatttcagcattatggttttatcaatatagacattgtttttctgttttgtatggattgtgtgaccgaccaggcggtctttaaaccttgctatcttcttatggccttgacatgcaagtatctgaatttacttttatttatgccaagccgatgaatgcctacacattacttagaggcaggtttagtagctcattctaaccattaaaatttctctgcataagttctctgtgcttgttcgatgcattgtacggtgtggatgcccccgaagtgagcacgcagacttacgatctcttggtcacttgtaattcaccaagtttcatagaccttgcaattttcttaaggtcctgcctgttgtacgcacgtggaactgaaaaaagagtaactttaagaagttaatcttgttaagcaagtttttttgacacaataattcaaacataaacattgtattttatgctttaatttgtctttgttacaaggcaacttccataaatggaatctacaagattacataacaaagtttggcttatagatttcaaatggctaccctttcttggccatagcagaggccaccattgaagaacggtgggcggccacgccaaaaagttcatggctactagctctcttccactataatattgagtttgtagaactgctactgcaaagtagtgttctataagtttgttacagatagtatttgcaaaagtgttcttcattctagcatcttggtagaagaatgagcttcatgttctcgttgtaccttcacagcttgtaggctcccatactagttatcaacgtaacttgatagggcccttccgaattggttccaaacactcctgctgctggatatttggtgtttaggaaaactctttggagcgccagatatgctatgaagaatttcctccacttgacttgtttgttgaagttccacactaccttttgctagtaggcttatagctttaggtgttaggttttatgccctaaataaaactccatttcaatgtaatctattttat

SEQ ID NO: 298057 - DNA, 5766 bp, Cannabis indica
ttctcagatccgaatccatgaaattttaaagagaaatttaaaaaattaccttagacatgtgcggttctcgggtctcctcctccgtgcggcggtgatgacggtcggatagtgggtgggtctcggtcggagtcgactgggcgtggtggttgtgtgaggtggctgggattgggcgtggttgtgtgaggcggctgggatcgagcgaaaagggaccgagagagagtttgagtggaagagagagaaaaggattgggattttgacaaggctattttgagggtttttgaaaattggtcgtattttaaaaattacctacactaagtgttctccaaaccaattatgtattaaaaaaagcataataattcaaatttccctttcattataaaaaataaaataaaataataagaagggtaattttgtccatttgaatgagaaaggcatagttataagcataaagcctcaaatttccctctgagagaatagattaccaacaatggtgaaagcggtggtcggagaagaaactcagctcaaacaagctgaagatcgtctcgctcaatctgcacttccgactcaggtgggacttgtgattggcaaactcagctccaatctagataggggtttcgtctttgatttgatcccaactccactcaacgatgctggagaccctgcttcttctctcctcgaatcctctaaagatgacaaaaagaagggacctaaatccaaatcacagtcctccgttgattcttcttctctcgccattgacaaggactgggtcgccgaacatgctcgccaggtttacttaatttattcttagtggaattcagaactttgaattactttcattgtgttgattattatgaaatattaggcgtagtacaagctattgatttctatcaaatgatgtggtttcaggtgtctaaaatgttatctggtggaatgaaggtgattggtatctatgtatgggttggtgatagcgctttcaaaaattcaaccattgtgctttgtcaggttgtttaatgttttggtttatttacatttttgtttatctgataatgtacttagaagttggattggaggaactattactaatgtgatattgcatttggttgaagtttcattagcttgatttgtgattaagaactcgcttagcttacgatgttaggtttcctcgtttggcaaactaacatattagatgtcttgaattggttgtttcaatatctatttcaaacttttgtttattctagtacaatctgacgaggaccagtttgtgctgtgaatttcaccctttaaagtgcttgtttagataatgggttcactgtcattattgctgtttgtcaatggctctccattgtaatctgtacatggtatagtacacaaatttattgtttaatgtattggtttatgtagactttaaagggtgttgctgatgctgcaccactctcggagactgatctagatgaaagaattcttattcacatatgctatagtccaaggaggtactttgcttcagatattattgtcctgaaaatgcatttgaattgtaatcgacgagaacattgactaagcaattgtttcatttcatctaggtggacatgtcgaaactattcattgggttcaagtatttcttcgagcaatctaagaccttgtgactttaagatggggaaagttataacttcgcttcaaaagtttaggtgcttgtacaactttgatcttaggtaatgctttctaattttgtttgaatatgctaatcagcaaacattttattttcagtttgcaatagggatgccagaggatatgtggtttatgggtacaaatatatgaaatatatgcctgtgctatgattttgacaacgttgtttgtgatcatttctttgtttgatttgaaaaaattgatgagttgatcacggctaccttgaaaattattgtattagaacatgcttgatattatagttcgattctaattctcttgcattgaacttgttttctttttaaattttaagaaagcaagaagaagaagaagatatttgaacacgtatacacttgcaacaaattgattgtcatttaaaattccaagtgacaacaactacttatccatgtatgccaaagttatgatcatgggcaaatttgtccaaaagcatgtcaatgtgatctatttcaaatgttttttaaaagaagtatttcaaaaattggtcacaaatcatctattcgatggtttcccttgtttaaggatcgactagaccttaagattgactgaagccattctaggatcggctggaccccatttaaaggattggctggaccagtctagggtcaattgtttacttttcaattcatttgaggcaattgtgagaatgaaaaacaagattataaagatttgcctactcaattctcttgtgttttttataaaataaaaatttgaagatctatgcaaagtctatattgacgttgtctgatatgccttcactgttaatgtgttatgcttatttggtgaaattcacaaataaataacattaagcaaatattttgttagtggttatagttttgttcatcagttgacctagataaataccatgctacttgaggtggtgtcttacttactggtacagctgtgttatcccagattgcccatttataagaatgcatcaagtgtccaaacattgcctgatgtactccgacatgggatttctgttcatgcgaaagagctgaaaggtgcaaaagccatcattgatgggaatttggtaagcgtcactttgtttttgaggtcctggaacttctgtagtattcaactatttcataagctatatgctttaaattttctattatcatcctgtactatttgtaggctgaaattgttagcagatcttttcaacgaatgcaagccaacttttataattttcttcagatgcatctggaaaaattgactttgtttacattgacacttgcaatgcaaaaatttgtttatgttcagtcatttgaactactgcagttctttagttcaccctaagttctaaagagattgatttattttaacctttgagtgctgtttcattatctctattcatagatggaattaagtgaaacacttttttgttttgattaatgttcttagttaaagttctcaactcatgctttcattctttttcacacaattttagcttgttaatgatgaaccatgcacatcagatggtttgcatgaagttgaattgctgctaccattcatgaaaaatgcttcaactgaaggtctgctggaaaacttatttacattggaattttttttttcatgctttggtacctcaagatgttattttaatgtttttccatgtttataaagcatgcagccaaaaagaagtcattggtgttatcgtttttagtggctccgtatgttcttttggatacataaattcaaaagaaccaatttcacaagttgttgctgatataaaggtattgaattttctttaaaaaaatcaagcattgatttgttcctatgcatttttttgagaactggataatatattgatgtattgtagattttacattttccttgtttcttccactggccataatgctatttaatatatttattatttactctatattcatcagccagggtttgtttcggcctcaattaagctaatgccactgtttgttttgctattttctaaaaatagaatagaaaagaaaaaaggatctcttatattcttttcatcactaatgtccatatcttcatttatattaaaagcttttatgttctaggaagatattattcttagcttgcaaagtagactagatatcatctgcgacgaggcagatggagatacagaccagactaatggtgaaagcaaggagtcagatgaaaaaatgactctagaaacttgtacctcccaacttgccatacacctattgcggtgcgtttatagttatgattctgatatctgctatgttaatctattttttggctgtcttacattgtaccaatcttaactgttaacttggaattcacagcattgatctgttttcctttcttcttttttttttttgattgaacaaaagttcatttagcattgatttggttttcatatcaattctcattgtgttgtatggcaagaatttggcccttattgtttcaatcaagtgaaaatgatgactaatgctctttgaaagtaatgaataatgacgggacgatgtactaggtgttttcttctatttcgactttctatttggaaaagtaggtttttttagtttcttttgtgaaacagaatcctcaaatatatctagtcacttctggctggagaaaatctttactaatcttttattattctaacagaaaaactaccaacctttcacttccccgaagagtctttattccttggttgggggatttgtttgtgtgtgactatctacaatcatctgagacccatgaggtatgttcttctgtgtaatttagatccttcggttttgggcaatgctccatttagagttcggcttattattaccttttatgctctcttaggtactaaaagatcattgtgtggagctgttgtcaatggataccacaattgataccaccacaattttggaacctgaaatagaaccacctaaggtaatagctacatctttttgggatgtggctgtgcctctcgacccagcagcatcgagctcttcctcgaagaatagtggtgttgttgagacatccagaggagaaactagtgggaacacagccaagtctgcaaatttcaacatcataatagctgccttcttcctttttctgtctgtcattgttgggtatgttctcattatcatcaaacgatcttagttttcatcgatgatatttcagttttaatccggaaggtttggattttgttttctttcttatacttgtagaattttactttttttgttgtcacttgttgaatttaggcaataaagtagtgatccattttggagaagtgttttgtttcaaattagaatttagaatggtagaggagtaacagcctgaattgtatttgtttgattaatgaaaaatcaataatatcccaattaagagtttttcaggcttcaaagaaagaattgtatttgtttgattaatgaaaaatcaataatatcccaattaagagttacacactcgaaaatggaaggggttttttcattattatatttatgataaaaaatttagggtgattctacaatgtacccccttataagggatgtactggtgcacccttaacttgtttcggcatccagaaaaattttttagtctaattttttttcatattcatatacgttataactatttaagatatcctacaaaattttgaaaaattcggaataatttacaatataaaaaacaatgttcaaacagtctattttacacgcgtataaaataaaatagtcacgcgtgcaatacactgtttgaacataattttcggcatgttaaactttttcaaatttcttcaaattttgcaggatgtcttaaataactataacgtacatgactatgagaaaaaatttgactaaaaaattatttcggatgctaaaacagataggggtgcatcaatatatctattttaaaggggtgcattgtagaattttccataaatttattcattttacggttattttaaaattctttcattaatagataaatgtgttagagatttttttttattatataaagttacaggttaggtatgttaccaatactaaacttaaaaaaattacatacacacgtggaggcaaaaatacataatgttacaattctcttacaccgttacta

SEQ ID NO: 298058 - DNA, 5053 bp, Cannabis indica
aacataaataactgctaatttccaaattaactaagcgggctttacaattatagtatttataggctaggatctaggtatggatatacctgagacccgctatggtttgtgtgcaaacatggcccatcaatggagtaaattaatatattacattaactttgggcccacggactgaggtccaacctgtgttgttatgatctttcgtacaacgggagaccacttgatatcgacagatggcacgagtgtgtcacctttgcgcactgtagctgttagagtagtggttggcaataagtgcctcattacagattgccccatgtaaaggtttcccccaaagtgtgataagagcaatccctgcaccagacagctgattggtggatgatccatccacgtgtaattttcaaattcatatgatgtcaatgtcttcttctagaggggattctttctcgtgtttcctttctagctccatttttttaattttctattttcttgcattgcatttggttattaggtttgctaaggcttgaccttttatttttgtgcaaagctagaaggtaatttcatattgtcctatctcaattcctattgaagtagctggcaaggagcatctaccttttgtatgacttggtgtatgggctagtcagtatacacttggatattggatgagcttggaagtatgaccttagtatccttgagtgtaggagcacgcaataagttaattttttgatcaggggtatcgaattttagcatcaattaacattttgctaacagagtagtctgaaggttgggtactgttttcttctctgatttgtatggaacatactacaaatttggtcgcttcaaggtagatttccaatttttctccatctaggggtttggataaaataggcgactgtgtgggtaacttttttagcttttgaaaaatcttttacacactccttggtccattcaaattttttgcttcctcaaaggatgttgaagaaaggaacacattcatttgtcgactttgacacgaacctactctagaagggctttaattttctcaagatttgcttcgtttccctgagtattgacaataaatctaagaaatttacttgagtacccggaaggaacactttaaatgattgagtttcatgttatattttttggggactttaaagcatttgtctacgtcctctataaggcccctacctttatagatttgacaaacatgtcatccacatgtatttccatgttacatctaatctgctctttgttgattagcctttggtaggtagccctaacatttttgagtatgagtggagtatcttccactagttgctgtctatgctcttctggcccatactgcagcccgttagggatataaatgtctatttctctgtttggattctttatttttggagtgtcatcccttggttgttgtccagttatctaataagctcgctaaattgacaaggtcacctccctggactgattatcaatttttgtttgttaggctttcatgatttccatatgtttattcatcaactccttgaatcggcatttttgatgttcgaatgccattctcacagctgctcaagtatcctcttgatcatggtgcagagtgttggtgttcttacattttccctaaggcagctcacgaattttccagcatagtatcattaccaatcatcactcgaggttctccaacaggtggatttccaataccttggcaagtctatctggtatgagtactagtggttccaatttcctacgtggccagagtgaacccaactagaggggttgtcactccttgtcccaccaatgggggacctcatggaggttaaggaattgttggatcgggatatgtcctcactggatctctccgatttactagagtttgcacaataggatttgtaaccattggatcggttgtttcagtggtattacctctccttgtggtcaaaaccatcttcgtgagttttgaagagaattaaaacaacgatcgtgttcttttctatcaatgaaagaaccaaaatgttgacctctcttttagccaacaatgttgagtctttaaagcaattagagataatagaacttgataagaaaaataagaacatagatttattataaaggttcggccctgtgatggttgtaatagcatactccccttttacttgtattaacgtgtgagaaaagaaggaagaactcttgatctctcttgaaagcttatagagattttagtagcgtaagtgcttttttgaaaataacattttggatccctgaatagtgaaagggtctactatttacaaggagtaattatattcattaggtttcccaaaagaaataaagaataaaaagggaaattagttattttcataaattacattatttacgtgcataaatcctttgaaaatgggtatttaatttacgaatagaggaaagtatctttaaggctttctctattgcatttaccttgcttggtatacagaaagtggttgtgaaattgatgctagtcagatggtaccatttaccctgtgcgacacatttacattatttttcaaataagcagtatatgattgataatctacactagacgacataccaacaaaggtttctttcgtctagatttaaaaattctccacgtgtcactcagataagcgccacattaccctatgcaaattttaggatgacatatataaatttatatcaaagcaaaagtatatatatgtggctactgctactgttatccatgtttcaggatgaaggacatgcaataaaaattagatataaacctcccaaattagcagaaagattgctcccagacaagccttcgtccacgatttggaagccttactgctacttcgagtctcagagaagagtaacttacttattatgaagagagagttagatagcccaagcgacatttatacattttctatcacaggatcaaatcttgtccccaacatcagaccaagatagtgtgcacaactcacctatgaatataccctttttgcctgacgactttcttaggcatcttatcttcaaggtgccatattttggggacatgtgtcttgtaccaacagtggttcccattatacaattgcctcattgcatgaaaaagaactttcttggggccccaattgtcagtattttatttttattttactccaatagtggctttttcgcaaaaaccataaacgattcaatggtacatccatacccttagcctataaatacccccttatttgtagacatatcataaaaaagatagccgaagctattctaaactctctctaacctttcttcttcttcaagagaaaccaagagagtagagctagggttttcttgtaaacaccgctctaaaatattatacaagccttttaaggcgaatatacttactcgtggactaggactcattaacgcctaaaccactctttgtctagcatttattatttcttaagctctttataaattatattccaaaaatctatgtaaacatgttgatgctttcattgagaactcaggaaagatctaagccacggtgttgttgaaaccatggtggctacaaaaaataatcgcaatgaagatttctcaaggtagcctcgatgtcgtcatggaagatataaaccctctctctccagagcacaccatgccaagcaatgcaagagaaggggatacatctgaagccaaaactgagagggtaacttagacaagcatcataaacaaggtgaagaagatcgtgcatcgcagatgacaaggaggatgatgaaaaatatgtcgaggatggatactataaagttgggtattattatgaacaagacccataagtggtgtgagtgtccaaagagttgcatgaggcctaggaaaaattagctcatcaagagaagttttcttaaaagattgagagaacgatggctcgcctacaaaaaaaattcggagatctggaagagaaccttgaggaagatgcctcagtggaactcatcaacaaatacaatagggaaaatgctactaatccctaaaccttagctcctacaaaggacaagggaaagggaaaggttggtgacccttaaaactcgacagctcccataccaccttgaaaaatcgtaaatcacaccaacagaaccttacaggcatagaaggccaccgatgcctccaggcttggatgcccttctgctcttaaagatcacgtagcccaaaaaggaaatggtgcgaaagtacccaggcctaagggaaggaaaaaccaccccaatgattccattaaccaggacggtgggactgggtgatagtattttgatgacagtttgtccaccttagacctccaaagttgtcttgacgctaagtaccaaatagctaaaggaaaaaaggcgaggcgaggtggcaatgacctcaggaaccatttgaatgataagggtcgtgggcgcaaccttctagaaagtgacacaaagacgttaaaggagcagattcctgccttgactaaaaactgagtggggctctttcaaattcagatgatgaagatcttgagtcgtgtattaggcagatcgggaaagcctcattgttggagaacttcaagatgccttagatcgagctgtacgatagttgtacagacccaaaaacataccttttgaagtataacaaaatgatgcaagtggcaagagtgagtgatgatgctaagtgcttgtgtttctcactaacacttaccatgtgtgtagaaggtaggtggaaaaggctcactcctaaaaccattcatagttggaaagatttacaatatactttttggaagcagttcatagccacccgagactatgacatggaagttgggtcgataaccattgtcaaacagtaagtaggcaaaagcctaaagaacttgtaatgaccactttagtaatttggattactaaaggaaattaggactaatttttgttatttttttagaattatttatgaatttaattatctgtgggcctcattattagaaatgagcattagagttataatttctcaattgcggagattttattaaacttttggggtattatttgatatatatgtgaaatatgttatttttgtaatttttgct

SEQ ID NO: 298059 - DNA, 5517 bp, Cannabis indica
cattttttaaaatacaatttcaagaacaaaaaacaaagcttattttctctctctttttttttctttatctgttgtacatcaacccatgtcacgatgcttcgtaaattgcctatgaagaacaataactttttttttactatttacttttacgagctaaatggtagaaaataaagctgagtttcatgtgtttcagtagcactagagtgaagagtcactcgtcactgcatgggaagtaattttcaacttctacaaagaaaatctctttgagagaaaagggacccacaagctcgtatggtcctttctttcctttgaattaatacagctgtaagtaaccaagagaagaagaagaagaataagaaatttttactgaaaagggtattttggtccaaaattgaaatagtcatgtgattttatttaatgatgaacagcttctactatgagaaaagaaaaagaatgggagatttttagagagagagagagaaagagaaagagaaagagactaagtcaaaaaagaaagtttatttttaaatttttttaagttgggcaaacttaagtaaagcccataatattattctacaattattggtgtggggaccaaactcactcttcatatatggattttggtctttggtggcaagctgtttccctttgaaaacacatttctctttctctctcatgaaatcatcatcactactagcatgcatctactataccatctgtactctaccaaccttaaagtagagaaacaaaaagaggaaaaagaaattttgaaattttaaaaatcttaagtttattattaaatttcaaaaaataaataaaagaaagaaagaaagaaaaaagaccaccacatagacaatcttcacaaaatcaaagattttgtctcccaaattcaaaatcactcccaccttttgcctttttgccttttatcggttgagtttgagtgctccatcaaatttcaaccaaaaccatatataaataaataaataaaaaaaacccaataatgtctttctctccttacttccttctctactctttcttttatttttctttttttgaaagacttttatatatattggtaaaaattacataacttaactaatgtaggtgagtaggtctagcacaagtcataataaaaagcattatttaaaatatgcaaggctaggttgctacttttttttttccctcctcttcattcactacattttagcaatatgtccaaaagaaaaatatatccaattttaagacttggctaaagtaacatgtgtatatatagaaagaggagtgttattaaacttttattataattttttagttaaatttccgggtccaaaaaaaaaaggccaaattttttttcataatagtatttgttatacttatattattcttggagatttttaaaaaaaaaatctcataatttactgtgttgaaaatacgtttgaaattttttgaacgcgtgtcataaactagaatattaagaactttatttttgacattgtaaactattcaaaaaatttcaaatatttacaggaatgatactgtaactataacgaatatcgttatgaaaaaaaatattacgccatgtgatttcaaatgtaaacattaattaagagattataagagaaggttgtaattaacacataaaaaaactagaaagagagtgcaaaattatttgtttagggttttctgtctttggataggaaaagtgttaattttaatgggttcttgtatttgcatgtactgtatactttcatcgattacataaaataatatattagcatataacacgtgaataaagcaatataaacttttccttttattgctatcccaaaaaataaattaaaatgaaaagaagatgaaggttaaaaagaaaagcaaagagaacaaatgaaaggattaaggtgaagataccctatagaagaatctgctataagcatttcctttttaaaaaaattaaaaataaaaagaatccactgaaatgagcataatgaatctccactcataggagtggccaagggaatttaaactttatgtttgtacaaatggggtatcaccaactttcacattactttacctctgctctaatccaataagtagtacataattaaatttaattaatatgtataagtaaggattcatatttcttgtatggggatggctccgcggaagccgctcctaatggaacgagaattttccgtctaaataaagaatgggacaagaataggaattatttattttcccgaatgttaaataaggcgggaacagagatcacactaattatctcaaagggcatccgtttagtattttattttatatttctaataatattttataatttgtaatttatgtttgcattttttttatattattatcatttttataatttttaagttgtgttttgaataataattagtttattgaataattaatttgtaacattttaatttttatgtaatttaataaatttatatatagttaaatttttattaagggattccctgcctcctcgcttccaatatgattcttcgccccattctcgatgaaaaataagtgggggtagggatggggacggaagagcattttccgccaattcttcattccgtgtgcatccttaaggaaatcaatataagaaagttttaggaaaaataagtggctgagttgggatgagaatgaagcaagaaatgtcatgttttcctatctagcctataatttttatgtgtgctaattttaggctaattaggatatttatctctcatactttgatatgcactcttttgaacttttaaggtcgttaaaaattctatttgaattattgaaattattagatataagaatttttatctaactttagtaaagaaaatctaacatgaataaaaattaaggggcatgatttggtacatgtcaaaatttgaaaagcatgatttgatagatattaaagtctgggaagcataatttagtaacaattaccgaattactaaaattaaataaaattgtacaaaaatcattaaattcaacaatctcaataattcaagagaatttttaacgaacaacaaaattcaaaaaaacataatttattacatattaaaatttaaaagcaaaaatcttattaaatgagcaaatacacaaaccaactacgtattaaagaatgactattttttttaatgaaataaagaatgactatatactataataatttggacaaggacaagttttgaccccaaaatgtgtttggtaaatcatataataaaattttgcccacttaaaaagtcgtaaaagataataacaaattacaataacggcacactcattcttgtaaagactttgatatgatataaattgactatcgaggtattctgcccttaattatatattaatattattattattgttattattatcctgatttactgtgttttgaagccatgcttagcatcaaaaatgataaattaatccactaacagtttaaaaaaaattgaattagatgcttccaaatatatttgaccatgcacagctaatgccatgtgaaaatcacatgcataacaaaattagcatttcacccttcgagatgataagatgataactccaccttccaaaaataaataaaaaatcttccataaaaaaatacaaatagttatgtactttttttttggaagcttactttgaaatagttatgcaaatattgaacagagaaaaaagttaaagaaagtacttactgaattaacaagagctaggtaaggatttaaaagtgaaactaaaaggatttttttttttttttgtttgagtattgcacaatattattacaatttacagtttagggtttgaactcatatttttttcttttttcctgctagccttagtggcttataactaaaaggatatagattatttagagtatctctaatggagatgcaaataaatacgaataaaaagttaaaatataactcatttaacaaaaaatagacttgatgggtttgagcttcgcgaagagtagacttggcctcatctacagccttttggtcatgttcccttagcgccttctccaccaagattttgtcactaagtacctctccttgctcctcaacctccttgagcttcttgagcacctcagtaataccaccttgagccacaacaacatatccttgatctattaaagtctttgatagggggctgacttcagtaacaataatttgtttattttgaacaccacagttagcaaaataaagtaacaagtaaacaagtagcaagatgtacaaggactcaccgagattagaactacactcatgttatgaatctggtagatcgggttggatgaggcacaggcagcaaatcttttggtaggaagttggactaagtcaaagacaaactagctcatcatttctgatgcaaagggagccaaggaagactccaagaagttggagaatcagtctgtcatgggatccaagttcaagtcccatacctggccagtgtactcccctcaaagaggaccatttggatgtccatgaaccatgtcctcaaagccttcactttggcatttcccttagctttctcatcaacaacaaagttgtgcttggctatctggagctgcaagtgagcttcatcaagtggacaggagttaaagggatggacaagacacgcaaaaaaacagttgcttaagaagggattcctggatcatcagtactctcaaaaagcatcctggatgacttgaatttctttgaggatccagagacaacagccatgtcctttcgcttgtgttccagtggggttgcttcttccttatctatgtagaccacccccgagttggagaaagcatctttttggggtcctttgggagtaacgatgaacctcgagaagtctgttcatggaagagtgccgccacctctaggattatgcaaagcatccagcatggcaaaaaaattgtccatgggtttaatgtaggcaaaaagaaacatgagaaacgcacacgtgataaaatcaaaggataaaataaactggaagagctaattttacctttatggcctaattcttccctaacaaattcataaattatattaacatgagaaacgcacacgtgataaaatccaaggataaaataaattggaagagctaattttacctttatggcctaattcttccctaacaaattcataaattatattggtggtgtcattatttcctaaaaagctatctgaagggaggaaccaactaaaagtaatgaaggaagaatggtctaggagaattgggaccagagggcctaacctcatctaggacctacccataaaatctccaatattcaaaaaatacaactctttttccctatatccccaccaaaagtgaggaatctataacctaaacaacctcttgacaaagccaattggtctagcccagacatagtcctaagctaaaggaacataactaaaagataaaggggatatattggcgccatgtaacgtccccgcttcaagcctccattgggtccttactacccacggaatgaatgactcttatatacgagtacgtcac

SEQ ID NO: 298060 - DNA, 1531 bp, Cannabis indica
aagatctgaaaagagttaggttaatttttataatctgtcattcacattgagaaagagaatagtaattagcattaacaattgggttattaaatcaacatgattcttttccctaatttctcatccttgattaaatacatttttattgcttaattttattttattgtatttcttaatctttattgtcacaaaaattattgtttgcatgtggtattcagttcaattccatgtgggatcgaccttacatgtgtgagtactacttgattacgtgcacttgcgtagttaaatatatttttcgtaacatgtagcactattgtcgcagaacaaaagagtaggaagagagatattgatctaaaagtctttgagtattgtgatgatccatgtgagttcacatgttgcttcagcagaggatcgaaaaacagtttgttgcttctttgatttccatgagatgagggagcgtcctaagaaaacacaataaccagagaggcaagcaccccgatctgcatcagcaaaggcttgtaaggataattttgttggagttattgcatgaaagaacaagccttggtcgagggaatctttcaagtactgcaggattctacaggcaacatctaagtgtggttgtcgaggtgtttgaatgtactgcatgagcttgttgacagcataactaatgtcaagcattgtgattgtatagtaggtaagcttgccaatgaggcttctgtattgtgttggatcactgagaagtgtgcccgaatctttgtggagttttaggttaggttccattggtgttgaggcaagtttggtgcctaggtggccagactcttgtaggagttgaagtgtaagaggtctatgagaaacttagatgccttttttacatcgagctatttccagtccaagaaaaaatcttaagatgccaaggtcctttaatttgaactgagcatcaagagactttttaaatagtgttagttcattcaaatcgttagtggcaactataatgtcatcgacataaataagtaaggcaagaaaattgtctatttgtgtctaaattttaatatcttttatagtaattcaatctcatatatgttaaatgttaagtttttcttttaaatactatattttttcctattaagtttccttatcatatttatctaaattaactttatttttctcatatctatagaattatcccattatccctatagtatacgatgtaaaaaaaaataagtgggctgatctacctaacccaatcaaacctaaagttgacaagtctagttttaattgggtttaaggttcaattggtttaagttgaactgtaaaatgagcgggtcaactatgttgggttggattgaaaatataaaataatacagtccaatctaatccaatgtaaactaggggtgggcattcgatccaatccaatctttttttcttcatcggatccaatccaattacttagatatccaattacacacctaaatttcaatattagcttaaaaatataaagaaaaatacgtaaaaaactaagtatcactttttattt

SEQ ID NO: 298061 - DNA, 1709 bp, Cannabis indica
ctcttgagtcgtcttgggaagtaggggagattcttcattaatgctttcttgctcgagaacatcttgagaaatagcaagggattcatcatcaatgtctccttgctcgagctcactttaggcaatagaagaggaatctattttagtggaagcattcgatgttgattcttcttcaccttcctgatcagtgtccatttgtgattcaaggagaggataaatagtgtattcagttgctttcgcttgagcaactctactgaccttcttaacggtgtcttcgagcttgatgaaactatcaactatatctaaaatcttgaacagtgtctactgacttgagttttaagtctctccagagtggactcaaaattgctagtccagttatcattgccatgaccttagtttcttcactgagtgttattgtctgcgtggtttcctctaagaatcgtttcatgtaatcatatagaggttcgtcttcttgctacttgatgcagattaaatcattgggcttgattagtctgtgccttgatggggagaattggttatagaatgcttacttaagtgtctcccaagaatcggcagatcccaaggaaagcttgagataccactattgtgttgcttttgatagtgtgggtggaaagattcaacaacgagaattgtcttaaatgccttgcaggtcattttatacttcgaagttgtgtatgtgagagagagggtcttctttaccagtctacagatgtcacattggatttttaaatttagagaggatcttcaaagccttgattcgctcggagagaggtgaacttcgctcccattatagctcaaactcaattggctttggagttgcgatgctttttactaagtcagcatgagtatcaaattcagccctgcagacatcacatgtggtgatgtacgtatcaactggttgtttcttattggtgttactttgcaagttctttttccttttgaatcgatcaaagatgttgatcgattcgagccttggggttagttcctggttgtgttaccttgctagcagctgtggggatttatcccgtatgacaatagagtcatctctcgagcatttacttcatgagcttctactcgtagtactatattgactatttcctttaaaatagtcttccttagagtgacatgtgtggaggtaattgaaatgattgttcaagtttaacatgtctccatgcacccacaagaagtattcgtaatgttggatgttaggaccttgggcgacatcaagcacttcgttcatcacagaaatgtttccaagtgtagagtagttcactgaccctcaccctccaagtatcatactcttcacttttgtgatagagcttttgggttcttcccctaaggctgactataggtccctttccctttacaaggtcacgaggtggcctaaagtcattagatttgtgaaaagaatcctgtagaggagattggtttcccaccttgttagaactgcttccaccagagttgcaattggtcctatcagctgcatgtagtggacctataggtctatgatctcgatcgagtctgagtacttttggatgctcactcgtcacttggttccttagcaggtgacctatagatccacgttgttgagtctgagtcctttcagacactcgctcaaaatttactttcctatggagaatctcattgttggaattattttaccaggatcttagatctagtcacaagtatgt

SEQ ID NO: 298062 - DNA, 4913 bp, Cannabis indica
aaacaaaaataatgtacaacattcatggatggttgaccagtaaatcaacaaaattgccactacagcaaccaaattttcataaaggcatatatatttgccaaaagatgcaaataatcaaattgaaatttatgaaagaaaaaaaacaacatagttcaatataagacagagaagatactaactaaactcatttggtgtgattttaattaaaaaaaaaaaaaaaaaaaaaaaaaaaaaaaaacctaacaagtactacagaaggatggtcaagcatgcattacccgtacgatcataaaaataacactcaagagttgaacaaagctttcagatgacaggctcctcaacttgcttgcaagcgatgcaccagtgcctgtcaaaaaacaggttaaaagttaatataaaaagtaaagccaaaaaagaatcaaagtttggaattactactttgtaaataaaaaacaagtagtatcatttatcttaagaagcacttattagaaaatacatattggatagcgaaatttgtgaatttctcaccatccgcatcaactgttcgctctccaggggccagctctgactccagaggacgagaaacaagaacaggtagcagctctgccactgcattcttaattgcagctttcatatcagcagtaagtgtgtcacggtacaacctcaaaacagcagggagctgagcctgaaaggaaacagtatagcttatagagttcagcattctactccaccgcttagaagtcgaaacaaatcccaaccaaaaaaaagttaatctacttcaatcaaaacaaataaataaataataataatccacaatatgatgcaaggctccaagttttttttttggtaaagtaaaaaaggatatcccagaatctccatccatgatcacttatctgcattttgtggcactacagataattccattgtactataactatataagtttccacccaagtatagctcatgcaaagatgcaaaacaagctactcacagttctgagcaatccgatgatgacagggagaagacgatcttgaaaattagaggtttcttcctcattcaatttcacctgccaataattttagaatgtaatcagttcatgcgaaaagcatgcctttcagacttctgaaagtcaaaaataggtgaatgacacaaggtgagataaaaggacccacatgcacaatctaattcaagtatagatgaataagagcatgtcaaaacaaggaaacttagaaagcaaaaaacactaatattacaatttcaaatgatcaatggttgacaagacattaaaacaaatccagaatgcatttcattttaaaatgaattctcaaaagtcagttaaacaagctaattcagtgacaatttgcagcaaataagttatagtgttatacagcactgtaaagtggcattcagttaaagttgataatcctcaaaatacaaaagtcacagtaatggctgatatatttccaatgatttcaaggggttaagagagaaaaagaaaataagaagattacgttccacatgatagatccaaccaattttttcaatgggaacgaagtgaaaaccataggatattcatgaaaaatctaagttataataactgtaataaaagaagtaagaaagaaagggatataaagatctaaatcttacttcagcatcttttccatttgcagaaattgatgcccttgctttagcctctgataagataccaaagtctttttccccggcatcatgtattgaagcacgcaaaaattctgctgaaagaatgctacaaaacaaatttaatatgttatcatatattttttttaccagttaaaaaatacataaatactccattttgtatcttcaaatgagagtcctcgtttcgttttcatttttttttctttttttgtattttcaagttacaaaagaaatccttaaaaagatgtgaatttcatttaaaaaaattgtgaatggtaacatgtattatattaatgacgaagctaagtcattacagaaaagtagtacctgtttatagattctattgctgctcctacatgatcccgaaggtgacgaaaacaatgtaaaccagtaagctcatccccttcctgttaaatagaaggaaaacatgtgaactaagaaggccattacaaaaagacagaaatatgcaaaggaggcatgcataattattaaagcatttctaagattgttgattagtacatgaattcaatgtaaacgcatcaccattatttcatttagaagattttactgtttcatatctggaacaatcatagcctactcattgttaagacacagttacaaaaccagaaactttggcttctttcaacatttctctacagaaacattcaagacggtataaccattacccactcaaattaagaatttcatttcttatttttgaagccacttttaatgcataactaacaacggaaatacttccaatgaagccagcaatgctaaataactaacaatggaaatacattctaaggaggacagcaatgctataaaatatgtcaagtcgccagtcggtatttaattgagttagagaaatgcgtgaaaagtaccagtaattgctgcaaatcatcagtcacgtccagggctcctgcacaatctgtagatgcaacaagctgtagaacagaaaaatagaacttatttcaacggaatttcagctttaaatcccaggacaccataatttacatgaaaaatcagaacataaatgaacaatttaaatagaactatggcttaatattctgagaggtatagttgcagaaaagtaatagaccaatcgtcatacataaagaacatccctggatattctcacaatcactcaacctcacatattttagaaagtatatcatatttcctagccactaaagtagcatccaatagattgttactccattgataagttattaggaagaattgaataagccaaatatttgtagatgacgaggagcttcaactacaaatggatgacctataactttagtgagaaagatctgtacagatcaaacacaaccaccctcgtttacaattttgtcacgtcgagcaacaagtcctaaagtactctagtttagcatcttacttttcttctcagcttttagaaatatgtgtcttaattgtcactatattgtaagttcttcactttcgtgcaattagattacgaaatcgtaaagaagataataagaggtaccaatttaagagcggaaagagcttggttgacgtataatataagcctaagcttctgctgaagagccaagagattgcttctggtggcattgaactcgtgaatttgcgaggcggactcaaccaaatccacatccaaaagcctaatggtctctttcaactcccgtatccgactacaaccttccacgatcttcacattcaagtcctgcaattggccttgagcctcgaagaatgaattggagcgcagcgagatctccttcaccaaatgaagctcgaccacgtccaagtaatgtgaaagcttctcttgtagcatcagattctccgacatgttagagaacgggcaagccgagcggaacgtggcgccttcctccaacgcaaaatcctctttgaaatacaatgccggaacttctctcaagcaagcaacaagcgcctcaccttggccgccaataccatccaaatccaaactctccttgctcgaatgattccgtatgtcttcgaaacgatggtatggttcagagatcgacgcaacgtagggctggaaatcggatcgagaaacatcggaggaagctttagaggagagaggagtgaactcgggaggtgcaacggaggtggaagaagaataccaccagccgatccaagaggccgattcggaagcattgggattgttaagaatggaggaaaggctctggctggtgctagtgttggcagatgaggcattagcatcggagttagatctacttggaggcttggtcggggaccttcctgatagggaaggctgcgactccattctcaataacatcttccatgaatcgacatagatggcggttcctccttcgaaagagaaattatctgagtcgacccggaagaaaaaaggttccgagttatgacagagttaattaaacctcagtaatgattgatatattggattggttatgaagaaatgaaggaaaagaagaaaatttttgaattatggatcggtggtattatggtaatttaatgggagttggatctgaattctcaactgggatagctttcagtcagggctgctgggctgtagaagaaagaagggtgataatgccggtactgatgaccgaaatagtacatcaagaaaacgggctgacccgaattatttatttatttgtatatgtaaattaaaaattatatttgtttctgaatttttctaaataacacaatttaatttattttaggaaatatgaaggacaaatttgatgaaatcatttttaaacaaatttatttaggattgaaaattattaatgacctaaaaaaatgtggcttatacaatttcatttcacaataacctttataataacaaaatttagaatataaataaataataaaattccacccaaaaagccatagacaagtaacaaacttaagtttatttctccaattatggcgtagtaaagaaaaatcatgtcttttatagctacaaattgctacttcttttctcttgtgcatatcaaaatctcttagtcatatatgcatagtttagtagttctactctcctccttcaagaaagtttctaagttcgaatcttccttctccaaagccaaccaaagaaaaattctcattgaaacattcggacactttacatacatgtaaatggtagtgatgagtggaaccgagttctttaaagttaacaataacatgtaggggtgttcatctgatctaatctacattattttgctcatagtgtatccgatctgcac

SEQ ID NO: 298063 - DNA, 4837 bp, Cannabis indica
gcgttgaacagaggtcatatgtcacaatcacataaattggataaacaacttgctaaaatcttttcagggaccagaactcaaaactaaaagttttcatatcgataaatagcatagcaataacctaaatatcgagaaaatacaaaataacgagactttggaaaaattatcaatgaaaatggctgaccgttttggaaaaatggtagaccatttttctaggtttctgccagtaataacggtagaccatttacataggaatggtctgccattttctactgtagattaacataaagtctccaaacaactacaaatcttttaaaactttctagaatacctaaaagatatccaataaacataatccaataaataaaataaaaaataaccccaaaatgtaaaattcacctttgttgagccaagtttgagtttttgaactcaaacttgctcaacaactcaacaaaccaacaaaattaactcaaataaactacaatccacttaaaattaagccagaaaactaatcacaaactcaaatggtttggacagaacctcaatccaatatttgcatgcttgaacctagtaaaaaggatttgaaaacttaagaaaaaagcactaagccttaccttaggattgcaccagcaatttcccgttgattccttggtaaaaatcacatagaaaagggaaagaatctattgggttttttggttctttctacaactaaaagggaaagagagagcttctaagagaaggggatcaaaactccaaatttttacatgccaaagcaacctcgagacgtcgaaataatcttatacagaagctgaaaaataatgatggataggggttagttgggaagacgatttaccaactgtggtgactgattattttcagcaagtttttggttatgaagatgttgaatttggtgatgtgcttcactgcctacaaccgagaattactgaggagcagaatgttttgttgatggaaagtgttactgctgaggagattaaaaaagctctattccaaatgcatcctcataagtccccaggccccgatggtatgactccgggtttctaccagaaattttggcatattgtgggagatgatattgttaacttggtaagatcttttttcaataatgggactctccctcgtgatcttaataatacaaatattgtcttgatcccaaagaaaaaggttctcgagctaatgattgatctccggccgatttccttgtttgctaatagtatttgaaacttgtttttgcctgatgttatatcatccactcaaagtgcttttcttcctggccgattgaactctgataatataatggtatcttttgagattatgcattacttgaaaaggaaaggtgggtaaggatggttttatggacactctaaactacgacatgagcaaggcgttatgattgtgttggttgggctttcttggaaagctatgatgattagaatgggtttttgccgcaaaatagtctcccttattatgtgttgtgtgtcaacggttacttataatgttacgtagggagggaagattatgggacctatttatcctgggagaggtgttaggcaaggagatccactatccccctacctatttttggtgtgtgctgagggactttcttctctattgcaataatatgaacgtaatcgttggttgactggctgccaagttgctagaggagctcctcgtgtttctcatatgctatttgctgacgatagctatgtgtactgtaaaactaatgaggatgaagctgcaatattgttacaactcctacaagtgtatcaacgagcttctggtcagcaggtgaattatgctaagtcttccatctttttcagtaataatactagtgtcgatactaggcaaagaatgtgtaagatgttagggatggttgaggctttggataatagtttttacttgggtttgccatgtattatgggaagaaataaaaatactatcttgggcttccttaaagacaaaatgcaaaagaaaatcttttcttgggaaagtcgtttttgtcaaaggcgggtaaggaagttttgcttaagtcagttgctcaagcattgccttcctctgttatgagtgtgttcttgttgacaaaagaaatttgttctaaccttgaggggttgatatccaaattttggtggaaatctcatgcaaactcttctagtaagggtgtaagttggatgagttggaagaggctttgtcgacacaaatatgatggtggtattggctttcgggatcttcataattataatttagcttttcttggtaaataagggtggaggttgctgaataatgaaaattccttggttggtagaatttacaaagcaagatattaccccttgggtacatatcttactgctagtcttggaccaaatcccagttttatttggagaagtttttttgaagctgaagatctggttatagccggtgcaagaaaagctgttggagatggcacttcggtgaatatccttcaagtcttgtggctccctgatcaacataacccttttgttatttccaaccatcctgctttggagggacaaatggtggggtgtttgtttccggtggggttgagaagatgggatgcagatgtggttaatgatctctttgaggagagagataggcagttggtattgtctattcagttgagtgatagggtggagagggattcatggtactggaacaaagaaaattctgggttgtacactagaaaaagttcttatcttttttttttttgcaaaattctgcagaattggaaccggttgcacatcatggttacaagcaaatgtggcagctcgatatacctccaaaagtgaagcattttctttggtgtgcaatatctggttgtcttcctataaaggtacaattgaatacaaaacatgtgaatgttgatgtcatgtgtcccttttgcaatcaagcagccgaaactatttgtcatgtgttgctcgattgtggattcagccgtgcatgctggaatgtttctagtgttgatatgggtgctgcagtttgcaagactttggcacttggttcttcaatttcaattctttgcaacctattgataatgttagagaggcggctatggtgggatggaaaatttgggcagttcggaatgatcttctttggaatgaaaaagcttgttctgctagtgaagtagtgcggtcggctagagtggttcttgaccaatggaagagtgctcaattacaaaaaattggtgcattgttaatagatgatattaataatgttagtgagctttggaggaaaccattgatgaatacggtcaagattaatattgacggtgctatctttcaagaggaaaacaagtttggttttggcattgtcgcccaagatcatacttgccaccttattgaagttatttctgtgagccgttttggagtagtacaaccaggagtagctgagatatttgggattaaggaagcgttgagttggattaaaagaaagcaatggcctaatgttgtggtggaaactgatgccttagttgttgtgcaagctataaaaagttcagttaatatgccatctcaatttggaatgcttgtgtgtgattgtcgagatttattgtcctgtttaaacaatgtttctttatgttttttaaaatgatctgcgaataaggtcgttcattgtgttgcgagaggttcttgttctttgtcagattgtactttcagtgagcatgatgctcctattgctttaaagtctattgtttctgctgaaagttattaaataactttgattcaaaaaaaaaaaaaagaggaaagagagagcttaagtgataaacttgatttttggttatttctaatttaagatgaataaagagtttttattttattttcttaacttaaaataattagagataatcaaccaagggattatcatttattccactaaaagacaaacctaaggtcttagacaacattcccactttacacttacttcaatcttaagttaacttgagacttagggataaaatgattcaaaaactataatcatgcctaatatcgatatttctaatatcacatacgattatctcgctaaataaaaggtttcaaactaactcatgtgactttaatgactatcgtcgcattttctatcgttgccgaacaaaaattataaaaataataaatttcacatatggcatatacaatacacttagagtttgataaaatctccggagttgagaattataaccctaataccaattttcttaaaaatagggcccacaatatatatattcatatacaatcataaaataaaagtagtcaatgttaattatcctactaatccatattcgaatcatgcggtcattacacagtagatcaatatgaagagttatatgttaaggagatagtatgcctacatggggctttgaagtccattatttcggatagggatccaaggttcacctctaagttttgggaaagtctccaaagggccatgggtacaaaggtgaagttcagtacagctttccacccttagacggatggccagttcgaaagaacaattcagatattagaggatatactgcaggcatgtgtgtgatagatctaaaggttcgtggagtaagtatctacccttggtagagttttcatatgataacaactattagagtacgataggggtgactccctatgagttattttatagtaggaagtatcattctccaattcattgggatgagaccggagaaaagaaatattcatgtccaaaatcaattcagcgaaccacggggctatagagaaatcaaggctaagatgcttacttcacaaagtaggcagaaaagttatgcagatccgaagtgaagaaacatagaattttaggtagg

SEQ ID NO: 298064 - DNA, 1819 bp, Cannabis indica
tgaattattggcagttcattacatttgggtttgcttgtacaccattgtactttgtgtgggagaaagttataggaatgcatgacacaaaaagtatatgcttaagggcacttgctagattaccagtggtgataccaatatggttcttggccattatattccctttctttgggcccattaactcagctgttggggctcttttagtcagtttcacagtctacatcattccttctttagcccatatgctcactttcagatctgcttctgctagacaggtaaataatccccaccattctcttccttattcttatcttcatttctaccctattatatattattccttttgatattgaccaactagcttcgtctagctactacaccatgaccttctctgttttggattaaaccaaaaccttattaataattttggttagccccttgaacaccaactgttttaacagtctattattaacacttatattgtctttggatctgattttaccccaccagtcctataaaagttgatattgatttgaacttaattgccctttgcccacaccacacagcaatgagattggtggacttccttgtcatttctgtgtatgatatcttaaacatttcaacttgtcaagtaataaaagccatatcttaagaactatctagctgggacccaagcttgatctcagagttgacacttgaccctactcatcacaaatatcaaatcatgaagtactatacatgtatatacacatttaatatctttattcagcatgtatttatgtagttctttcatcaattaatatttttgttttctacctgttcgacagaatgccgctgagaagctgccctttttcctaccaagctggacagcagtgtacttgttcaacgcatttgtagttgtttgggttttcgttgttgggtttggattcggcgggtgggctagcatgactaacttcatcaagcaagttgacacattcgggctattcgccaagtgctaccagtgtgcaccgaaaggcccgcccccaccgcgccccgccccagcacatcactgagtaaactgatctctcttttcttttgtattatagacaaaagagtttgaaatcaggcatgctcatcataataatctacttggtgtttagtgctgctctagttcttctcttatcttttaatgcactctttatatatagaatactacttgttttagttggtataattggtttttctctttctgcttaaaatcaaaggtaacgtgtatctgtattctcagctccaatcatgttccagagctgttataggccattattagttagcatctttataccaaatcttagttgcaaagtttccaaatatgtagatgttttaagatctggtaaattgttattatttgaaatctaatataaatataaagattgtgccaacgaattttcgaaaagggcatcttagattctaaaaggactactttggaggcaagttgagagagcatctgattcacatgggctagtgcatttggtgtcactagtgtcactagtgtctgtctagtctactaacgaaaatatttgcttcacgaacaaaattctttagtattacaattaatttaaaactaaatcgtcatccttttagtaattgtttttgtttattccaaaagaacagaagaaatgacttaagtatttgattactctctcagttagttcacaaacgatttgatgctcttagttgaactttcaaacacagagaaagaactaaaagaaacacaatagagattttgagtgaatgattttcattgatacaaagagaaccagcaaaggaggtatatatagtacct

SEQ ID NO: 298065 - DNA, 2849 bp, Cannabis indica
gtgcccaataacattactcttaaataaaaactagctaaattaagcaaacactacgatggaaacaacacaactcaaaaatagaatttttaaaagcccaattaacgaggtgatcaacatcactattactattgtgaatttcgattaaccaagagacatgggaatggggaagcaattccaaagcatcaaaaagaagaataaaaacataactaatcttctaagaagggatctttttattactaccaattgcctcagccaaaatgttgcaatctgtcatgaagacaagattgttccagccccgcaatctacaaaaagcaaaaaatatgaagtaaagctagagtttcagccttaagcacagctgaactctcaaagcttccacgatagaaccatcaggactctgtcgagtgataaccgcacctgcactacattagtaaaaaaaaattaactcctccacatgtagtaattggaggaggaggacaaatgccgctattgccactagcctcagaattccccaactcaaaagctctagccatatcctccatcctattaaaaacaacgattcgaatgctgttacactgttgggattgaactcacttaacccctgttagttatatcagctggctttgtcactaacttaaaaagaaattcaccaacacctataaatacatgtgcctctactctctcaagacagctccaaagtttatacttgagacagagagagagtctaagatcatagtgtatgtggagggatgtaatgagagtattatttttgaagtgatttctctcaatgtgagatatttttttataattgtttactgtgttaaattgtaatcttgaacatacctcattgtgtacttctaactattcttaatcaataaagatttatgattcatccattctcgagctaagtctatttttatctaagtttaattttgattttgtgattgattctaatttgaattgtgtgttcttaaacataactactgttgtaacaatattattttgaagattatctttcaccatagacaccatgaaaatagcgtataaaagcctataatatataattgcatagttattattagatatgtaataagaaattagaattttagttcgattgggagattaacaatgtcttgaagaatgcatttagagatttaattgtcttgtcttgaagaggaccaattacctaatattggtattttcattaagaacatttaagcaaccattccaaaattcttgtgatagaccctattgcaagcattccaaagttctaagcacaaacaacaagtaaaaaacatgatctaaatctatctatagttaggctatgtgaaagaaatactacaataaaatgtacttttcacaacaaaatatgtatgacattttctttttaatgtcatgaaagtcctcaaaacttttgtttccatatctcacattctcttgctttaatttcctccatctcaaaaagaacaccagcctcaagctaaagagactcttgggttggaatcctaccctgaacatctatcaagaaatgattaagcaagctcaacttctcaagacagtatccaagcttattctatttagccaaacatttttgagtgtgagctagtcgaaacattaactaaaagtcaagactcctgggcctcgatacgccacacttctttgaccacctctttacagctcgtatccttaaaccaagcctccaaataatggaacaggagtttgataacaatctcattcttgcaacaaatcaagcactgagaaagcatgattagaatccttaatggctagagaacaaaaccccaactttataaaaagtaatcacccactctaggtcactcatagggcttgccctaagtaatttttgagcccttactataaagataaatggtattttttaaaattaataaaaaatatgtatattttttaaaagatatttttttatttgggcccctaaaatgagtgggccctaggcacacgggcctagcccgcctatgcccagggccaggcctggtcactcaccacactttagttgctctttaattaagtgttcaatgtctctcccattggaccaagtgaagaaataactgatgcaacccaaatcaacaccacccgtaactgatagaatatcccttgaaaggacatagttagaattctcaactaagtttccaccaaattttttaggttattccaaaatcagatttaaatcatcaatcaccgtccacggatagccacaatctcaagagcaaaattattccaaaactcaacccttttagtacgaacatgaagacaataagcaaataaaatcgtccaaagaggaccattgagaacattactataaccactgagataataaaagggaaaaacgataagacctgaatattagcaccaaccatagttgcactcacaaaattcatttgttgccaaaccaaatccatcctctaaatgttaagcttggtctccgtaaaaaatagaacatttgaatttcctgattaactaaagctctaaaatccttttggcttgaagactttcgagtcctcagtatttccacggtagaagaatcatggagagagacacacactctctaaaagagcctacaaataaggagaaacccattgaaagtgcaagctcacagacagagcacaacctctaaaaggcaaccagagacacacgagttgtgagagagaacccaagagcaactcgggcctaaataaacttctatgagcaaacaaacacctagtaacaagcaggggcaagccaaaactctcacgaatccaacccctagcagatacaaagtaatcgataataacaactagagatggaaatttatatcgcggggatgggtaaccgcgggg

SEQ ID NO: 298066 - DNA, 1436 bp, Cannabis indica
cttttccggattattctactttctatttagaattttacagttgtgggatttattcttgtttcctcctttatgcagttcccatttttctgcagcgatcgagaatatatcattggccgaagaatatgggaggccggaaaatcttactactgtgtgactaaggtatgattttgcatctctttctgggtttgagacccctttgaggaagagagtttggggcaatataatttttatttcaaactctgaatgattcaaatgtgtctaattagaacccttgaccttgttactggattttagagattattttgtatgtttaattagatattgtacatttccaaatacacaaacaataggtcttactgtctgagactctgaactgcattattttcagggtgtctcgtacccaggcttacacaagcgtgacaagcctagacgtgtggagctttatttttcaagctggcttattagagctggtaagaattgttgaattaacaatttaatttttggctacatattttgatgcaatcaactatcaagaatggtttaatagtgttttaaaattctcaaaacgttgaaaccaattgcagtggaatctcgtaaaggagacgggcagctgactgcttgtgaggtgaccctcatacactacgaggacatgggtatccccaaagatgtggctaagttaggtgttcgtcacggtatgtggggtgcggtaaagaaattgcactcgggtgtgagggcataccagaacatgaggaaagtggacgcttcgttgtctcgaagtgcgattatggccaacataacaacaaagataccttgtgatggaagcatggagtcattggggccagctgcaggtgaacctgggtgcggaaagagacagaaagatcacggacttgattggaaatggctaattgtaggaggaactgtggctgtggtttgtggactacactctggtttaggaaaagctttattacttggtgcaggtcagagattggctcggagatgatgtaatgattatttggaaaagtctgatcatttttagttgaaatttgaaagtgtgttataattactaaatgagttaatgtgcactgcacacgggcgtagactcactcaagtcttggtatatctagtgtaatataatattgttatagaagaacacaagtgcaatcatgataacttacgttccgccctgtttaaccatggaggaacaatagaattctatatgaatttctgccttaaaatccataaaaaaatgtatctgcctcactttaaatacatttcagttatgtattaaagagaaatactaaaaggcaccagtggtgtctaacaccctcttatgtgttaataatatatcgctattggtccaactaagtatcaagtcttatataatttaatataatagcttttagggagtatcgttaaccaatcgcaacgcggcatgt

SEQ ID NO: 298067 - DNA, 6247 bp, Cannabis indica
attagcgttaattattgattattcgtataaatatttatgtaatttagtttagttgtgggtcccagttttttttagaaatgggcattagagttgtaatttctcaattctaaatattttattaaactctagatgtattattcgtattatatatcaattatgcttttttttgttatagtttttgcttgacaacgacggaaaatgcaattgatggccatttgagtcacatgggcaagtctagaacatttttccttagttggataaatatttgagatagataggatatccggtttgagtggggttgtggcttttgaccattttacccctagatttacctttacctattttgaaggaccaagggcattttggatatttccatttttggaattaggttgcactatactaggatggcggctggccatattcttttattcagcaaggtttaatgttgaatttaggattttgaagaaaatcaaataattaaaagaaaagcaatgtttatctcttttctcctcccctctctcttcaaaccaaaccaacacctagggtttggtctttgagcttttcactttagctggattcaagggctcttcttgtgtgggaaaattcagttgtagcttgaggtaaagcctaaacctttttatttcaagttttcttgagttgtaagtttgattttagtatgtattgttgtggattactggctgctagggtttgaatggtttgtgattctgtttctaagttgttattgagttgcaattgagttgtaatagctggtttagatgagttttgtttgaaatgatcaagtttgagtttaaaaactcaaacttgagtcattaatggcactttctttttgggtgtaattctggattttctttcttggaatatattgtttgaggtttttataggtgttctagaaagattggtaaagtttggatacgtgttgggcatgaatttgaacttgtttgggttacctggtgcaaatcggttaaccggttgtatcggccctgtaaatctgtttaactggatcagaaacgggtttccaaaattttttgtgttcttgattcgtgttatttctcgtgccttagttatttccttgatacttagggtattggggtattagttagtaatggcagaaccctttgttggagtttgagtttcccggattagggttttggcgtgttatttacccggttatgtaaatgtggcatagggcatccatccagtactaaggtttctgttctggtcggccaactcatttgaattcggaaattagttaagaatagtatagaacgttttgtatatgctaatgtatgtatgtatgttatatatacatgttttgttgtgattgtatatgatttgggtgatatcatagcagcacaaccattgtgttagttcagcagtacagtcatcgtacaggttaagagtggtactcaccccacaaagtattaattggcgctatcatagcgggacaaccattgtgtcggttcagcagtataggtatcgtactagttaaaaatgatatcatggcaaaattatacttttaggtattattgatgctatcattgcggtgcgaacatagtgtcggtctcgcaatgtgatcatagtgctggtagtgggtgatatcatggtcagtagtaccaattgttaagaacaatcttaagtcatctggtaagccttgtggatgggtgtatgggtgcctaaacacaagtcgtgattatatgatttgatatatgcttttcttactcagtgtgttgactcacggatgttactttcatgtgtaggtaaaggtaaggcaaaggctgaataggagtgagctctagtcttcgatgaagattgtacatgtcaaggcgacgcgagctagagagttcagtctcgagacatctgggttttattttgtagtcgctgcgcgaccaattataaatatattttaataatattataaaagtttaaatatgggatcctggcttttgcaaataaatgtatgaaattttataacattcagcaattaaatcaaaagttttaatttctcacgattttcaagaaaacccctttgatttgtaaaggtggcactgtaattagaaaatcactgttgtgcaactaagtatcagggcgttacaattttggtatcaaagctgacaggtttgtccaccgaagatcgtaaagacatgtataatcataatcagagaaaagcttggctcatggttctgtaagcctttacttgtttagtaagattgcaaattgggtcgttgcctgaccagactgacttacgaatcgacaggtttgtcctataaaattgacacctggtgaaatgtggagagtcagaacaatgtggtcagggctagtaacagttggagagaatggaatctaagctgttcccataactgaggtgaaagccattggagggctattggtgggagttatgattatccgccacagactctgctagatttggagcaaaggtttgtagatatggaagctataattaaacaggatgaagaggaaattcagaggttcaaacaacaaagatctcctatggtacctttaccttatatactaaaagtttttaatccagtattaccagtggagcagagtatggctagtaaccaagtgaaactattaccagggggaaattggatgcaagaatctccagcctttcaaggagattcagaggtgaaggacaccttttggactaggagccctaaagtatttgttttaaagcctaaggaggttatgatagaaggtcgagttactgctccccttacttccatttatggtgggggtggtaggggctctgtggttgagcagaagaggaaacctacattgacagtggtgggtttaagacaaaacaagcggctccttgggaatcaaggcagaggtggatgccaggggtattcttaccctgagtgcccatgttgcatgacacaccatcccagagagtgcaatcggaaagcatgcttctagtgtggcatgattgggcattttaagaaagattgccctcaggcagagaaagaagagtaggagcaggaagcaaaattcgtacctgctccggtgtatgctattacttaagttgatgctgcagccagtccttctgtgatgtcaggtcagtttctctttaataactcctattttacggtgttatttgactctggggctacacactcatatgttgcatcaaaggtgattagttatttgggtaggccttattactttattggaaaagggtttggaaccctgttatctagtggggagttggttatctccaaaaatcagattaggtctatgccggctagagtagtaaatggtgagttgagtactgacctagtagagctgaaattagtggagttcaatgttatacttgggatggatttccgtctcaagtatttgttcaacattaattgtaagcggataatggtaacattttagccagagggtgaagatccatttgtctatgttgaatctgtttaggggttttgaatcacaacgatttcaattttaagggctaaagatttactatacaatggatgtgcaggatttttagcagttgtgattgactccaacagacccaaaacatttgggcttgaagtagtcaaagttgtaaaataatttctcgacatatttcctgagaagttacctgtaataccgccacaacgagaaatagattctataactgatttggtaccttgtgtgggacttgtttcagaagcgctatacaggatggtttcagcaaaactcaaggcgttaaaatacaacctcaggggatgcttaattaatggttcgctcgacctagtgtaccgtcttggagagcaccggttttgtggtgaaaaagaaggatggttcccttcaaatatatactaaaaatagagaactaaacaagttagcgatcaggaatatgtatttgttgcccagagtagatggtttgttcaattagcttcatgaaaagtttgtattttctaagattaacttgcgacctaattaccatcagcttagaattcgagaagaagataatcccaaaattttattttagaccaagtatagtcattatgagtttttggtaatgtcattcagattgataaatgctttagcggcctctacggatctcataaatagagtattcaaggattttctcgataactgtgttataatggttatcgatgacatccccgtgtactctcagatagattaggagtaagagcaacatctctgaatggtattacaacaactcaaggatcaaaagctgtatgcaaaattaaaagagtgtgaactcttgtaattggaggtgttttctcaaggacacgttgtcagaaaggatggaatcatggttgacccggggaagatcgagtcagagaaaagttggtcgaggccaagatagtggcaaaagtgcaaaattatctcaatttaacaggatattgttggcatctttttgaaggattttctaagatctttatgccattaattgagctaataaaaaagaatcaactgttcgcatggtttgataagtgttaagaaagtttgtaggagttgaaacaataattgataacaacatcggtgtttgcttggccatcagatcgagaaaattttgttgtttattgtgaagcatccagaccaggtctggggtgcatcctgatgtaagctgatagcgttatagcttatgctttctgtcaattgaaggaatgcaaacagcgttacccagcgtatgatttagagctttccgctataatttatgctttaaaatatggtgacactacctttaagtgaaaaatgtaagatttagacaggtcacaagagcctcaagtatttcttaactcaggaaaatttaaatatgaggaagagatggtggctggaattagttaaagatttacatagatcgcgaaattctgtatcatcttgggaacgccaatgttatggtggttgctttgagtagaaatgatcctgggcaggtctttgacaccgtaacttccgaaatttttaaatttgaaattaaattatggttgggaagttacataacctgacactttaatcagttatgttcggatgttacagaagggcacagttacaaaatcttgagttagataaagtttggaatgaggtacttgccggatggcctagggacttttcaaccttgaataacagaatgttactttaaaaaattcgagtttgtgtaccagatgattgtgaggttaaaaaggaaatccttgatgaagctcatacaataccttattcgttacacccaggaaccaccaagaggtatcaggattttacaaaccttagtattggtggtatagaagtgagaaagatgtagtggattatgtgactaaatgttaacatgttagcaattcaaagcgaaacaccagaggtcgacagggttactgtaaatattatcctttcctaaatggaagtggggggttattgcaatggatttcgttgttggtttgcctagaaccacaggaatgtatgattaagtttaggtcgtagtggaccatttcacaaagttatctcacttctgctggtaaagaccatttatacaatggacctgtatgctgagctgtatgcgagggagatagttggagctcctaaatccattgttttagataaagatccaaagtttacattgaaaattttgatatgtcattagggaattatgagtacaaattgaagttcagtgcagtttttcatcttcagactgataggtaatcatagagaactagtcaaatattagaaaacatattgtgagtctgtgccatggactttgagggttcatggtataaatacttgcctataacataattctcctacaacaacagctaccagagtatgataggaatatctctttatgagatattgtatggtagggagtgtcattccgtaattcattagttcgaggactaatgaatctataaataagatcaaggcttggatgcttattttccaaaacatgcagaaaggttatgttgatctaaagcgcggaaacatgacattacgagaaagaaaacatgtttttcctacaagtttctccagagaagggtattaagcgctttggaaagaggggcgagttaagccctaggttcattgggtcatttcagatacttaagaaagttgggcaggtagcatgttggctagccttatcaccaacattattgactgttgaaaatgtatttcatatttcaatgttgaggaaatatgtttttagacctgactcatttcttgagttatgaagcccttgaactatgtcagacttgtcctacgaagaaca

SEQ ID NO: 298068 - DNA, 2769 bp, Cannabis indica
ttgaaatattgaattgtttttctttatatttactttttttaaaatatttttatatatgaaaaaatttacgcccaccctctaaattaaattctaggtcccccgccactgagtattgctaccaatgcaatcctctttcttaatatatagcctagtaataagtattaattatttatataaagacatcaaccgctattaagggtagttgacaggttaacatcttcgaaaacgttgtttgacttttgtataatcataattctcttcaacacggttgccatgaaaatggaatgaatcttcctacactttgacagggtcctttcctttccttcgcaagactaagtgaaaaaaaaaaatgccatatataatgaaaaatcatcttaaaattaaaaccccatctcagagagagagagaatttggttaggaagaaaaactaaacatggaaagagagaaaagaagggttgtcatcattggaggtggcgttgctggctctcttcttgctaaatctatccaattcaattctgatcttactctcattgatgagtatgctctctctctctccctgattttatttttcattgcaattattatttttattcacaagtttttaggtaggtgatcccataatgaatgatggttatttgttctttgaatacaatttttattgctaataagattcaaaactaggcacacaaattgatgtttttaatcttaattggggaaaattaaagcaatacagaaaaaggggttgtagccaaacctattaattatattaatttgatatgtttggtaggattagaataggtctcttatgattagtactaataattggaaacaaaatttgaaacagaaaagaatattttgagataccatgggcaaggtggagggcaatggtggatccatcatttggtgagagatcagtgatcaaccatagagattatctcacaaatggcagaattgttgcatcaagtgccattgatatcactgaaaccgaagttttgacagccgaaggccgccttattccctatgattaccttgtcattgccactggccacacagattctgttcccaaaacaaggactgagatgttgaaccaataccaaacaggtaatatactgatatattcattcattttcaatattggttttctatgttgttatgcctcaagagcaattgctaactttgttttagcgttgttgtaacttatttcaagaacagaatttgagaaaattaattcggctcggtcaattttgattgttggaggaggccctactggtgtagaacttgcaggagagattgctgttgattttccagacaagttgcttacattggttcataatggcccaaggttaatggaatttattggaatcaaggctgctagcaaggctctcaattggttaacttcaaaaaaagttgaagtgaaattgggggagtcagtgattctaaatgatgataatgatgatgatgatgaggataatgcaaatggggtaaaactttttcaaacttctagaggagaatctgtgaaggcagattgccattttctatgcactgggagaccggtggcctcatcatggcttcggcgaacacttttgaaatctaacttggacaagcgcggaagattgatggttgatgagaatctgcgagtaaagaatcgaaacaatgtattcgccattggagacattactgatattccagtaagtgttaaaactactagtatttcaatatttgtttatgaacaacaaatggttttagccagaatcaaagcataagaaaaatgttacatggttcagattaactaaataggaaaatagttcatccaaggaaagtgaatttacctccttagtttaagtactctagaaattagcatacatatagttacattagttattatgagtgataatatcagatagtgttacaaaatagttaataggcaaaaaaatgttagtagtaatttgttagctagttttatagagcctataaatatgtcaagtgtaagagactaatatgatgaactagaacttggctcatttgggagattgacaatgtctcgaagcgtgcatttctaactgtgagatagtaatgttatctattgtgattgcaggagataaaacaggggtatttggctcaaaaacatgctttagtggctgcaaagaacttgaagttaataatggatggtgagaaagaaagcaaattggaaaagtatgagcctcgtacaccaaaggcagtaatggtttcacttggtaggaaagaggcagtggctcagttctcattcacaaccgtttctggaagtgttcctggaatggtcaaatccaaagacctctttgttgggaggacaaggaagaagttgggtctacaacctaatgctacattaattgattgattactaatattttgatattttcaccataaaattattcttattcttcttcctattttgttgtttatattagagtaatttgtgatataaatacttaagtttaattttcagttgcaaataaatatttaagtttaatttttagcagtaataatatttaatttttttttgtaactctgtaagtatctaaccgtgaaatgttaagttattatatccacgtatcatattcttattgttatatttgaactaattttttttaaataattaaaatttaatgacttagaccaatcaaggattgccacgtgccaatttatttaaccagtgcttacagaaattttaaaattataatttaggtagtgttactactgttgaccgaggttttcggtaaccaatttaataat

SEQ ID NO: 298069 - DNA, 1285 bp, Cannabis indica
tcgtttaccgtaaaacttttattttgtagttttgtaacctcccctctccgaggtacacttaattttgttgttttgatatatacaaatataatctgatatactaatgagctatttataccttaaaatttgttcttagttagttttttttttgtttttttgttctaataaaaatttgatatattaacaattaacaaccaaaaaattaataagccaaaaagtttggattatagtttatatatatgtacctttcatctatttattcaaggtctaatctaaatatatgataactttttaattgattttttttaattaattcattacctaatattataaaatggtttaaatctaaaaattgaagtgcacatgttgttgtagccaataaatgtataaggggatatatataatagaaaattcaacaaatttaagagagtggttttctctttttagagaaaaagacaacaataattcaacaaatcccaaacacaatttattatctaatatattattattagtattagttatcaatttgaattatttttcattaattttgactgctttttattagtataaactttatgcttaatatcaagcatacaaagcgaatctatatatagtactctgctctgaaagccaagctatttttaattataactatcgtacgtcctaagagattttaattaaatgtgattattaattcacccaattataagttatcatgctatacgtacgtaaatatagtttaattaaccaaagatatatattcgattcatgtaatacatatatataataataattgtatgttatatgaaactagtctatattccttactaaacacaattttgattaaattcacattctaatatatatatatatatatatatatatatatatttattcatgcatattaattatatatgaagaataattaaacaataattaatatgcaccaaaatatttactttagtgacaagaaatcaatgttatacgatgcttatagtgaaggtgatcaagatcccagaaaatatcatctttgtgtcctttcatgatagttagagcccctttacttattttcatttggccagattcaatcttactaacaattccttggtcatctagaacacttagtgaaattagattcctggctagattaggaacatatctaacttcacttaggtggcgtttggttggaggtaatgaaatggaatgaaatagaaaggaaacaattttattccattcctttgtttggttgcattttaagtattggaatagcattccaatggaatgc

SEQ ID NO: 298070 - DNA, 4478 bp, Cannabis indica
ttttttttaaaaaaaaaaagcctcttttgctgatttctcttgtatgttaagttagttaagatgagtagcctagccaagactaaaataatgttaggaggagaggtaggtgatccccaagaaagttggttggggtcattctcatcaattatcttataaacttgtacatagtacaataataatagtaacctttacacgaatagaaaggtaagtggcttaatttagtgtatggtatactctgttttttgtttttccaagcagtgaaaccctatcaatcacctcaaacaaacaacaatgagctaccagcgtattcctgatcaacatgagcctttcccaccaccaggcaagttttcatctttattgggatttttcactaatcaatttttgcaagctttatatagttactaagctaatctcttaatgaaattttacattatgcaatggatacatatttcagggcaacaaccagcagcatacccgccaccgcctttgcttcagccgccgccgccacctccacaaccaagctaccaggattacttttatggcgaagagtatcctcctcctcctccaccaccaccaccaccaccaccagccccgccacccccaccgccaccccctcctcctcccactctagaaaatgaggaccaggaccactcagactctggctgctgttccttccttaaagcctggtatgtgctctccctcattctctctttattttttattttatagtttagtatattataaatatagctagtagtagttgttatggtttttttattctaaagtctagtagtgtttgtttgatatgttactgtattattcagcttgggtgggctattttgctgctgtttactggagcagtgttgcgtgtagtaatgatctgctcattaaattatcaatgaataagaattgtactatttgttatcttctctataattaactatatataattactacagttgacatttttgttctgtcacattcttaaatttgggtttgctagccattgctattatataataacattttgttgtctaatgtatttactgtcagaaaatgaaatgttttcttgggtttttgctactgaaattgctttaatttactagatcttccatcatcattattcttatcaactgcggatcaaaattatttattgttacagttttttaattttttagatgaattaaatttattaactactttctttttcaacacaatccaattagctaagacttgatattactaatgtatatatagaatgtttaaggagagttgagatcgtgatgatccttccaatttcactgaaactgctcttctacatattttttaaaacgacatcaatggcaaacaacaataaactaattaaaatttttactttttatatgtaataaattatgttccttaattttattgatcattgaaaataccccatgaactatccgttgtgtgtcaacatagtagaaaatacacgaacaactatgacaacaactcatacaatccttttattaacaacaattgttttcttttaaacaaatcaatacaactatttgagaagggaaaaggaacgaaaatgacaagaaaagatcaaccactaaacaacatggactactgtgagcaatattttaacattctggactacacacaactgatagttgtggatatagtagaacaactaaataataacaacaataaaaaaacttgagaacaacagcgatgaattagcccttgttattaacaacccgcgataagaaaaacaatcaaagttggacaggtgtataaagataagaaaacattgaagaatgctctcagctacctagctgtaataaaatattttcaattcaaggtgtgcagatcatgcgccaactagtattgcattgtctatttggatgaggattgcaagtggttagtgaaagcaagcaacaataggaagattgcgaatttcgtgatgaaaaaatatactaaaaatcacacttgcaccctacacatcatatatgaagatccaaggcaagtaacatctaagctaatagagagtgcatcaaatataaatttatcaacatcaaaacagaagcaacacatatcattagaattgagtgaaaaacataggataaagatgaattacatgaaaatatgaataagctctaaatgatttgagaggtaaagcaaaagaaaatacacgtattttaggatctcaatatttccaaaactaagcaacataaaaatagtttttaagaaaataaagatgttaaaacataaactcaaaaaaatagttgttccaatgtagttgctaagtaatcctgcacatcataactcagttaagaatcaatcttcaacctgcaccacttgatctttggaaacaacgacctttttctttggagacttctacagtgtttcagactcagtaaccacaccatcatcaattttcatcatcccatacatgtaaaaagaacaacaagcctaaacttaagatctttaagaaaaagcttttggggtatctcctttctatcaatgaaaaactcaactaaagatgcagcaaatactccacagtcactgaagataaacaatcaaacaacaacataaacttgaaacaataattgagtactttaatagtaaacaacattataaaaagcaaaaacaattaaacttactttccagcttgttcaggcaaatcatccaccttaacaattggaaaatgagcttttaaatcagcaccagcttgtggagaatatgtcattgagctataaactaaatatgcctccattgcctttaatgctatagcttcaaatctggcactcttcaatgaaatttacatgtaaataaccctctccctcatggctaagcaagttataatctaatgactcatctctttcatattaacaataaacaacatgatctacccaagaccatttcctagaggagcaaagccttttaccctcttataaattaggcaatagaatgcctaaaattaatcattgactctttcttttgatgcttaagaaacttggcatacattatttcaatgctctaaccaaagtaacaatctgtagtggtaaattgtactctagcctcagctgcatatttacctttcttttgattgtagtgaaaaatggtgttcatgtgctgcataacatgtatgacaaaaaatatatatactcaacaacagtaaaacaaccaaattaaaccatataaaaaacaagataaattctcaaaaagaaaatatattataattttaaaaatgaaatagcattcgaacaacataataaaaatatgtaaatagaaaacttacagagttatccaagaattcaccaatatggagaagtttgtaaaacaacaatttgtcattaatttcacaaacaccaaactccaatgcaggattgaaaatattcataccctcgtcatatacaaggtttcctctaaataatgaataaataaaaaaaatgagtaagatatttaaacaattgaaataatttattaaacacaactaacaaaaatttaatataccttggaactgacacttggccatcacctaaccaactatcaaactcaacaaaaagagtttcatccacatgattaccaatgtatggacataatatatgaatatatttcatagttttagaacttgttacagtagccaacgaccctacagaactaaaatcctgattgaaaggagactagaaatattccatttttggttcctctattctttaacagctgtaccatgaatttccctgttggattttttgtttggctcttcttgaacaacattaagatactcactacgtgcagtagagccatgaataatatcacttgcacataacagaaaaatatagcaaattacttaatagagtagtaaataatacaacatcgaataagaacactcacttacaattatgcgaatactcgcttaaaatagcgagtactcaaagtttagactacgaaatagacaaaaataagaacagaaaaataaaaaagacaaataagtatagtggttcagtgagagctcagtttacttaatctacttttgcagtagtttcagccgtagtattgagaaatgaagaaaacaggaaaagtttgtatttcattcaattagagaaaggagaccattacagaatatatatagcttcagggaagcttagaccacacatcagtcaacggtcaactaggcagttagaaaccgttataactaaccgattataactaaggggaataaactaatatatagagagaccaaaggacagtacaaatagtgtatgaaacttaataccccccctcaagatggactgtatatgtcatatacagccatttttcctatgtgagaattgagaatggtggaggataaaggctttgtgaaagcatcagctagttgttgttataactaaccgactataactaaggggaataaactaatatacagagagaccaaagaacagtacaaatagtgtatgaaacttaatacccccctcaagatggactgtatatgt

SEQ ID NO: 298071 - DNA, 4420 bp, Cannabis indica
gtaatcaaatactgatattttgtgtaatcctgtgtagtttggtaaacatgtattctaagacaatattattataattgtaattatcgtatcttctgaaatagttgcgcattataattaattccttttactgttccattaagcttttactcaatgtctggaagcacgatccaaatgcattaactattcattgacataggaacgaagatttgctgtcttggtatcatcacttttatcaagccaaaccaaggatcatgtcaatcatggcaagttcttatacttcaaattttactttatttagtaaaagaaggggggctcaagttcttttaaccttagtacttaaaaacaattatttagtcagtgagctaaaagtttattatgatgaatgatggagaatcatttggtgaaaaaacttatgatgaaatacacagcaaaagttgttaagccttgaaaaagttaaggaatgtatatcaatttgtcattgtgaaagtggaactactataaatgaatttgattgatgtttgccaataaattatatgcacttaagaatgttaaagctcacgcagaatttgtacgtaatggtcctaaaatttgcattttccacatgtttctgctctatttcctttatttaatttttctttgccaaaatctcaaaattgatgtctgcggttataattcaaactaatacttaacatatttttttcaaattcaggagcaattcaacgtctcttacaaaatggtctgcttgctgctgataccattgacaaagctgatgaagcaaccatcaaaagcttgatttatcctgtatggtctatactccacttttcttttatttttcctaataaagtccttgtagatttcctcaattacttggctaggttgaaatgaagaacaaacccgcatgaaagttttagaatattttaattatattgtcgtcatgccaaggatattcatctgttggtaatcagaactttttcattttatattcaattactctttataggttggattttattcaaggaaagcaagtaacttgaagaaagttgcaaaaatatgtctcacaaagtatgatggtgatattcctagctcattggaggagctacttttgcttccagggattggacctaagatggcacatctggtgagaaaggagaaacaataattgcaaacttttcactcaagaaaaaaaaaaaaaaactaattgcaaacttaaatcaaaatgctgaaaaaatgatttaattttcaaagctgaatgctttttggtgcttcaggttatgaatgttggttggaacaatgttcaaggcatatgtgttgatactcacgtgcatcgcatatgcaatcgacttggatgggtgtcacgactaggcacaaagcaggtatctttaatctttttcatcaaggaataaattttgatgtaagcaatctgttttttctatggattggactttcctatctctagtagcatgtcttatattgggtaaaaagtatgagttatataggatatggtctaaacactaagaatgttcactcattttacttttaagattgaagtggtcaatgacttttgtgcaatcactggttccatttcaccccattcagaggattggggtttcattttgaaggatttaaaagcgtcattttgaacattcatgccaaaagcatccatacaacatcaatcgaaattcataatctaggttcagtaaaagttctaactacaagaaactacttcatgcttaaaaacataaatatatccaaaatacagtccatggaattaggaactttagaaatagaaataaaatacaaaagataaaaggataaagaaggaacaaataatcttttttccttgttcttctctatttcgtcttttttttttttatttttttttattttccattatcttgggtattattttcaatggctgccaaggaatgtgtctctcagaaaataaggtggcgcatctgatttttttattctagggtttttaattgaataaaccctgaaggagaagacccatttcttcttgttctttaggtgtccactattcttttggatccttcctttaaacaattaattcagttggttctcttttagtccttcaagtcaattcttgacttttaaacattttggccagctagactgcttcaaaaacgtagttattttgcctctagtttctgcgtcattattccaagcaattcatccacttccagcttttgaattttcagctttcattcttgctccaaaggtttgaaaattggcttggggaactttttacatttaatactaatgatcaagttcccacaagttgatttcacatgtaacaaatatggaattaacttgaaattaaacaactaaaaccacaaatcatccttttttttcatacgaaaagttaaaaaatgtaataaataatcttaaatcctacagtatggtgtgatgtccaattcattcctattttttactcaattttttgagcaaaatccatggccttgttaagggttgccagtaaataagtgaaattcctcacatatattgcactttagaacattcaggaactggctgaatgccaccacatcaattataccgtccaatggtgtaagaagttccaaaactctagcagtaatcttccacataaccctcttgtagatatgtgatgaattgttcatggagggatccattttctgtccctgagaacttgtctaacaccaaatgacgcaaattctcccgtactactagtctacatttgttctgtcaaagagcgacatcttaagtttccgatcttgaagttcacgacgatgttcatggtggttgctggagctcacaacctttgtggtgagcacctgaccttctgccctatgacttaaagccagcttaccaattggtgactatccatttgtgactggagagtcaaatcatgagttcttggttggttcttgagtgttcaaggagttgctccatcatagattgcatctgagcttcaaaggattgtaattgattagaaatactctggtctaccctatcttcttgtgccccaaatcttccatttgaagccttcattgcattcaattgataagataggtacctgtaagaacaacttcaccccagaaatatttgggaatatgagtagaaaacattaagaaaacaaacaacttctaagagacttctatttttccgttcagcgacccctattttattgaggagtattgaataagaacttaagtgtagaataccttgttgtgtgaggtaagaaccaagaatggaattgaagaaatctttggaattgtcggtcttcaggatttgaatttttgtgtgaaattaagcttgaatcacaaaataatttttttttttttttttttttgaaaatttcacttctgattttgtttccatacccaagttaatctactatgatcatcgataaaagataaactatttttatccagttgtagttttggcatgtgaaggatccctcacaatcacatcaccatgaatcaatgaaaaaggtttttcaaagtttttatatggtattctaaaatctaaagtaggtgtttcgcaaattgattgatttacaaagaaaaaaagttcagatttttattaataaataaagagggaaacatctttgacaaatacaaaatatttgaatgatcaagacaatagacattatatcactaattttattcaaaatagactgactattcaaaaaaaagaaactgaatttttgagttgttccaatgaatggagtgtcatcttgtgggatatagagcccatatgacatcttagcattgccaatcatctttcccaaattcaattccagaaaacacgcaaatttgagtaaaactagtcacacaatttaactcacgagtaaatttactaatagacagtaaataacaatctagttcaggcacatacagaacaaaagagagttcttcatagagcttgatggacattcaatctatcccacattaaacaaccatgagaagattcttactttggagggcacatgtaatttccaaagaacatcaaccggcaaaagggacttttcttttcgtagcaagtcataagctgacttagagagtgggaattatttgaatattctgagagatattgaaggttggttaggaagttaaattacattactgtgacttgtccatgtattccatattcagttagtgttgttactcagtttatgttatccccaacagtttattattgggcagcattagaattttttttgtgtcacttaaaaggagcacttggatgtggattgtctctggagtttatgagcacactcgtattgaatgcttttttagatacagattacttatataatgtgtacattttcttttctttttctcttcagcgtacatgtggattggtcccttttttctttctattgtttttcttttctttttgaactacttttcttccgttg

SEQ ID NO: 298072 - DNA, 2583 bp, Cannabis indica
aactttaaattttttaatacttaattacaaaaattaatttttgagataatagccttcaatatcccaactaataataataataataaataataattattttttttttttttaaaaaaaaaaaaagaaagaaagaaagaggaaaggcaaacccttaaggacaattctgaaagacgtaaaccctaaaaccctgatttgcttccactcactctaactatttctctcaacgccggcggccctcaaagcaggtattgaatcatcaactttcattgcaatttagagttgagctttgttgatttcagctatattaattggttatcacttctttgggtctctctaattaatagatacgtcaagaatgagggttttcttttggaatttcatactctttcgctaaagtttatttcttgtttttgttggggaaattttgttatctttcgttcgattgtctattgtctacgatttgtgtgatttattttgtgttacttgttgttgaaaattgttgttaaatttctgaaaaatcttaaatttgaataaaactggtttagatgaagaagaagaaggtcaagactggtggtgaatcgaccactgttgttgatttgaagtctttaattcatcaacattcactgttctttgataagttggttgagcttatacctgctaagttttatctacctaccgatgacaaggataagccctggtatcagggtcttagcaaggcccaaaaggcttcagccaagaaggaagctagggagaacattaagaaagctcgaaggaatcgattagatcccgataagtcttctgcaacaacccttgatttgctcaaggaaagcttggagaaggagaaaaaggatgttgagagtgatgatgaagttaaagctgagactaaacctgttttgtctggtttggatgatgataataggtcagttacatatgaagagctaagacaacggttgcgtcgtagaattgaagagtttgagtctactcggagcaatggtggctcggagcctagaataaccaagaggtatgagaggaatgagaggagaagcattgagtataagaagcgtaaaagggaaggtgagtttggagacaaggcagctaaacctgatgtttcgaagaagaaagtagaggaagatgttgaagaagcctcaaaggtgctttcatttggtcatgttaagctcagtaatgatgaagagcatgagaagaagaagaggagggtttcaaaagcgagggaacttgagagagcaaagaagttggaggaagcgaagaatgatccagagaaaggagagattatctcaaagaagcattcttgggatgctgcaacgagtagagctgctgggaaaaaggttcatgatgatcccaagctgttgaaacagagcttaaacaaggataagaagaggcaacagaagaatgccgagaagtggaaggaaaggattcaaacgactgagaaattgaaatcagagagacagcagaagaggtcacagaacatagagcagaagaaacaggataagaagatgcgccgaatcgctaagagggaaaagaagctcatgcggccgggatttgaaggtcggaaggaaggttttatcaatgacaaatcaacttaataattagattggcttgctataaccattatgaaaagcttgagattcacaagaactggtaaaacagattataaatatgtttttctcacaaattggttagcctatttgtcttacattatagttgattttggttcatcttattctgttgctgcttaaattttactactgctctgatgttttttcttggcgcctttgccacatatcaattacagttttcgaattcaggagtttacgtgattatttatttatttaaacttgccaaagtgtttagattagaacatagcttttggcaataggatgtgttgtgtatgtcaaactcaagactaaatatcatgtaagattatactagcattaaatgatctatgtatgttctatgagacacaaattgtaaccctaccaaagcatgtttagccttgttttggttataagctaagcatcctatggtttgacacaaacaatggatttttattatgctttcacataatattcgaaaaaaaatgatgttattagtgtttacagatgataatgtaatggtgtttattgttaaagatatttactttagttttttatgaagagaaaattggagagtagaacaataggaaagaaagtttttcccatccctccctcaccacttagctagccttagtggcttattagtatagacttcttaatatagaacacatgtaaccaagattctaaaacaagtaaaaatagtattcaccaaactatatgaaatttacatatttacaagtaaaaatagtttttttttaatggtattttacatatttgtctatattaaacgtctaaaattctatatttttatgttatattagttttcaggtcaattatgtttaagtcaatgatacttattcatactaataacatttaggatactttcacattcatttttttttcaaaatgcatccctatctgttttggtatttaaaagtaatttttaatttttttttttataattatataagac

SEQ ID NO: 298073 - DNA, 1243 bp, Cannabis indica
aatctcaattctctattttacatgaaatttttacagaatgtcatccacaacttctttattttctttttccaataacttctccaaatcatttaaataatatattttaccataaatgcatattaataaaaaagaataaaataaaatttaaatattattaaaacatatttaaataagagataatatttctctacatgtagaatttcatttaaagacaatacagatattttaaaataataataaaaaaaagagtttacatcatgtgtagaaggagccacttcttcaaatttctattataaaagggctattggaagtggtaactcttactgtgcaaatatattactcaaaaggaaaatatatgtattggcatgatatagctagggtccatatacgcatgtagagttgaattttgcttgggtgtatagtgactatactcttttacatttgagactagactggacacttgttttatattttatttttcaggtttttgctttcagagttatagacttagcaattctactttttgggagtagaaagaatgatagagaggaatacaaacaaagaaacaaagtaaaataaataaagagataggtgtagtagggacatcatatatatataatgcatatgggttccagcaggggtgtaggctgtgagttgtgacacatcaaccaaaaccacctttgatttttctccctttctttctttcttttttaccttttctcttttttggtaatgtatttgtgatgcattttgctccttagttatggtcaccataatttcgaatcacatgctatgatgctatcccataacaattgtctcactcagttctggaaataattttaatcataaaaatataggctagctctaaatttctaatttaattaaagaacactgaacaatttgccaaaactatgggtttcattttcagtttttgctgctttctttatttactttatttgttccactataacttgaggacccaaagaacactgtgctttgggtaggttttgtgtggagatttaaagaaggggcacacttgggcagaattatttttattattattatttacaagaaggagaatttaaacctcaaaaaaattataaaagcatccgattttatttttattttgtataaattttatatgtttaaattatacttatttttttagaaaataatgaatcttcttttctcaaattctaaaaaaaaatatattaaaaataaatattaaaataagacaaaaaaa

SEQ ID NO: 298074 - DNA, 1004 bp, Cannabis indica
atgtaactctcttatgtcagagtattttgggtacaatacacataaaaagaagtatgtttcaattaaatataaaattaaaggtaaatttatttaattgatatgaaagttatatatgttgcttgctaattgctatataatttaatgtaaaatgtatacgttacatattgcttggaaatttagagaactaagcacgtttggtttagtggaataagagtgtaatggaataaaagtcactattataatatttggtttgtgtttttaacatttataatgaaattttattataattggcattacactaattttatgaattctcgttataccaatgacaactaaataatagaaggataatttatcttttctctttcttacttttttttgtccaaatttactttaccatcaatcaagaaaaaaaaaaaaaaaaaatacttcttcttcccaaagacatctctcttctcttttaaagtcattaaagaactcctcccctcgaagaaattacggtaaaaataattgatttttgccttcttcttttttgttttctagcaatgttagagtcttggtgagaaaaaataatattacatgtttgagtttattattttctttatgtatttttttctaggtgttatgaaataacacttcatgaaattttacttttaatatctagtatgactctttatcatttcagtagaatcataaaaagttttgtttataatgttacagttggtaagtactttcatgagatttttcattcaatcattcacttacataaaagacttattaagacgatccaaacttattcttgaaaagtactcaatcgataagaaatggaaatggtttaaggttccactttaatgatttaaaggagttaaatagacatactttataattcacgtattgatttttttaatcaataatctatatgattattcacaacaactttatctgtacataaataaaaaaaaaaaaaaaaaaaaagtttgcagccaaactctccatattttttt

SEQ ID NO: 298075 - DNA, 5637 bp, Cannabis indica
gattgttggatttaagaacttttttccaattttagtaaaaaagtgtaatatgaatgaaagtttaggggcataatttagtacatgtcaaagttcgaaaggcatgacttgttagacatcaaagtctggataacatggtttagtacataaacaatcactgaaatagtaaatttgaatgaaattagacaaaagtcattaaatcaaacaatctcaataatttaagggacatttttaacgaccttaaaagtttaaggagcataatttggtacatgtcaaagttcagtgtccaaaaatcctaattagcctaattaaaatgataatcagctggagaactcctcacccaataccagctggacctgctctttcaagttagtcaaccaactaatcaacgacaccggcgtattatagtggccatttgggtctctgcaatctctgggcgcaatacacaccccaccttccaaagcttgacctattcccgtcactgaccgttgatccatgactaattccgaacaccatgtccaaaggatcgcttagaaagaaaaacctcaataagcgcctcaactccaatcccaaatctcccatggcaattggatcaattcattcgagtttcagaagaggctctctgatatttgccgttttcctcatgctttgcgtggttgttacactgggaatttcgtccaacatgtggaccgtgctcaagcacgatgctgcttctcctgcaatttactcgattgaggttgtcaatgatttccctcatgattctcaagcctttactcaggtaaaatctcttgcgacatttagatcttttttgcttgattattcggaattttgtttttgtttttcattctctattcacagcataagatttaatatcattttaaaacattggtcattgattcacgcaatagtattacaccttcacgaattaaaaactagattccaggactcataattcttaatcttatgggttatgtttttctgagtgagtcaaaacttgaatattttatatggttaacttttgcctattttgggtttcagggacttgtctatgctggcaatgacaccctgtttgagtcaactggcttatatggacatgtgagctgtgccatttaattttctaagattttcctttggcataagcctcttgttgttttatgattacctacatttgaaaattattaaagatattttctttccctttgttgttgtaaacccaataccttaatagataatttctatggtttcctgaactctgtagaatggtttcgattttatctttgtagcaaaacgcttctgtggtcggcctcacaaactaatatacatacgggtgtagattgtttcatacatgtacaagtatatttatagttaggctgtatatttttcattacatcaaattacatttatccttttattagtgggagttactgttgatgtttcatcatttgaccttattcttttctattattccagtcatctgtgcgaaaggttgctcttcaaaccggaaaggtattttacttagtcatctgtgataataatttactgtttgaaattatgtagctccaagtttatttatcaatgacatattatggttgatgtgatggttgttgctgctagatataatcaatagtttgtttttgtgattctgttggttattttttagttcatcaatgtgattaactttatgtggctgagtgactggctgtactattgcaatgagccaatgttttaaaagtggtgatcttgtttttgtatgacaggtcaatgttcttcaacagatggatagttcctattttggtgagggtttgactctaattggccgaaggtctgtgaagagaaagtttaatacattattttgaactgaaaaatggagaaatgtcaataattagtagcactccgtttccattgttttatcattacacatgttatagtttgacaaatcctgatgcaatgttgataagaagttatgtgcccttttgcaggctgttccaagtaacttggttgacagaaactggtttcatatatgaccgttataatttaagcaaagttggtactttaactcatacttccattttcctttttgtttccatacttatgtttttggctgtttgttcccattactacaataacatgaagaaaataacagcttcctagccattttccttgaattactgttgctgtgttcttttcttgttaggagcacatagtactgcagagattgaatcgaattattctttttagaatgcctaaagattgatgtccaggctgttgtcttgatgagtttcatggctttatgttttacccagttcaagaaatttactcatcagatgaaagacggttggggactcgcaactgatgacaaagtgttgtttggaagtgatgggacatcaacattgtacaagattgacccacgaacactgaaaggtttgttggtattaaattttatctaagctctttcttttcttctttttactttcatgctagaaacggtagcggtaattttctccactatatattatatatatagttatgcatcttgatacatctagttatgcatctgatttcctccatttgatggtggcggttcagctgttcaattaagttttgtactgataagctcatttcttttgttgcttgattttccttttttccatgccagtcatcagtaaaaatatcgtcaaattcaatggctatgaagtacataacattaatgagctggagtatataaatggcgaagtttgggcaaatgtttggggggtaagttttttcatcacctacagttaaataactatgctgttttacttttcctatattagggtgttgagctcagttgcagtgatagtgaatcagaaatgccacaaatgccttaacttcaaatgtagcggcattccaatatttcagctaactataatgtgtttatgaaataaagaaattgtgttttcccaaagttctgtagtttaggtaagaaaatgtttgtgttatctgttttttgtgcatgtttgtaggatgcatgggaacctacaataatattattatccattttggtgttggaagtttcgaataagcaattagaaagtttttatttttttttagtgctatatctgagaaagataaaattatgcattgagctgttctgtattgcctttcttaatgtaatttcttttttaacaagttttgtgtagacagactgcattgctagaatctcgcctggggatggtagcatgcttggatggattcttcttccagagctgaggtttttattttttcagtttctttattattgttcggtctccattaaattctgtgctcagaatatcaaagggttttcttaccaagtccatggctttttctttctctttttcgttttgcctttacagggagaaactggtccgttctgggaatcgggtgagctgatataatgaaaataccttgtgtaatactgtacttctgagaagcagatgctgaatgttgttttgatttattctattagtaacttatttgcttttcttttttaggatatagatgttctaaatggcattgcttgggataggagcagaaatcgcatttttggtaagcaatttaattaatctgagtgtgaattctcctaaaatctgcacaaaaacattacactgatgtggcaccgatttctaaaaccagttggggtatctaaacagtttaaataaatatgattgattaaaaaaactttcatgttgcttggtgtaaatattcggtgcatattttaggtacacgtatcattattcgttacacaaaaactcattaatgtttgcagtgactggaaagctatggccgaagctttttgagatcaagctgcaaccaataaagaaacaacctagtcccggggtcattgagcagctgtgcttgcggcctccaaacaattttgggaggccatagacttaacatttgttcaaaaatcttgttttatgcaacattgcctagagcgggacaggctgtttcggtattacattattacatcaagcgaagtatgacactctggtgcgacatccatgaagaaattgcactcggttactcttatcatgactgaaattttgtaaaatttcatactaggattaaaatgaaatattatctgattgtacagacaaattcaagttaaatattgagactctaaatggccgtagcaaagttacaactctatctttggcatgtattttctatgactaaaattttaaattaattatataataataatgattttcctttttgttatagaaatgttcataaccactcaaattatgtgcttgtttatgctcgcgctcttgctttaagaaattatgatgcattggctgattgacattgacaccaatatataggaatttttttttttaatcccaccaaagttttatttctttaatagatttaatcataccatagcatttgtctaattacgaaagctctatactaaagttatagtttttcttttgggtaaaagtaaccgttataggttagagaaaagaacgtcgagagacagagtaaagagattctttccattcaaaaaagtctatagtctatttttagggcatgttaaatcaatttatgagtcacaacattaacgttgcgactaacataaaaaagaaatgctcaaaaaattagacaataaaattttaatatcttaaaagaaatccctaaaaatgtatctgttttgccaataaatctaaaaataaggagaaaaaaatattagtatcaaaacaagaagaataataaaattaaaaaaaatatctaatatcatgtgataattataacttatctgttgagttgaaactctttgaatacttgaataatcaagtgagtgaagtaacaaattcacttataaaaatgtataaaatttagctaacacacactctacttaatgataatattcattaaaataggaatttaaattttagtgctagaaaaacattccaaaaatataattgttgttatgcaaaaaagttatcttagaagtcttttgaactgatagtgtcactacttaatgataatatttattaaaaatgtataaaattcacttataaaaatgtataaaatttagttaacaccacactctagttaatgataatattcattaaaataggaatttaaatttcaatgctagaaaaatattctaaaatataattattgttatgcaaaaaatttatcttaaaagtctttagaactgagagtgtcactactacctcacattatattaatttaagaaaatgaattgtaataaaaacttctctccttaaatctttgatctttaaaaaatcaagtgagtgagaaaatatacctataagggaaaaaaaataaaatttagttaacaccctacataatgatagtattaaataaaatgacgaattttaattttattgttgaaaaacttatctttgatatttctggagctagggatgtcactgctaccttacaccattttcaggatgaatctaagaagaaatcttaaacaaattgccgtacatgacaaatcaccatatatagtataaacaagtcacacagacacaaaaattaccatacttggcaaactactaaatatggtacatgttatagtgagatttctctcacctagaaactcgagaccagactcctccttaaaaggacacgtgtattcagatt

SEQ ID NO: 298076 - DNA, 1082 bp, Cannabis indica
gataaaagattatctaacataacatcctttccatatttgattgcagctttgacttcttggtatgcaataggaagttatctcagcataatcatggcttgactttcttcatccactttgtgatcaatgttggcaagtcctacaatgatttcattaaatctatcaatattatcttcaagagataaatatgaattcattaaaatccatgcaatctttctaacatattgattttatcagacattagaggtttcatataaaactcttccaactttggtccaaactttcttagtagatgaaactttgaaaagttctcttatgatattgttggacaggttcataataatcgtgtagcaagccatttattccatctcagttagttcctaggtttcttataagcaagaagagacttgtctctgagaaccttttagaccttttgatgaaccaaaattcctttgagactttctctccacagtgcaaagtcaccaataccattgaacttctctaactcgaattttgccattgttgagttctgatcttaatcaaattcttgatcaatcttgtagcggaatgatcaagatcttaagttcttttcttcaactgtcagctctgataccaatttataggaaattatatgctcaagatgacactaaatacagtcaagacttaactagaaccaatcataaataattagcaaacaaaactaaaaagcagatcgattaaataacaatgcaaatcaagtaatcaaagcagtaagaacacaaaaaagtttatcttgtttcaaagacaagtttagagtgaacttcctcctactctagttgagcaatccatcatgacgatctccgttaaagtagaaagaactttgtacaaatagtaaacagagtcaaagaacttgattgaaatctctgtcaagagtatctctaagttttgatacaacctcgagatcaacacccttatcgatccccatagttctctttctctctttctcactctctctatagatttatctctcactcactctactatattctgcatatctcaagaaatgaaagcctttggatatatatagattttgataagctcaagta

SEQ ID NO: 298077 - DNA, 7504 bp, Cannabis indica
agttaaaaattttttaatgttggttattaatgttttacttagagtgttttaatttgaatgattgtttatgtttgcatttaagttatgtttttatatgctaggtggtgctagtatgtgcaattcacgtgcctagttctctttcttttattttatttatattttatttgtttatttttattttataaaaatttatataatttaattttttttttttgagaaaattcaatgttattataaattagaagtcatttacaacaacagagaatataggatagggaatttctcctatccaacaaatgtcatcatccaaccctaaagagaatctagctagaccatgtgccgcttgattggcagagcgtttaacatgggtaactaaaacctgagggaaaaaggacaaaagacaacgaacatccataataatatcagaaaaacaagacaaatccttagaagtagaatttaaagctgtagagactcgcaaggcatccgtttcaatatgagtaatagcaagttgatgctgcaaagcccaatttagagcatgaaaaagcgctttcgcttccatttcgtccgatctaaagtttccttgagcaacctttgaataggcgcaacaacaacaccattgtgatccctgataatagctccaactcccaattttttctggtcaacatttgtagcagcatctacattaagtttgaagccattatacaatggaggtttccattttgcaacatgttgaattgttgctgaaggtgttgttgcaggttgtttgttgctgcagacagcagcaggtggcacgacattctttgcccgaatgaagtcttcatgaaaacggattgcatagtttattatggcagcatgtaatcgagatgaacccccatgtacaactttattcctatccgtccatatgccccataagatacacaacagcaactcaaaatcttgctgactcaaaatggtcgataaattttgtaaataatcgccattaaacatgttttgagccttagaaagatctagttgaaatgttgaaattttccatatggctttggcatgcttacaaccaaatagagcatgtccaatggattcccaattcgaagcacaaagagagcattctgctgaagttaaaacttttttcttaaagagtgttgctgctgtaggaagtatgttgtggagtactttccaaacgaatattctgatcttcggaggcaagttcagattccagaaatatttccaccagtctctttgattattagaagtagaggaacaatgttgttcttccaaggaactggctagatggaaaccagattgcacagtgtacaatccattggaagtaaagtgccatattaaccgatccatatcagggaaaaaactcagtggtatagttagaattcgatccgaatcgattgggtgaaaatatgtatttagcataggcacattccaaattctttcctcagtgataaaactcgaaactggcagagaggtagatcccaaatagcttactggtttgaattcattaaacccctgaatccatggatcaagcttgctgtctatttgagttccattcccaactttaaaccttaagccttttactaacagctccttgccccaacagatactttgccaagtcaacgatggtgagtggccaatgttggcatccagaaaggtactgttagagaaaaatctatgcttgagaagtcggctcaagagagaatcaggcatataaaaaatcctccatgcttgctttgctagaagagcttggttgaaatgaacaaaagatcgaaaacccataccaccttcgtgtttcgatttacataaggatttccatctcttccaatgaatctttgtaccattttgattgctgctccaccaaaaattagccatcatactctctaattgattgcaaaatttctttgtaagcctgaaacaactcattgcatatgtaggaatagattgcacaacagctttcaataacacttccttccctccaattgagaaaattttttcattccaagaattaagaagtttccagatcctctctttaatgttgctaaaaagctcactcttgtcacgtcccgagtaagaaggcaagcccaaatatcgctcatggcactcagttattggcatttgtaaagtttgagagaaaaaagtctgagctgcttgtgaggtattaggcgagaaagacatcacagacttatcattgttacttgacccgaagctttgtgatatgtatcaagtgttcttttgatagacctggctgattgctcattggattgacagaataataaactatcatctgcaaagagcaagtgagaaactgaaggagagttccttgtcaatcttaggcctgtcaacgtaccagcttgttcctccgattgtaaaagtcttgaaagtccctccgagcaaatgagaaataagtagggggatagtgggtcaccttgacataaaccccgagaaggatgcacttgtccaacaacttcaccatttagtgagaaagaaaaagagctggtagttatacaccgcataatcaatgaagtccatgcataatcaaatcccatcttaagcatgatagcctgaagatattgccattcaaccctatcgaacgccttactcatgtctaacttgagtgttgaaaaaccaattcttccttgtgtcttatgacgaaggtgatgaatgagttcaaaggctattagaatgttatccgtgattaatctgttagagagaaaagctgattgcatttcagagataacaaaaggcaaaaccttcttgaaccggatgacaatggtctttgagataagtttatatattacattacaaagacttatgggccgatagtctgtcattgaactcgggttagacacctttggaatcaaagtgatgatggatttattgagatctgtcatatctagaccttcattaagcacaccaagaaccagattagaaactgaaggccccacaatattccaataatgttgatagaacattgcggacatgccatcacagcttggactcttatcgggactcatggacttcaaagcatcatacacttcttcacttgtaaatggctggagtaaagaatgattcatatcttgtgttatagtggttggaacaacatttaaaacaactcccagtgatgcatgatcaacacaatcagatgcaaacagagtatcataataatcacaaatggttttggtcatatctgcctttgatgttactgtaataccttgagaattgacaagagatttgatggtatttgtggattttctggaagttgcatgagcatggaaaaatttagtgttctgatccccacattgtaaccaatcaactcttgacctttgatgccaatattgctcctcttgctcaagcaagtcgtccaaaatagactcagacttctgcaactttaacacgtcctgagtggtcgtaactgctgcattatttagcagcgttacctggttttgagcctcaaaaattctttttttgaagcttccaaacttagatgcatgccacttttgtaaagcttctgtacaagaactgagattgtgcatgaaaagattgatacctccatttgaatttgaagaccagcaatcacgaattatagcagcagcctctggttgttcaagccaaaatttttcaaaacagaatcttgttttccttgctggtttttccttagctgagtagatgtacaacacattgacagcaattgcacggtggtctgaagaaaagtaatccaaatgggaagttgtcatgggttggaaaaaggtattccacacatcattagtgaagcaccaatccaagcgttcttttattgcattgacattatgtcttcctttagtccaagtgtagggatctccctcaaaaggcagctgagaaagtgaacaagaatctaacacctcacgaaaatcatctatttgtctttcattcctcaaccctcccccaagtttattttgattagagagaatttcattaaagtctccaatcaccatccacggaagtaagggggcaacatctttaagtctttttaagagtgtccaagttaagtgtcggttttaaactgcaggagcaccataaaaagccgaaaagtgccatttgggaccattagcaacagccatgtaaccatcaaaaacattggaattataatattgcaaggttacatctacatcatctttccatagtaacataagaccaccacctagacctaccctagggacttcaagtccattattgaaatgtaaaagattacgaaaacaggaaatagaattactagctaatttagtttccataataaaaagtacagtgggggtttgctctttaacaagcaaacgtagtttgcggatagcactcgggttccccaatccgcgagcattccaacttatgaacttcatcgctgtccgcgggactggaaaccagcctctgctgcattgtcaaagtcaccaatggaatccatattgtcaatagaaacttgatggcgaggatcctcttcatctgacaaggaagaagttgatgtagttggtagatttgctcggcatcttttcagtgtttgccttaaagaaagaccttcattttgcctctttgattgcacatttggattaacattttcctgaccatgagcagaaatagcagcagtgatggaagagtatgtggttaaggatttggaaggtgacgaagcagtatgattagtggtttttaggatggggattgatgtggaagaaggaggataagtggcaaaaaaattattgttgctaggaacttgtgccattgggttataaatccctgagagatcagaataattatctggattgccaatagttgtaactgtaataggctggtgtgaaacttttttagcaaaagtgttgggaatgatggaggattggtctagatgggatggtacaaaagtgacagattgttgtggttggttcatatttggaattaaaccagtagcatcgtggatagggggtctggctgttatggtattaggattgtggacaactaaatcagtagcatcagcaacattggaatgagaggattcaccaaaaaacaattttcgtggctgaggcaaacctctgagttccaattgtggtattgccgaagtgagacttttcttggccagacgagtcaacaaaggccacacattccctttcgaaaaatccatacgatagcgatcatatgccgaagtaggaagagcagatcctttaataaaaggttgatattcaagatcaggttcgattccattgtccagtttttcaaggtagattaggaatttattgtatggatgtccaataattccacactccatacaatactcaggaagtcgttcatagcgaaaatccacccaaaacttatcccgaacattggataaagagatcattcttcccctttttaaaggcttggaaacatccagtttaactctcaccctcaagaagggaccccaaccttcatttaaagagtcctcaaaaacatcaaggaactctccaattatattcccaagtgctatagccagtgacttagtcttactaagaaagggtaatcgatagatttgcacccaaaaaggagtaaatttgagatcttcagaggtgaagttttgaccaatttctggtgtgtgtaaaactatatggtggttctggaaatgaaatggctcacgatcaaggacccttatcttgtctccttcacagccgaaggtgagcaagaacatatcagaggattcagaaagtttcacagggaatctgccatcccagtgttctgacatttgatttttgcagagtggatagccgtactttcttcttagtgaggattttggcatacaacaccagatcagtagagagagcaggggcgacaacatcagtatcatgaaactcaaacacggattcttcatcttcggtcaaggtgatttttgttttcaacttatttgtgagaggatccattgttggaaagtaaaatttctgggtactaaccacgatcaaaagcagaagaatgaagaaaaaactgacaataaaggaatagtaactgctataaatcaagatagaatgtgcagaaaagatgggaacacattggaataactataaaaccttaaaggacattaactgccacagagcacaaggataggcagacgctctactatttcatatataatttaatatttatatcttaattatagtgcaaattacaaactatatattttattattatattggagatacaagagtaagggacaaatttctaaagtgttcattatagattgtttgaacactactttctataatttaaattattatgaatttcttaaaatttgcaagatgtcttaaataattacagcgtacacgactacaaaaaaaatagactaaaaaattttcatgcaaaacgaaatagtagttcttacgatagatattactcttaaattttcaagctgtaagtatttcaattttttttgaaaaaaaaaataaaataaatacttaattagagaaaatctgtaatacactccactaaaagacgtgttttggtagacccccttttttgtttaggcatttaggtagaaaaatttagtccaaatatctttttatgatcgtagacgttagagttattatgacttcctgtaaattttcataaaattataaatagtgcacaatgctaaaaataaggttaaaacaaatagcttccaatgtgtaatagaaaaaacaagtcacgcgtgttataaaataattgaaccttatttttaatattgttaactattcaaaaattttaaaaaattaataaataattctaaataattataacgtacataatcatgaagaaaaattaaacgaaaaactacatatatgacaaaatgaataagaaatctaccaaacgctattttagggggcttaaagcttgcaagtaccttgtacgtgcaagtatatatatatatatatatattatttttttttgtgagcaaagcaacactaaaataaaaaattattacatcaaaatttatttttctaaaattagaaattaaaattattttttattaaaaaattgaaacataaaaagtaaacataaatcaaaattaatgatacaaatgaaataacataaaactccaacgattatctaatggaagagtaaaatatatattattacttttaataataccttttaacatataaataattgttcacaatcaatattattaagaaatttaaaaggtgtcattaaaacattttctaataacagtctcatcaaataatagcattaaatagtttaatttataaaatatttttttattatcttaatttgtattaaagcattatgttcgtctcgtatcttatatatacttatcaattggaaaaatactaacattaacacaatctatcacacaaaaatttaataaacacaaacacaacttgtataaattttatatcgtgttgacgttgaaattctatattttaatattcctagttttattatttaattaaatgcagaatagtgaaactgatactgaaaatagtttttccgtagttacagaaaataactctgtaactctaga

SEQ ID NO: 298078 - DNA, 7527 bp, Cannabis indica
attttgatttttctcttcaatttgtgggttaatcactcaattgggtcaccgtgagttcatttgtctaatcctcttgtactgattgtagctacacttaaatttttcagtattcaccatcatcatcttcttcctatgttgtaggtgtctgcatatcatataattaacttacttttcttcttatcaccttcataggaccccctgaacagagtcattctgatcccaattcgctctctcgggagaaaaggcaagcttataagaagccctcacttttgtggctgcttccatacgcttgtttccaggtaattatattcttaaaactatgaaagtggcgttagtttttgataagttttactggtaaatcctcttttcttgttgttgaatttgtatgcagatcccatgcttcttattgtggatgactagtatacgaaaaatgtctctgaatcatcaccctgggtttgattgtgtaagtctcataaatttactataacttcatgtaaacttttacaaacgatatgataatttggatttcaagtttttacggccaaagcaccaatgaagttcactcttttggtttttccttgaatgtgaaaaacatagacctattgtagccagaacatagagcaattaaaaaagtttattgctattacattttttttaagagttggggaggtttcttattgttataacattgctagcataaataagtttattgtatttgattatctcgaggatgttgtgttatcttcttctcattcgccattcatgggtatctttgatgtttcctaatactgctgtgaattatttagttcatttgaaagcttgtatgcattgccatgcatggatattgtctaattctacaaagattttttaatcacgtcattcatgattttgtttgattaacatgaaatttttgtgactttcatttcagggtggtgctctttggttccataatttaactgaattctcgcatggagttttaggctccatatttccattagttattgctggtttgcactatgccaatgttcaggtaattaattgggttattaaatatataagtatgaaacatcctttttagtaaagtggttgaatccctcaatggtttcctacccagtagagatgatgataggattgtctctgaatggttggtttcagaatcaattgttcatgaatgacacaaaactagaaaagcagataagcaaaaatagaaacatctttatgtttcttgtaaggtaattgctggtaaatacagattctttacaaacatagatgatgttgccgctcaaaaaaacatagctcaattctgattagtttatttaattttcagaactcttttagaagatcttctgttaaagaaacaactggtctactcgacgtagcagtaaaagtaagtagtcacaactatacaagtttttatttttatttttttggtgagaatgctgtatcgtgttacttgtttttctcccaagttgcatttatctaatcagttataatcaagttaaggtgcagaatgttctcctgatcagggaatgtattatgttaatttgtatatctttgtagttgaatttcagtgttatcttattacttgcttttctcttgagtggcatgtctcttattagttttatattttaatcagttggagggcactggtcttttagccatttaaaaaagtatttttattcctagaagtgatttgacctgtaaaccttgtgcagtattacaagctcggcttggatttcatgactctacctatcctttgtatctgttactgtcgtcccccaggtaacttattatattgttatgcatatgtgtgtttaggatttactatattggatcatattactcacattccgaggcatttttttagcagactagcagttgccagtgaactaaattggcagaatttaattgagattgagtaccaaacaatttatgccacagttttaaatttttctacgtcttctcttcagattgttgtcgcttgtgatataattcagttatttatttgatgaagatgtagatctgtaggataatttgttgtgtgcaaaagtttgttttaaaaactaatgtcattatatgaaatacattaatagaatcttaaaggggtaatacaatgtattgtttattactgaaatgctcaaatatctggcattgaaaatctatttcctcttctctattaccatattctggtaaagaatatataatttacttctccacattctttcgcagggaagtcaagtctattgggctacaaatctttcactaacttttactcaggtgatccgtcacaccgcatccattcttttattaataaacatattaatttgacacttagagacttgatttcatgtttcccacatgtatgtgcatatctatatttaaacttagttccttgtgattgttttcccaaataagattctgctatatgcatcaatagtattttccttctccgctcttaaagctgagctctggttttctcaatatccaatgtgtatggttcaattgttccgttatttatttatctttggtttggtcattggtgagatacattcctttgtatttgtcctcagattcaattatctttcatacctgaaaatccatggaataccacatatattacttgtctgagaggagagtagtagccaatgctaaatcattgcagttacctacttatcaggcttttgttatgtgattatcactctgttactactcatattgttaaattatcgattttaattcaaagttgctccttttttgataacacccaggagtactttttctagttcccaattccaaaatgaaactaaatcactttctacccgtaaaggggaaaaaaagagaaaaggttgtggagttttgatgaaacaactttttgaaattgtaacatgttgaaattgattatttggaatttggaaattggattttgattagaaaatgaactttttaatactgaaactccaataatattctaggtctagctgcagactgcagtgtaagcatctcaataaatgtcctgatgtgaaagttctttgatgaccttgcagcattttctcctcaaacatcctgttgtgcgtgcaaagctagggctaccagtcgagaaatatcttaattctgcagattcaagtgttactgctcctgctataactgcaagtgaacctaaaaaaccgcaccaaacatctttggaagccctctctccactagaactgcttaacgttagtgaacctatgcttttaccttgtaagctatgttaacatcggatactaattgaagttttgtcgaatctttatgtctgggactgtgggcagctttccacccaactattatcgaaacaacatatagaaagagcaattcctatactacagtaaatgctgatcttctaatctgcatttttatttttgtctcaacttctttatgttagcttagtagatttgtccatagctgccaaattaaattataatgtctttttaattgcagactggcactctccaaagatcctgagaatactaggggtttaattcttatgggtcagactctaatgcagaagggactgctttcagaggctattgaatacatggagcgtgccgtttcaaaggtctgggactctgcattcattttcgcattacgcaattttcgcttgttaagcttgcacgatgttatgtatgagtcaattaattatctgagtgaaaattgctttgcttgcaatatttgtctgagagttcaggatattctatcttgtctgtttgggcggatcatgtaaaccaatacctgtcattttaatttacatattttaagattcggttcataccatgttttaggttctttgtccattaataattcattaatcagaaagtgctttcttgcatcagctcttacttgctggccatcttacagaagttgcagatatttctgatttaatccgtgcctctaattgggctggttctctccttattcggcaggtgcagactatttacaaaacttgctatggaataacatttaaaatggataccacactatcaacacatttcttttaatagtagtatggtagagatcaaacctttttttttcaccgcctacttacttgtgtatgatatagggaaatgtcaaggaagggctcatacatttggaaaggattggaagaatgaaagaaccagagcatccagtgtgcaaaactcactactttgatggattattaatgctttcgaggtagtgaaaatagttacaagctatgtgaacatttgtattgcgctatagattattttcccatattaagttcattttcatatttattaaggcccttctttttcagtgctttatacaacgagggtcgcaggaaagaagctgctgattttcttcgattagctgctgcttataaccctgctttcaacgagttcttagagcaatgtgaaaatgatgactcttcaccgagcgatcttaccaacaaacaacaatagacaagatcatttacataggctgaacaatacaaattttgttttccttcttaccattatattgcattaccaataaagcgattagagaataaaattttggaagtcattgttgtgattatttatcataataacctttttcctagatacccaggtatgtatttttatttgggggacatactttgagaagaaaagatagtaagcgcagatttcagacttaaagcttgaagtactgttatgaaggacatctatgtatgtatgtatattaacttaataaacagacgcataattagtaatttaaactgattcatttgataattgacaggtccaaatagagttgtacgtgcagtggtttggtctccaaattgcagaagcttataaaattgatgacggtaagcaacttagtttgaaaattttgagaaaaagcgacttaatttgtatttgataaaacagaattgaaaaacaaacaaaataatttgtggtttttatggccacttttgctagagaaaacacggttgttctatttgatcttattttgccttgtccaatggtacctttcaccttgatgtgtaggttgatatatccaattgatcaactttaaccagatctatttatattgtgttgagaaatttcaacgacgtatttacgtgtcaacaatacttattttatactatatattgttcatctatatattaagatttatttatatatttatatatatttatatttatactaggttgatattaagtgcaatggacgtataattagttttctttataattaagttcaattaggtgatgttaagtataatactttaattttttttaattaaataatgtattttttttttttatttttgaaatgtagtttgagattttgatctttaatttttttttttagctattgctacattagtgtgatatttaaatgtgattatatatatacttatttttaatttttttttaatcagtaacgtatgtaataatgtatatattgtaatttactatattcttaattaaccaaaactcacataaccaataagtgtgtctatatgtagattggattcttaaatttgatataaatatttttattcccaaattttacaaaaataataataaagtataaaatataattaaaaatatttataatattttaaatttaaatttctttatataaaatattcacataattttttttttattttaatttaaagttaaactaataaagttaaaaatatgattaaaaatatttataatatttcaagtatttaaaagttaaatttaaatttttttatataaaatatctatataattttacttttaaatatatataataatattattataaaattaataaagaatattctgttaaataatagaatattattataagaatattattataaaattaataatagaatattctgttaaatattttattctgttaaaaaaaaacatcgttaaattaagaattctattacatagtcacattttatatagaataaatatatatatataaatatatatttatatgatttttcttaggagagggcatagtattttctcatactcataagggcattttttcttgcaattgattggttgaaacagtgcgttgtacaagcttataacgtggtgtgaagcgtaataatttttttaatgttgttatatttgacttttttacttaaattatagggttagggttttttttcaagcgaaaaattagtttttttttttttttaaagtaaaaatgatttggaatacattaaaattatacacttatgtatccaacattactctttttttcttcattcctccaatttttttgattgatagtttctattggtacttgttgctgacttcgtttctaatcaataacgttgagtcaataaagcgataatgtaagtatttgaatcataacaaggattatgaaaaactgtaaatattacgaattttatagaggttcgtcttcttttaacagtaatagtctattccctttttttttgttgtattacttttaaaatgaatatcaagataacaaggtgtgatgaagtgagtttctcaatatcccttaaaaatgttacaaatatttcagactgttctctctgttcttagcacgtgaaaatcgaagtccctaaatagtgaattgacctcactgtataaggaataatgaatacataagttacccaaaaaaaaattggaaataaattagaaatggtttgaatgtgaatccccttttctccatttgttaaatgaaatcccatggaaatagggatatcaattggcccattattgtagaaccaattaaagaatgtatcttgacatatcttcagcaaatgcctcggtcagccatttagcatcatctggtctggtcggtacaaactggtgtcatattccacacagggtcaatctccttgccacttgttagcttgccaggtgctacatatcagtgcaaattttggggtaacatttgcccccaagtctgggtggaaacttttggttgtatgaggactttctagacctcgcaatttgcacgactaggtgacacacgtttgtacccacgtacctacatggatatgacatcagttttgccccgaagtgtggaaatccttccttatcctttcaaatctctgcattagttgtttttccttagaaattgcatcttggggatcgtgcactaatggttacacgattcttgtaatgattacatttttgcttttttgggggggggggggggaatgaaatatttgaaattgattagcattatacccttcgacaatcctataaatgggatcaaaaatacctatttgcaatttttaaccatttgaaaatgtgcaaagcgagaggagagttgttgtaacgccctaaataattaggcacgctacccaataaacttatgaaacgctaatcccttaatcgggattactagtaaaataagtgcggaaattaaaccttattaataaatggaatgaaaattaataatttaaaccttataatttaaaagttacaaaagttgggatcccaaaagtatttacaaaacattattacaagttcttttcctttggctgacctaagcggcaaaa

SEQ ID NO: 298079 - DNA, 1649 bp, Cannabis indica
ttattctttatttcttatgttttatttgtttagtgtagcataatagtattttataatcaattaatagcttgtaacttaaaggtcttgatgatctctcctctcacctaactagccttagtggcttaaattatctatttcctttgttggtgtaaagggctcttacccaattttttcactttggtgtttccatcatataaagggactatgagtatgagctgtaacttccgattaattcatctctgaacaaaaagacttcttctcactctaaaagttacttctcatcttataccttaagtacctgactatccctcaacattgtgagctacaattctttctatacttaagtcattgtgaatttgaatttttccgtaaagcaaataacatgccaaagtggaatgttgctattgctactgagattgcaactattgaaaatactataacatgtaagtggatttacaaataaaatataatattgatagcactacaaggcccgagtgccatcaacattattattcaaatacatttccactcaataagcttgttattgataagctttttttgcctttgctactaaggatgctgtttaaatcaattaaatgttcatatttttttgcatagtgatttttatgaataagtgtttacgactatacctcaagcgtgtagtccaaaagaattaccatgtaatgttgtttgcaaatcgtgaaagtccttgtatggcataaatcaagcttctagacaatggtttgaaaaaaaataaaagttctagtgcattatttgaggaaggattcaactattttgcaactaatcattactgattcatgacacatttcaaaactagcttcataatgttgttggtttagatagataatgttaatctagacagtaataacttaaaagagctagaagctttgaaaactagattgaccaattgatacaagctaaggaatttaggcaacgtgaaatattttcttagtttataaattgcaagtttttcaaagagatatttgtatctcaaagaccttatgccatacatccagttaatagaggatattggtcctttgggatgtaaaccagtaactacacaacaaatttaaaactaagtcaatatttgggaagttagtaagctacattatcagactataacaaaaggtgaatttatatttctcagttaacaaattagttcaattcttggctaatcctcgaccaaagcattcaaggtcaaagttattttacagacttgtagcttggctaggtactagaaggtctacaacaagattttgtgtgtttttttggaaggggtgggggattctatattctcatgaaaaggaaaaagtagcatactgtgtcaagattttcagtagaatatgaatataggacagggtcatgattttcagtagaatcacaatataggacagggctgatgtctcaaaagcgtacgttctaaatgatctttaaggaacacgtttattggaacatcaaggccagggtgaatatttgtaacgaatgcacacttaagtgaatcaagtcagggtctcagttctctctaagattggaaggaattatattattaaagtaacggtttgatgaacaagttacaataaaaagaaattactcatttcaatcacattgtcttaattatatatataaaa

SEQ ID NO: 298080 - DNA, 1451 bp, Cannabis indica
gtaaaagaatcaagcatcactggctcaccaacttgcctaataattcgaaacaagacttgctcacccgagtatttcaattctaatccctgcaattgaacccatataggtacagagtgaatatcctctttcctgaaattcttgtttggatcccacgccctcatgatcactggccgattgttgaagaaagtgtatccaccagacaaaatctcatcacggtctgcaatggaatatgtaaccacaattttaatttattcttctcatcgaggaaggtttgcataatatctctagtaattgtccatcgagatggaacttcaaaattaggacatggcacgctacaaaaatatttaaaatcttctttcttgacaaatctaaatggtaattcatcaagcacaatcatcttagcacaagttgtcctacaagcaaactgactaaacctaactgctacaagcttattagccccaccctctgtaccaattttgttgaacataaaactctcttctcacctttacttttatccctataaagatatttcatgcactaattttttagatgataccatagagtgctagtcccataattcctatttcatgcacataacttttcccataataattacagagtgctttttggttatcatgtttagactttgggttggtaaaatgatctcaaacttctgaagatagcctagcagtttttctttaccaatgggggtttaatttggaagtcttagatacaggtgtatgggatgtagcagtagtaattgggtttgcttcaacaattttgctgcaactatcaacaccgtgttgttccttttcaaatctctatttcttcacaaaactaaaatgaaaaaaaaacagacacaaacactatctaattaacaaacaatataactactatgattaaaatattaaattagtaaataatgcctcggtattcaactcatctcaacaaagaactctaaaactaaaatattaaaataatttattatttattaaaattaattacaaaaaactgtacctaaagtcctgcaggtattgggcgtgttgaagagttccagtgttggtagtggtaaggggaaggtcagatcaaaaattggtggagagttgcagtgagtagtgatcgagcctttgagtcaaagtgaagattagaaaataaatcgtagaaaatttgtagaaggaaatgagtggttcaaggggagagaataaattcttttaataaaaatataaatgaatataacattttgatttaaagaaatatggaaaagatcatgattcttggcattggtggttggagccatgcatacaagagaaggaaattagaaaactaaatggcagttgtaatatattattatagtatatgtatcaatacagtaatatctttttttttggaaagtatcactaataatttttaagaaaaaaatataaaattgttataaatattaataattatgt

SEQ ID NO: 298081 - DNA, 2229 bp, Cannabis indica
ttttgttgttattttgatgtagtgtttttgttgattttatgttgttttcgtattattttttagaaaactgtaaatatagtaaaaaaaaatattcattaaacataaaaatgaaattattttacaaaaaatagtgtcttatgtaattattcctagaataatttacttttggatattgttagaaattacagtaccaaattactaaacttctttagagtgtgataatgaatatataatcatatccatttcaaatctcaattaaagtagtcaatatatatcaccaacaaatatcccataatttctggtgataatcatataattagaaaacctaaaaagtttattctcttttggactatccaattccatattagcctctctttgtgagacctttttaatacactattaactgaaattaagccaccttaatatactttttttttttgcccctttatggtgctttctttgtcataaataaaaatacccatttaaaaatctcatatttaaatttggtggcaaatcttagtcatctcccaaagttatggccaacattttgccatttttgtagtgatcaattataaatgttgaaaaaactccaacatagattaattacttgaaaattacatatttcatgagtttgaatacaatgtgagtaaaaaaaatatgatttttttttttccctttcaacaaattattttgtcagaataattcaaaagaaagttagaaaaatagtttaaagtaaccaattactccttagcgtgtaaccagttacctttttaagttaaccatatagtttttccctttttattcaaattccctataaatatcttttttttttaaaaaaaaagatcgtatatttatgaaaattttcccattaattattagtgttttgtattacatcatttaagtttatttttttaagcactttatttaagctagagatctttttgtaaattatgaaaacaatacaatgatctcgtgaaatttaatgatatctctctttttcttttttaagaactattgctctttaggtggaatgttgggagttttcttctaaaaaaatacttattcctaaattgttaaaaaaattcaaacacatatgtcccattttaaatttttatatatttaatatgatgcacatatttttttagaccaaatgaaaaaataatgcacacattgttttagacaaataaataaatgacccaaataaattcgatcaaaaaataatatgacaaaattatttaaattttttgtatcagttcgtattaagaattgtgttcaaattagttatatttagaaaaaagttatcaaaaattaagctcgggtcctatttttattatttttaaagatacaaaattcattttatcatttaaaaaaacacatgatccaatccataattttgggaaaacatagaacctaaaacagtatatttaccctattttttacaattacaatttctcatacactatatagtagtgaagtggaattaaaacgttgtcgttttagagattaacacgtcgtatacaactctgtcgttgaattacattgcttgagaggttgtacgttacagtacaattcaatctaaccacaacttttttcttaaccatattcaaaatcttaactctcccatcgattttagtaaagcttttcatcgtcaacgatttctctccatactccgccaaaaaccccggcgccgccacaagtttcgccggagaaacatccaccgtcagattcatcctcatcgtccgtctagccctagcgattcccccaggattcctcccctccccgacctcagcgccgccgtaatagacggccgttgtcgtattcccaaacctaaacgaagcaacgttagggtttttcactgacatatcggcgattagcgtcagattcgacgatacggctactacggcagctatgttcgccagctgacgtggatctccggtgacggagatcatcttgatgatcggacctttgacgtcgaatacggtgaaagcgaggatcaagaaagttacggcgattaagaggattagagctgttatgcagccgcagcacttggcgtaggattttttgcgatgaaggttgtgatgatgatgatgttgttgttcttcggtggaaaatcgatttggggatattgaagctaagggtctgcttggctttttttccgccattgatgagaaaattttggagaaaatgtgaagtggttttttggtaagtaatatttatatatatatatat

SEQ ID NO: 298082 - DNA, 2092 bp, Cannabis indica
ttttatattctgcatgttctgttttgtctctacgaaattagttttgcagtctgcaaacgtatacagttttatatacaatatatttctgtaataattattggcatttgtaaaaactcagtttttcacttcttaactcatcttctgattcaagcatccaagactaaacaatttcgtttccatcacatgtgcaagcaccttggcattgtgaatatttgttcgctgataatctaatcatctttagcgaagataataaggattcagttttggcaattcaagaagccttatctatttttagtgcctgtactgatcttcgtgctaacctcgaaaaatcgcacattaactttagaggtatttatgacaatgagaaaagaggaattcttgggactgtgaacttctgtgaaggtagcttttccctaaaatacccaggggttcccatgtgtccaactaagtggcaagatgttgattgagctatatttattcaaaaaatccatctcaagcttcatgcttgggtaactaggcacctgtcatatgatggtcgggctcaactagtggggatgttgtgttatttgatgagtattactccccaaaaaggatgtgaaagaggtggacaagttgtatagggatgttgtttggggtactcgaggtaactctggtaaacttcatcttacttcttgggagcttgtctgtaagccgaaaacctttttggcttgggttttagaatgggtgctaaatgaaacaaagcttccatcgtgagatacatttgggctctaacaacaaagcaagatgtgttctatttaaaagatgtagattgttgggactatgatcgatctaaaagtgaatgtgagttggtatttaggaaactaatgcatgcaagatattgttttactaattagatcttggctggaggctcattgggtaagtttggtaccaacacaatctataataaatttctcattaatagtgagagaatggagaataattcagtggtttggaattaattttctaccccaaaacatcagtttgttctctggcaggctcttcacaaccacctgcttactcgggacaatttgatatctaggggaattggaattgtctcttccccttgcctggtctatcacgaaggtgtagattctcatgctcatgtctttttttattgtgtttactccaagcttgttctgaaatgagttcggacatggcttagcactacaatgtgaccaatcaattacgtggattggatcacttggacaaaagtaaaacgaaccaaaaacatgttgtcagctgttatctatgctaccttggttaccactgtttacagtatttggtggaatcaaaacctttgtatctttgagcataagcctttgttgatttctcatgttgataaattgattaaaaactccttaaatgctagagttttgttctttaaaaggaggattcttgcctgtagggatagagttatagtacatttcattagaaaaatgtaaattgagtcttttgttttcttggtgaatgtaagcttgtaagttcttttcttaataataataataatatgattaaaccctttaactaaaactttaagtcaagttgttcccaaaatcaaaaaaaaaaaggaaaaaggaaaaaaggactttaggtcaagttgattccacttgaggatctacctttcgatattttgcttgaattgtggctttttaacgtttacttatatctcccattcacacccgttttgacatatttcagcgaattaagacaaaaaaaaaatgattcctttaaaaaataaatacaaagtaaatgatagaaaaaaagaaaagaaaaaatctaataatttaaacttgttttatcttttaaacaatcataggattcttaataggccatgagacgttaggaattacacatatatcgaatcagaataaaagctttaaaaagagatagtaattgacctcatcagttaaagaacttcattcctttctttcaattatttcttccattttattaatttccaaagttaagataggtctttctaagggttatttgcggcaaaacctcctaaagtggataggtttttgcaattaaccccctaatctaaaattttggt

SEQ ID NO: 298083 - DNA, 7851 bp, Cannabis indica
aaaagacacattaattaataggattcaacaacacgcccaaacaaaaaggtcttgagactttacctttaattctggagtcccacctttgtgccttgtgtaccgaaaatacatatcgcaaggcataaatactctctcaagaagagcaccagtacgttttactttgggagaccttctaagaacaatgggaagccactgcaatccagccccagggtcaacatcagtaggagccacatgagcctgaacatgctccaacatcactgataattccgtgcgcttccatgtcatttcgggttcacactctggaatagggagatttccactaccaagtgcttgctcaatcatctcaaagccaacttgaagcactgaatgaaatgaccgggctaaaacacgaccactgacagcagcaagcagaaatcttccctgttttatatgtagatgaaacctaaaggtgtcagtacttgcagttatgcgcctataaatggaagcaaacaggtcaatggtaaaacttacattggcctcttctgagtgaaggttaaactgtggctcaaaaacattcaccatgaaatgacgagttccatcttcttcagaaccattaagctttccatctttaactaaaagaatgccaaacaaaaatctctcttagcagaatataacaggtcatggtactaaaatttgattatcgccactagaaagtcaaaatctgataatccatatcacaaaacctagagtaaataaatgaatgataaaatccctaggtttaaaagtaaccgaaagtctctaattaaagttgttgaataaaaattgaaggatatcaaggaataccaattgcaacagatgacaagttctccattttaagtgcaggcaacgagttttctactttgactgaatgtgacggagatgaaactgatcccgatgtctctgtatgttggttaggaacacttacaccttggctggtagtaaggggctttaagatcccatcttgctgtgtatcagatccatcacgtacttggttctcctcaagcaattttctctgtgcaaactgtcgagatggagaaggtttcgggggttcaaatgctttggatataccaccaacccaagaccagacaacatctctattctctattgtccacaaaagcttgagaccaaaaacaaaacacgctggcaattgtcagctattaccacattgtacccatcatcataacttggatcagatcttgtatgctcatcactctcactatcattttcatactcagacctcacatatgttatctcgtcatttctttttccagcttcttgccaagctaacaacgtagcagggtcagccttaggagcttgccttctgattgtgaaataatcagatgataacaaaaatccatcatcactatgcttctctgagaagttgttcgtgttgttacctttttcaccaggaactttctcacttgatgcaggttgtgtgtttttccttatcatttgaaccatttttgcaatactggtactttggtttttatttagaaatgccttaagcacatgaaggtcaagaccctggtaaacaagatcaagagggtcacgcttgcattcaaaagtgtacttttgcttccctcgactataacagagttcatattttagctgatccatattgaatgtcagtcctttggctggatcatcatcatctagtggcatatgctttatacaagtaggagtagcatctatacggagcatgaattcagtcataactttgtctaaggacaagttgcctgaccttggaactcttggaattccaaaacgaggccaacgagagaaggaacgcagtttgtgaggaggaatataattcatgttccagaaccttagcatccatgctaggtcatgagctccaaaattcactgttggaggatcatgaacagttccatctacatcagcagtgtctctcatggtagaagattgcttttcacaagaagaaggtagagaaaagttccagcgcagagacaacgaagtagatcggaagggatcgtagacttttatgcgaggttccccttcatgtggaagtgcatataaataatgattcaaaggagtgccagattcacattcccaatccattgtaacttcaagggtaaactccggtgcttcaataagtgcaattgacacagctctaggaagttttacaccacgactgcttgctaaactctctaaactgctaactaaaatcttaaaatccttggcggaaacataaacacggccatctgactgttgaatctccataaaactagagataatttgaagtttgtcaagcttctcataaggatcaacagttccaagaacattccatatggtttcagaaaactttaaggtgatacttccatgaatgtaatttcttacttcatcccaccaaggtaaacttcgctccttttttaacggctgtgtttgtgaaatggatgtaccagaagaatctctcacacttaaattagccctacgaagagccacagtaaaagcatagctaatatcagcaaaagctggctcatatcccactccaaatgacacttctgctttctgaaaatgaagaggcagatctgaatatgttttcattggtggagttgtaccactagcagatcgaagcatgcgcacttttctccatttcccaatgaagacatcttggtaaatttgaggttgaaaacaagttgcctaaatcaaagaattacagcacaacgttaaaaatgcttccatagcagataaatgaaataagtaaagccaaacagttttacacccctagacataaactttctagtaaacgatatccaatgatatgaaacaagaaacctgaataagaaggtaatcattagttcaattgacccaaagatgtacacaagtaaaaagttccacattttgtcatttgaactaatgataaccttatatggtgcttttgatgcatgataaatttagtattaacatttggtgcaaaactttcgatagtccaaacaagattgcttctcaacaaacactagctttgttttttaaaagtacaaaaacaggtatattcaagtaaaagcctgtattcagcaatccttttaccctattcaatatgctttacttatctctttccttaaagaagtatacagagaagacaattacgcataaaaaaaaagaataataacaatttggcacaagacagaaggagacctacctgctgcgcaagcacaacacgaccttcacatttcccagaagtagcagaaaacaggggaagagtataatttcgtagctgaaccacaagagagcttgtatgcaagttaatattcctcccatacattctagaaaatggtatattattttcattacagacaggatcaagcttctttaaaacctctatcatgccatcatccccaccatcaatccttgtcaagcttaaatccaaatcagtagctgtaatggagagaagagaagttctagcagtgcttggcctaaaaccagactgaaaccctgtacggcaagctcctgaaccttctgatggtaatagattttgacatgccttgtaatatgataggaatgatttttcataaatttcttcctgcattttagtgacagctgaatgatcttgtatatcaatctcaattccattaaagcaaacctttctttcctgactagagtcacttgtatcagcagttttagagctttggttcagcttgcatacataatcatcaagaaatttctgtctaacagctaactctgaggcctcattcttcatcagttgaaaatgttcatcaagccaaccctgcattggctcctcctcgatatcagcagttagcttgcgtatgtaaaacttgagacagcctaaatttattgagctgggcttcttagcttttaggttatctttcttcaccggaaaaataagactagttttagcagcagttactagtttaagacagcgcaacatatcctcaacagaatcatcaatagcacgcaattgcaacctgtatggcatgcaaatgtgaacatcaaggccttgaattacccaatcccatgtgttacttacaggtcctttcacaccagatgaacccattgagacactaggaatacgtgaaatttgcatgcggctacttttgaatactctggaaccattaaaactaagtataagcccttcaagaagtactccaatacgggcattttcagagaaaattgactgaacctgaaccagtgcatcaaccccatctccagcctcagccgatatgctcagcatctccacatcaacagcaaaaatagactcctttttcttgtgcttatcagaagttcctgattcagcagtggcatgtttcttctcttcagcatctcccataaactcattacttcgttgctgaagcttctgattgtgtacaagtgactttaatttcaaactcagttcaaagagcattagatgtacatcaggctcccacctaactgtaatatcagttgcactgaaaagagaacatacagaaatctctttaagaccaccagaacgtcgtacaaatttagcattttgcatgtcaaacagtgtcacttttgtttccattttttgctcatccaaatattcctgataaattgatctggctcgttcaagttccatctgtgttgactgtttatccttgtttacacacaaactgaaatgaaatacgtcaagagaaatggaatactttaactttttggattcattagaaagtgtagacattatgtttgcacgtcgaggtgtgccatcagctgagacacttattataactcgaccaccttgtgatccataatttacacgcttagggtcatcaataacagtattttccagaactgattcaccactgaaatttacagaacacctttcaagattaaacttcaaaagtcgagttcccttccccgacgatttggatgaacgccccccaccacgcccctgtgatgttctttttccagaggcagaaagagttttcaagagcgcttgaaaagacatagctgttgatataattgactcaacacgcttgaaagtcaaataaacacccataccagttacatcaacagacaaaaccaatttacacctgggaccatcttcttcagatgattccatatccttcttgccccaatccaaactaacctttgctatgtgcactaaggaaccagaatttgattcaacaccaaaagggttttctttcaagcattcttggtattcatctgctaggtgcaaatttaattctccaagttccatgtgtacagcggttccagtatcagaaatgttatttgcatatacgtgcgatgattgagagcaaccctacattagaaaaatcaaaatcaactgtcatatttataataattaaaaaaagtagaagtagacccaatattacacagccgaatactaacaacccaagcttaaaaacaaaatcttttgcttcttacaaacatagagtgtcaaagaggaaagacacttacagaaatccaaaggatacatataacaataataatatataaacacatcacttacatgatatagtggcacaccactgatactataaagaacaatagtcatctcaggagctgaaagagtacatgtccacataatagctttggcatcactaactggtgggcttttaatagaagaaacttcatcctgcagcaccattctcttctttttagaaaaatggaggcgcaaccatggctgtaatctacttattataatgttgcatcgagtaccgccaagttttacatcaacttcagctctaataggtaatgatggctgaaaattaacatttataccagtcagtcaatactcgaagaatttgcaaaggaatatagctgaagagaatactcgataaattgaaaataacaaacataataatgaaggtattttgtgataatatggctgcaatcagtattgctaaaatcaagtccgacagaactaagcaagtcgagctataacaacattttatcaatgcaaagattgagaattccatgttgtctttaaatcgtataacttataagtgcaatctattttttttctttttttaagaaaaagaaatttctttaaatcgtatgtgtcaatcataatttttgttttctttttttggaaaaagacacagagttcatgtcttagactgacctcctcacaagtttataagggagcctcacttatcgtgctttgtctccaagatggtgtgtgatgtaaaactgatggagaaagtgttatcatttattccttaattgttcttgttggagctatggtttaaagttttgaatgaatttgacatggaatgggttataacttcagctctaatttctagaaaacattaatccaataagtatttaaactataataataataataataataaccaaatcactagctcaaaattctaataccactaaaatcaatcttgcccaaacagatacacgacatctcagacacaatactaccagttttatagcaccatacttacctgtgtaggaacatagacaaatgagacgacatccacttttagtatctccaggacagaagagccagcttctctaagtagctaaaatgcaaaaggaagaaaaatgtcaagaagggtcaagatgttgacgtaattactaacagctctaataatctttcaataatagcaacacccttacatgaatctcactaaaatccagttgaacgtcaatgcgtgtactatctcccgcatcttcactggcttgtgatttgatgctcttcaactggattcccattatgttattctcaacaacaatattgtgttctcggtgcacaaatttcacatccaactttggtaaattgaagcacagctataaaaagcacaacaatagaactttcattatctgttaaaaacttagaactattaacacaaacacagtcctcagtgccactcgagcaacgtaaggtactatatgtagctatcacagaataaacaattttacaaaccttctctggaattacagaggtatactttgaaagagcagcagcagcgcgtggttttttgtttacgtttttagtgtccaaagagcgaacagttgactctatagctacatcagactgataagaagcttgtgatgaaatcttgctttttgaaagcatctcctcatttaggttcacagtgacctcccacattctatgtccacattcttgatgactacaccaacttccctacgttcaaatgaaaataaataaataataacaattagctgtctttcctttaataagattataggtttgagctgattaaaaaaggcaacacaaaagtacaccacaaacaatagtcttggtgactgaatatttaaacagtacctatcatgaccaaattcagaacagagagaaaactcttcacagacaaaagcagcagatgatctttccaaaatggcagagctcaaagtgccggtgggaaggcatcctccagagctgaaactggaggactgatcacacataactcgttggtcacccaagtgaacaacaataggcaatatatgtagcttaacagacagattttgcttagattgagaatctttagatatgtcaactatcagttccttcacttcaagagtagcttttggcgtctgcaacatttcaaaatagtatttaccacccaagaaaaaagaaagtacaaccaaacaaccattagaaatgagaagctaaaagtgtttctgctgaagagtacatggacaaaagttttggtcgtactatactaagcagatagaaaaatctgtgcttagctatggtgggatttgtgtttaagagagagaaaagagagagaggggtggtagagcagagagagatttgaagttgcacagctgttcgcaagggactccatggataaacaccacaccgaattctgtaacattcacaatgaaaacattaatgac

SEQ ID NO: 298084 - DNA, 5978 bp, Cannabis indica
aaattaaaaaaaaaaaattaaacttcgctgctagttatgatgaatgtgaatgactatatatgctgtctacgttaattgatgcacttcatattattatgtttgtttttttttagaatattatcttcggggctattattctttgcgtgattttgtgataagaaatataacaaagttgtgtaattctttattatattatttgatgataagaaagtaatttttttgctaaatgtctttaataaaagagttaaggatacactatgagggttataagattattcgtatagtttaggataaatagtaatcctcagtacttatctatctttatggaagagatctcatttaaaaaactaaagcataaatattgttttaattatgccccccattcagccattaatagattattttattattattttcattatatctaggttttgacaaataatgagaagatgctggagcctacatgcagatacctatctcttcaatttcttttagcataatttttttagaaaaatctgatcgcttcagggaatatattatgacctatagggtcatgtaatttgttgcatggacaataatgtaactaaggctaaagtagtaatattcatatttatatgtgtgtgaatattttatagtatacattagattcagtatcgaggaattcaatttaacatgttgtgtggtcatgttttttgtaaagtggtctaatgacttgagtgatataggtatagtataaacattatttataacaaggcaccgactatggtaaagaatctctttgaagctttattttttggtttggtattaacccatatattaatgataaatttgtgtagaagtccaaaaaaccttaacattaattctttgggaggtgcaagtgtttttatttatttctccttatagtcaaattaacctgcttattgttttatttattttattttttgattgactaatttataattagagttttcagttattagttctcattaatatttttttcttagttagatccttgatgtagaaaagagagcgtttctatgtgatatgtgacgaatataattgtttgaacatgaaaacccagtggttaatttctcaagattttccttgagccgattgtgttatttggagcttcatatttgaacatgaaaacccagtggttaatttctcaagattttccttgagccgattgtgttatttggagcttcatatttattttgacatatattattatcataggatgggagagagagaaaataaaaacttgatttatgagttattgcaactctatttaccaatagatgaatctcgtttttaatcatcttatagattgtttccatatttttcaaggtgtgaaatcatcagcacttggtcgcttagagtgtaagatacatcattaattatgagtttcttgtctgtaccagggaaatgttcaaaaattcaaactacaaaatcatgtgattgcaaaaaggctgaagaggaagttttcaacagatatctcaaattctgattctgtctggggaaataaaacaagtcctaaatgcttagctacactagagaagcaaaaatttttgatccaccgaaattgatcgtgaggaaccaggaacctgccttacccattcgcagcattcttaagaatcataccacttgtgagccgaaatctactactgttgatgaagattttcaatgtggtagtgaagccaatccttgtggtattctacaatcagaaaggcatgttcgtttttcggacaaagaggacatacttggaccgaagagtaaagaggtttgttcttctgagcaaaatgataggaactcactttcagatgcacttgctgcttcatcagaagatgttcagtcatctgacaataaatcagcagctgtggagatagagagaagtgatgtcgatagcacttttggcactgattttggaagtgaggttcgaagcatatttggagggaaacagttggctgatatccatcatgcagatcttccaagttctccgaggctacctgtaactattcgtgacaaaatgaacctttttcctgagaaaagttctttacctttaagtcaatgcgcattttatggtactaatttgcatatggttggtcaagactttgaaaacaaaaatcttaaacatggttttagtggcacacctggactcttttcaccattggaaggatctcatggaagcactcaagcaactggtaatgtttctagaattttcaattcttgtggaagatcaaattatcattttccagatcctactcacaaagttgctgagattatgccaatgatagagacgagaccattttcagaaccatcatccagtttcactgccaatgaaaattcaagccgtaggcttcagttccaatcacaacctgctgtggaaaacgctcgttgtcatactttatgctaccaacaattatgtcgtaggcgtccaatggacttagttggtgggttttgttcttttccagagtggaatcatagagcagtgacctcaagagaaaggaccagggaggaggatttcttcggcttgcccctcaattcacaaggtgagttaatccaatcaaattcaaggggtaaaggtttgtataatcagctgagggagacaaattttgctgggccttcaagtagcttttacgcgtcacataatcttacccagccaagaattactgcagactacttgagtgttactaacaagcattctgtagagagagatcttccaaatgatcgggtaaatctgttccttacacagaattatgttaaagagaactctagcttacaagttcctgcaactaggttaggtgttagttattgggaaagtagtggcaaagcagatattcaacagcttgatttcggaagagtaagtaatcattcttttcggccacttgatgcagatcttaagctaatgggtacttcttttcttggaagcagacattatgaccacttgcagaaccaaataataaatgaaaggcttcaacagaaggaaagttctggtaagacggcacagaataccagccaaccaacgatgcgtttaatgggaaaagatgttgcaattggtagaagtagcacagaaatgcaagtaaaggacgatagtaataaggtttggaccgataaagaaattatagtagagcactgtccatcagttgctggcctggattgttcttcactgaaaagaaattttcaggagtggattccacaaaagtgtaaagagaatgtggggagatctctagatcttcacagtgagaagtctactcaaacaaatttaccaatgaaagcaacagagtctagttcatatccttaccttgacagagagaaaagttccttaatttcaagtgatagccttgctactgatagaagtcctagtgctacttcactccctttctctcgtttacctcattcatcttcagtatttaatcgggaacccaatctccaggatttctttatttcaggaactgaatcacgacttgtttctcaacatccggtgctatctactccacagaattcttggcagtatatggattggagaccagctgaactcaatcaccatcagaccttaccccattttacaaaaccaggatttgagtttcctttcttaaatccagattctagggtagatgtccaatcctcatggtttcagaactccaagagcctgccctcttggttattacctgcaaggcaacatggaaatacatcaatgattgcttctcagttgattccaaatgcaataagcaaacaacatcagcacatttcatccagaacaagttttctcaacactccatctgtttaccattcaggagaggcttgctctttttcttgtaatccaggaggcaattcgcatttccaagtgaggagctcatttgattcagcagacgctgtaactctcccttcaactgttccagtcatccccgggttaaaaccaacatctgtcattgatgcaggctacagaaataggttgaagatcaaagaaagacttaaaccgaaagctttgggtgtgaaagacctttatccttacaagaaaacaaacaagaggcttcataccaaattgcacgatctagtgaagtccaaagaaattctgaactctaaaaagcaagcaaattcgagtgttatggcgagatgcttagagaattcaaacaatgaaagacaatctgatatggtggaagaattccttcattcaaacagatattattcaagtgaattttgtagcagtggaatcaaaatatctgcgaacgagtgtccaagtgctgatggttcaggaagaccaggtcctatgaaacttagcgcgggagcaaagcacattttgaaaccaaaccaaaatgttgatccagaaaacttcacgcctgtcgtccactctaccatcccctttaccgccgttcctaatcctaacgcgaataaggtgcctgactctcataacaaatcaacaaaaatctacaggttttagaagtagctagtaagtcattgtatatatgctagtactagttatatatttcaataattatattacttgatgtttaaaggttattaaccttaacatggttactgcctaggtaggagagagtagagtgtgctgctcatatatctgaccacatgggcctctgagttcgatcgaagaaacctgtgatgagtagcaatcaacaatccaacaatgtgggaaatgtgatagcatatggttagaatctatgccaaaagcttgtttctttgtgtgtggcatttgtaatattatatgtatgtttgtgttaatgttagcttttatgcttgcctcaaaacatagttttcctctgagcaagcttaaattataaggaataggaatatgtactttaatatggagaatatgtattcgactcattactatattgggctgtttttggaattatcatgagttggaatattggtgatgattagtttttttccttgcaaaataattattattatttatagttgcgtccttcaatttgaatttttaatttttaaaattacaactttattgtactacaagtaaaatcataaaagatatataagtcacattcacatatttcaaatatttatatatattatttacatataccaacccctatggcaattcgtgtttgtgtgtcgtatgtgtcgtgtaacttaggtattacaaggaaataccaaactcaaactcgtcccatttactaatcatgttgaaaagtaaaactcattttttttataaacgggtttacctgatacgatgtcacgactcatttaacctatttatataaaaatttaattttgattagcttatcaactcattaacatgttataacaagtttgacatatttatattctatttaactaaaaaaatataattcccatgttataaatataataaatttaaaagtgtatactctatgtaggtaaatatcgtgttattttgagttaagcgtgtcaactcaaaaatgactagtttaataaacgggttagttgtgtcaacccaaaaaatgacccaaattcatttacagggaacccaaaaccgtttatttcgtgcgagtttcgaatcgtattatcgtttctgacccattccaaaattctaaaagtatttttatatatatgtttatatatataagctaccattaatataaaaggagaaaatactagctagctagatgcaaatatccaaacacttgcatcttgcgtggtagatacaaattgttaagaattatggagttccatctcaaaatcaattggtgatgaatggagtagcccatgttcttatatatgactcaatacttttacatttaatccacgtgggacaatattttccaatatcctcaagatagtgactatttttgctcaccaatcttaaatcgccttatcataagtagtgtcatttggtcgtttttcttaacaaaaatttgcggttgggagttctatttgctcgcttcttcttgttcgcggctaggggtaccattttgctcgcttgcggctggctaactctttgataggtgtggatcaaaaag

SEQ ID NO: 298085 - DNA, 4112 bp, Cannabis indica
tccatggaatactccccgaacagcttgagggggcatgttgaggaaaagaatgacagttgtgattaactaacaactgtcaagaattaggtagttagttagagttgttatgtctgttattttgttgagattctttctgttctatcagttatatatactggtattataagagggtattcattcaataaagatcttcactttgtttcactttctttctctcttttctctctgtgtttttctctctttacctaaatcaactgtcatatatattcactatataaaaagtaattgctttggctacaggatgtgatgaatgatccttgtgctgcggctgatggctacacttctgattgtaaagccaccatagtaatgtagctttaatccactgtcaatccaccaatgaccaatttgccattgtcaaccaagaatctattaccaaattacactcttctttctgctattatggattggaagtccaaataaaatcaaataactttttcttttctcttttagggagacattgattgtatagagtgatggagttgcttaatctaaaaggttcaaagggttttagattagtttagcttagcttagactctagatgtaatctgttcatattttggagcattgagtttcatgaatgttgaacttagtttcttgttttaagagattagcccatgtgtgctatggtcttctaacttgtaatttctcacttcaaattaatttgtgatatataatataactaatttcacacataaacgtggcaaaaaatttcgtcccaacttcccaataaaggatctatgttttgggttagataattggagctacaccgaaattagtatgctattctttaacctcttgttcctgttctctcatttttattcccaaacaaaacatgtttttatagacatgaacaaaatatccaaattgttatgcatgtttcactcgattaagcttacctcttaaaatcatgtaactaaattctcttaagaatactccatcaatgcatatatatttattagcagagtgagctagtttgcatgggtatcttcaagatgtgtgtggcacagtaacacattaaccatagtggagtcggacaggaaatataacatcattttagatggattcaaaatatttattcacatatgtaattacattaattcacaaaacttaatccaacaacaagaatttgtagagatagatgcacactgtaactgtttatagtaagaacttccataaagtttgaacttcaatagttctattaatttacaataactcatcttacagttcatcatggtcaagaaaagtctcaaattgattctcttcctgcaacccaacgacatttccaagcacacttagagttgaagatggcaagtcttttggagtgaaggcttatgatcttggatgttgatggcgattgagaaagcacaatggcgtaaccgatcatccatgtagtctgtcccttgagggaatagctgccacagaaggcttccacctccacttcctcctttcttgtggagttcaaaagggtatcatacaccgtttcgataagggtgtccctgaatgatgaattgtatccggggtcctttgtagatactccaaattctgaaaacactactggcattccaagatatctttcggcgtcctctatgtgagcttccatccatgatttggtgaatgtaacatggacatcagagatagattgagaaatccttcaccaatgaatttcatatttggtcagaagttgttatgcacatgtacaagttgttgaaacaattttcatcctttccggaaagaaaaatatcatctttttaattcctagtttggttagaaatatagaaaatgtcattattaacagagtatgaatgcaacatttttgcttataaattaagcattaaacacttgcatatatgaatctctaactctcccttgacacgtaccaagaatctgcatagatgtgaactgaagcaaaatcaacaccaagaacttggtggtttctaataaagtcagttccgacttgttgagcatatgtgttggggttgatttgaaccttatttggagttgagggaccataaaatccttctgttccaatctctaccaagtgctttggatccatgctcttcacatacactgccatttcttgtatccaggactagaaaagatgttcaaccagagttactctcatcatccaaaacatataggaagaaacatattttaatcactatagagtcattgaagaaaattaaacctgaagcatatcgccagagggatctgaggtacatcgaggctcattaatcagttcccaagcaaagattgtgggatcatccttgtaagttatattggttactgtatttaatctatttagcactgtctgcaaggtacaaatacaagtgaagtgtgttatatgaatttctcaagtttgattgcaactttgcaaccaccaccacaacttggttatgaaaaaaaaaaggagaaaaatacttgccttaacatgagccttgtagtagcttctgagagtagggtgagagaaaaagtcatcatcagaagttaaattcagtccagcagcttttccccatttaacatattgtggttttccaccataggcatcccaattgttaaccagtgaaagtataagcctgatcttgtatttccttgcttcacttacaacaaaatctaaagcctgcaaatccaaagagaattgattaagttactatgaatttagttacaaatatgaaacttctcaaacaacttgaatgaaattttggttcaattttcctagacatcctcaattaacaaacaagttctaatatcattagaaagaaaaataacacttctaagtgtttgatacaacgtgcagacgagaacttaaataagctaacaaattcaaaactaactgatacaacagtttaacaaattcaagcaaagtaagctatgtcctaatagttattaatagattaaaggtgatgaaaaaatgtgggggttaagataccttgaaaacatcttcatcataaactgacggggacttctgaagagctctccactgaccatcgttaaaagcccaagtccggcaaactgtcaaacctgcagaagatgcctctttgaaaacctcagagactttccctcttgtggattgatccgcagcaaacaccatcaaccaataagtgttgaaaccatttacataaaaaggttgatcattgatcacaaattggtttcctttcttttgcaccatttcccatgactcatctttcatctcactcacctcatcaaccctaaagagtacatacattgtaataagaaaaatccattgtaatacaatataaaataaaagataatataattaatgattatctgatactattactaacccatcatttgtgccagaaaataatgaaagatcatccacttcatcaaatgagttgcttccaaaatccatagtgccactgcctgcatatatagagacactgaaataactactaaaaagcaaagcaattgctaccagaaaagttgttttttgattatccatagttgcattagacttgttatgcatttcatatatgcatagctcgagtagtttatatatatattcatagctgaacaaagttttgagagtgagggttgagaaaaatgtgatgaagaagaaaagtgtgaaagaggagaatgatctattacactttgatttgaaggaacgctctattagtttgtaattcttctttgtgctaatgcccacaaatggcatgagatgagaacaacaatgaagacaagtgtaggagtaaagttgcaacttggatcaatattgcaaattccaaggtacgtcaaaacgtgggtcctaaccaagtactccaagtcctcatgatattaaaccaagaaaggaactatgtagatattgttgtatcatctctagaataattaactacgattgctttttttagaaccaagaaagaaaccaggtagatattgttatattattttatataatataacagacaagggtgctaaaacagacaagggtacatcaatgtatccattttaagggggtgcattgtagaatttcccaatattattttttttatatatttttaatttttttttctgattttataatttttttaatattt

SEQ ID NO: 298086 - DNA, 3159 bp, Cannabis indica
tttgttgttgattttttgttacatgtatgttattttttgtcgttattttcatgttacttttatgtagttttcttgttgattttatggtgtttttgtgttattttttggaaaacaataaaatgtaaaaaaacattctttgaacgtaaaaaatattttacaaaaaataatgccttatatcttaattatacaattaataataatacataacagtccatttaatactatcgatctataaataaattattattttttatatgaaatttataaagaaaaacatataaaaaatactagaaaatttgcttttgtttagtttaaaatattctcacaattgccacacaaccaagttattggggtcaatcttttttcttcttaaaattgtgttggtattttctttatttttttccttaaattaatatttatttacatcttgaccccctctcaaaaagaattctcttttgcccctcactattactttcattatatatatgtgtagatcatcattagttatgcattatgtcacatattttatacaaatgattatcatcatcaatatgtatatataggtaataaataatatataacatgtacaaagtggaaacaatcaatgtcactatgatcttatctaatacatatattaattgcatatttaccgtgaaatttctttaatatttataattatcacacatataattttaattaaaaaaaataatagtaaaagtattttattttacaattttattacaattgtattcttttttagttattaaatgccaaataagacaattaagtgtcagctcaaaaatacatgatgatttatttttttaacttatttaataagtaatttaataatatatcgtcatcatgtatttctgagttgatacttaacagttaaaaaatatacaactacaacaaaattataagataaaatatgctactttttatttaaaatcatatatataacaattataaatattaaaagatttcaccacaaaattcctacatagatgtatatttgtaatgataccgccgaatacttatgctcattttagatcatgttatgatgaggtagttggcaaataattatatatgtattatatatatatagcattaattaatatttatgctttaatgtgtatttgtatatgtagtagcatcatcatctcttttccattttctacaaagccattccataatgtcaatgttctttatttgatcaatctaaatgcaattattataaaagtagcatatatgctttttagcaaaaatgataatgatcattccaaaaattaaaggttataattaagataactacattaccttcaacaacaacaactaaataaattatgtactaaagtcaacacattctctcattgaacaatgtgaagagcttaactactatattggaaattaaatacccgtaagtgagaagatagaatacaattttcttatgattattagtctttaaaattgtaaactacaaaattaagcaaacaaacaccattgaaaaaataggttcctttgccaattagctaatcttatttcaagacaagtaactatcacattaattattcaatattaattgttctcaatctcattaaatgtttttcttatattcaatgagaaatgtataattaataaatttattcttatttatttgtttattttgtttattattattgttattattattatttgaaagggttcactaaatgtataatgatgtgtataattcaactccctcatttttccacaataatttcttgtacgtaatctgtataagtataggccgacccatacatatttatttttatatgcaatatctatattaaattaaggaagtttcatataaacaaaaatgtaacaaatttaatagttttatagttttttttttaaagagaaatgattttttttttaatcaaatctgacaataattcgttacataataatatatcatttaagataaacaaactgtgttgtttacaaaaataaaaatataaactctaataaaccttcaaataaaatatatacaactataatcgtcaacattgaagtatcaaagaatcacaaaaaatactagatctctaattcaaatgaacatttgacaaatcacactcatcaatgattattagccaaagatcttctaataaaaagtgcccgcgtaataacaaccctaggtattattctagaataaaaggaaatagtgaaacgaccaaccatagcgatcgataacaatcgtaacaaacaatcgcaccataaactatgaggctaataaaaatcttagaatcccccaaatttgatcatggacaatgatagtcatgctactaacaaaatatgatttgaaccaattgaaattaataaaaccctactactataacaatagcaatgtggtgtacaatacattattgaaaataaaaataaacaacacactaagaggactaacagcagtgaagagctactccaaaaccaatagacaactcaaatttccaagacacacctctaaagaaagaacactcaggaagaaggatagcaacaactctagtgaaatcgaaaatagtgtgggaatcaataagactcgatgccaaagccatgtcataaggccaagaaacagccaacgagcctagtcaggcaaaaaaaatcaagtagtggataagaaattctagagagaaaccctagaaagaatatagtgatattgcatataattatattatattttttagagttctttatggtactgaattaggtacaaagcggaagatcttgtttccatagcgtcgaggatcaccacatacactaaatttgaaatataaattacatgaaagaaataaataccactcgatgacaatctgggtatcctcaaaatttcttgtaatttggatttgataaatcacacaccaaatcaatccaccacacacaaagagtagtgtgatctactaagataaagtgtataatttgttcttgttgaattcccaacacatgagcaagaattgttcttgagagaaaaataaatttctttatctctaattttattcaaatttaatttagaaataaatattccgatttctcaaagggaaatttgattttctatacttaaatatacctaatattttatccctaaactcatacatatcaccattgaaaatatatgactactttatctaa

SEQ ID NO: 298087 - DNA, 1514 bp, Cannabis indica
acttcaatgattaactttttaagtaaagttatctctttaaatgtgaaatatattctcttacatattacttcattcacaatgtggtacaaaaggtcataaaatatagtcatcaaaatgagtatcaattgtttaccatttaccaaacttaataacaatggactatcctttataattataataaatcaaaatgggattttttttaaggtaaatgaaaatttttattaataggtaaaccgaatataatttattatatggagatattacttatggagcagaattaatattaataaactaattaaactatttacactaaaaatgaaaaaaaaatgaaggacacttgaatttttgatattttttttatttctcatcaaatgaatgtttttttttttttgtaagatctttactattcttagcataatattagagaatctcaattgctttttaactaaataacttatataaacataagaaaaatatataaaaaatattaaatttttatctagaatgaaaatgagacatatcacacttattaaaattaggatatttttctctctaaacaatgaaaagagagtattttgtatttttctgtttttatattatatacatttatttatttttgtaatttagtagtatgcaatgcatagaagatattaatatatagaggtgatatgtaaaagaggccagagagagaaacagcagcagtccaagacagaagaagacgcgtggcattattagctggcagattgtccaagtggctaccttttgtgggcccagcccaatattaggtgtctcactctcagcccactttatttatttttggattctctttggttgagttgagaccccacttgactcgactcgctcgctcactcactcactcacccctaaaacaagctaaactctccccatcatataatatagtttaatttagataataataataattaataataatatgtggcctcttaatcttcactaaagtcattttcattgtattattcaattcaattagagacctaagtgccagctattttaccaaacttatcatatcattatatttatataaacacttatatatatgtatatactcttgttatagattctcctaacaataatcaaagttttcttttctttttgagtttattgtacataaacaataattatggttcaacctttattcccttcctctcaccaaaaccaccaacttagaaatttttataacatatcaaagtctatataatttattacttcatttatattgaatggatgaatgaggtgttttccctgaaaaatgatgagaaatgttgaaaaacattttaaagtgtcctatactataagtaaatatcatattataagtaatcagagtcgattttaagttatataaaaaattattttaagataggtgaactctaagcgtggatttagtctgcctatatttaaaggttaattagtaattttttcctgaactttacatgtattaaatcgtgccctctgaatatttttggtcgttaaaa

SEQ ID NO: 298088 - DNA, 1346 bp, Cannabis indica
agatagattaaaagtccattggagtagctgggttgagtgaatcagagacgttgccttaaataatgaacattcataaggcaagcctagatttttgcagaaaaaagaaaagaaaaatgcatcacctcaaatgcaagaaaaaagaggtaaatgtattcaaattcaaggcacttactcactggggatagggccttgaagttctctgggtcgaatgcttgaaaatcgccaacatgttcttgcaattcaaagaagtggaatagagctatctaattctttgaaggatgaaaaatgatgaatgaagttcttatttcacttttatatataaaaccttccaggggtacaatggtaatttgggcactcaaaccaacctttcatttcccacaaaaagttggtaataagtgctctatagaagcattattgccagcgcaattacctagggcacgaaacccttgttgtagcattaaataccctacataattgaagggatttaaaacgacaacctaggatttcatgattgcctatatcaccacgtatcgccttactcacctagatcgtgggccgagcaagtccccgcgccaaccaggaggttcctacgcagagttgggggcaaatgttatcccaaatattagtcagatgacgtggcaggttcctttgggtgacacgtatctctaccacaagacgtgggtggataaaagagcttcatgaatcaaccgcccaagatgtattcaaattgacaaaaatatcagataggttaaatgtaattttccacatagcttcaacacgtgcagacgtggtcagaggaaagtagtacgaatctcgtacaggccggccagagaaaaaacgcacgttataaataaaattaataacagtcattgtttaaatatgtaattaatcactactacaaaaaccccatttagaggcattttttagccctttcagtgtcaatttttgcaaaattcgctaccgacgttgattagggcgacgctaaagggttataaaccatcgccgccatacgtaccctatggcgtcggttattagctaggaactgacgccatagggtacatatggcgtcggttcagttcctagctaataaccgacgccatatatgagcgtttttcaatttttttaatttatataatttatttaaattatatatttattaatttacatattattttagttaatttaaatttaaattatatatttattttttaaaaggtaaattaaatattgtttaaattaattttataatcggctaaatacataatttcatttcacaaagtaattaaatattacacaaacattgtaaaattagtccaagtattaataagttaataaatctaactaca

SEQ ID NO: 298089 - DNA, 2265 bp, Cannabis indica
tccagattcagatcttgattatgctctactacagaaaggaatcaagggctagagattaggatgttaatcaaacatacttgttaaaaaatctagatcctggtaaaataatttccaacagaaacaactaagcaccttttctttaactgctaactagcccaggattggttgaagattgtcaagaactggctgtcctggggtgccctttccactgatcttgacaagctcctgcggtggataaatcgagcaaagatcaacacttttaagaagaaagtttttattgcggctgtagctagactaatgtactcagtatggtttgctagaattgataaaacatggaataacaagattgaaaatgtagatacaattgtaaagaaaatacagtttactgtcaagcatagaattgattccttttggccaaaaaaagtgaatcagaaagatagagaatggtaccaaactttgtaatattttagaaatattcttgaggtctcttaatgtagagatgctcttactttgtaaatgatttgtggattaatacattgcagatttatcaaaaaaaaaattaattaaataaaaacagagaaagtttttcagtcttttataattttaagttgtattgtaacaagtagctaaaggtctagattcttaaatcacctggggataacatatatgtagtatcccttcaaaattacaaaagcgagttaacattaagtatgggagtagaaagtattgtctgaaactggagcttcaagaaactagaagtaaccagctatcttaccatattttaaagttaataaatttccaagtcaattcaggttggctaaattataaagaagtccatgcttcaaaaatagttaatcttagaagttcaagcttcaagataaaagcaaaggctttaggataaaactggaacctcaaggatttgaaagtaagcaataattattaaatttttcaaaaaataaattgttgaaattctaaagtccatgccattggaaccaggatctcaagaaatccaaaagtaaacaacgtgtcctagaaaaattaaagtctaaacatataagttaaaatcctaaggttcaagccattggaaccagaacctcaaggaacccaaaagtaaacttactgagcacatacaaattcattaaagttgtaacaaatacttaatgaatctaaacaatagtatgatgaataaaaaagtagtttagtaccttcaaaatctcaaatatttacatactaaaagccccgcacaaaaggcatattaaattatctctgcaaatgtaaaaggaggggcacttgttcctcaaaagcaacttaaaaataaaaaacataaataaagataagtttaaggcttggtgaggtgatctggttgagtattcgctgaagcttcagaagttagatgcaccaatggagctggaagagaagagtctaccagaaaggaagttaccagaggggtggtttcaggatcagtctcctctgcttatttcttggaacgattttatgatgcttcattctccaagagtttctctaataacatgtccctctccactccaagaatatctagaaccttggcatccaacttctaaatttgatgaagaatgactatcaatgagtgtttcagttcctattgtctccctgccttagttttagataactcttcttccaccagggccttttccttctcaaggttctcaagatcctccttagcttgttcttcagactcattaagagcaaattcctccctagtaagcttcgcagaaggtcagtctatgtggctttttatttctccaaagctttagcctcagacttttcaacttttggtaggatttcaagatgatgttgaatcttccaatccaaagtgaaaattttgataatcttctcgtcaaccagtttggtttgaaggtcatagtcttgagaagccttggtagcttgctttttaagagtcttgattttgtcattggcatccttcacttgctcttccaaattagcaacccgaggctgaggggtggtgaacctcttcttgtaatcatctccacaatccgtctcctttttagcttcctccttgagactagccatggaatagttaagtgtgacagtcagtagtcccgtgatccgtaaggggaaataccgggtaagctgtgcaatcccacaccgcctggggaaggtcaagtgggatgattctgagactatgtaggtatgggactacacagttgaagagggcttaaatagattgattggtactacctatatcaacaaggtgcatcttgtttt

SEQ ID NO: 298090 - DNA, 1078 bp, Cannabis indica
attattacttttattatatttatcatttattagttttttgtttttcttatatattcacatatataaaagcaacattatctcaaacttacaacccacaaacaaaaccctagccgcctccactactatttaccttcttcctcttttttttttatctggttcaactcatctctctccactgttgttctatttttttttatctccatgtctctcatacactcatcttggcataatctctctcaagcgaccggtttaagcagatctagcacaccccgtagttgtagagcagctcaattcgacaagaaattctcggtggcgctgtgtacgacaaagcgtataacagtggtggacgggtggttcaaggtgtttcagattggtggttcatggatttttgaagaggaggcccaatggtgacaagaaatgctcaatggcgctgggtgtacgacaaagcgtatagcaggggtggattggtggttcaaggtgtttccgattggtggcgcatgggttttggatgaggcaacacattggtcggacggttgttcaagggcttcgacgtggttactatttgtatcagtggttcaaagtattttcaaatactcttttttcctattttgtaataatatttttcatctttttaagagatatttctatataaatatgtataatgtgtatgcactaataatatttgttcttgaacaaatatatttttttatattaattattcagattcatataaataatttttaagttatattactaaataaaagtttaatcctaatataatatatatattataaatttgtttatattaataatatattattattttttttaaaataaatttactatttggcccgacatttaaatgtcgtgccactagataacttttaggcaacacagaatggggatgacatgtcgtgtctaaaagtagattggcacgaaaaatggagctttaaggcataatttttatcgtgccaacagacttgttttttctcttgtagtgtctacccgattggggcagtttagggtaccctagattttcatgtttttatgatatttagggtattgccatgttatctat

SEQ ID NO: 298091 - DNA, 2713 bp, Cannabis indica
atcccgagtcttttgtaatattgttttataagtttaattgaaaagcaaaattttaatcaatcacgttttccataaacctcgttgattagcaacgagctgcacagtatgtttaaaaattcacgtaatacgcctatgttagttagggtgttacactaactaggtgatcaaggagcagctcctctccgccatcagaccaacctacaaaataaggaacataagtaagttaaaacaatgtagaaacactaaaatcttatttgagttggaagagtatcgaacttacagcatttgcctgagtcctctcagagtcagccacgtacatcgggtccctactagcgatcatgacaaatctatcagtgccaagcctacaacttgtggtagcgctttgctctaatagatctgccaagagtgatgaaaaatcagtcccaacacgtggacggagtctctctgccagtttaaccttgttcacgataggagggacatccttgttccatttgtcataaccaacgaactcagcattgcgcctagaagagatgctagtagacaatttcttcatctcttcaacctcacagctatgcctttggtggtagcatttatccaccgtttccaatctggcttcctccccttccgtcaactgtataggcctgacaggaagtgtaaagggtgtcgaaggcaagggaggaaactcggtcctttgcctggacaactgggttgatgtggcaagaatcactttaggtgctaggggtggcggaagaaggtcttgcttgtcccttgacgaatgagtacttcatcttggtggccttccgtcatcagaagaggatgttcccttctaggatcgagagtctgtggcctgcctcctcgaggttgccagttgcaggactttctctttggtctctactctagccttctttctagcaccaccatcagtcaagctaacacgcttcttgttgggcatgatgggcccatcacagttagaactgtcttccctagaattctctaagggaacttggttcaaaggttccacaaaaaaggcaggctgtgtcgggtccacgatggcagtagatgctgcttccgtactcagagccttaggagcagcttccagattggggtacggggggtgctaacttttgagctttacttccgaaggcctggttctttctgccatcattactgctttgggcaatctccctaatctcatcagattgaacctggacactgcccaagaacttgtttagaagccctatctggagagtggctggttaatctgcttaaatcacacgaagcagtcattaaaagaaattatagcaagatgcaaattttacaacatgtaagcacgtaagacttgacttcaggatggtccaaaccattaatcctggcacaattgacttttcctctagcaaatagagagatgtcttctcaacctaaatttgttttgtattggaataatccagagaagtggatttgctaagtgcatccacttggacatgatggtgcacaggagggataaagtgattaggattgtggacaaagccctatctacatatctactaaaagaatacttatgacggtctaaatttaagaagtagggatcaaatcaacattgattgaccatctcaaaatcagacacagtgagagccctaattttacgaaaaggcgtctcaccactactgaaagtgctcgctcttggagcactttcattgggcatcacatcctagaagcggatggaaagttcttcagcctcactcaagctttctgggaattgtcttctgtagtcttctagccattgttcatcaaccttcaccgcctttaaagcctctttggtagaaataaccgcgatagcttctataacttctttcgagtcccccatcaaggactcttagactgactccttcatagagaggtgagttatatcctagtgtgggggcaatgagactcacttcccaaagattctccgtggtcaccagactctccacttgcaactccttgggtgagaaggatttgtagaagttgactctcttttccagctttagagtcaaggtggattgaggaaggcagtctggcatacaaaaagcattgatgaatcataatacaatgagtacaaaggaaaaataaaactttgtgacctaaaacaggaaacaagacttacttgcaagactgaagtctaaactaagggtgggaaccctcctcaatgggaagccggaggtgaagaagtaataatcccagaagtcttacgtgtactttgtatggctagttgggcaaggtacactcgtactgtatctctgcaactggtagaagcccaccttgtccttgtgaccccacatcgattacaatttgatctagtaaaaatataagacctcttacagcattggcgcatgtttgccttatttaacacaaaaaaaaaacatactatcccgctagaagacaatatacttgggggatgaaatggaagggtgatactctagctaaggtgcagaatttagaaaaatagcacctcaggggcaagtgtgcccccatcttgatatgggcctaactccatacactgaagcctccttctgcgcaccggttgggcctctctgtaagtatggaatgttgggaatattttaccaagatctagatttactaattgttgggaatattttaccaggatctagatttacaaacaagtatgttgaattaataccctaaatatgaattctctaaaacaataaaataaaca

SEQ ID NO: 298092 - DNA, 2581 bp, Cannabis indica
attattattattatatataattgaaaatcactaaaatattgctacttgcacaattaattaagttgaatttaaaaagtaatcatcaaaataaagaggtgtgatattaatctaatttgtttattgatgcagctgctactccaaaacaaatcagggagttgatgaaggtcgatggacttaccaatgatgaagtcaaaagccatttacaggtttgtgctattagttttcacctttcacaacaattagattaattactgatttttacaaaaaattattattatttttattgttaagagtaaaaaactaatgataatcttgcaatttttggtacagaaatatcgtttgcacactagaagaccaaccccagcaatacacaacaatggcaatgcacaaacaccccaagtagtgtttgttggtggcatatggatgcagccgtctgaatatgcagccaccgtaggtggaaacggcgattccccgagcgcggtggccgccaatggaatctatgctccggtggctgccccggcccaccacgtggcagcagtccataggcaatcatccgaaaactctcataataactcagaagagaggaggatgagccataatagccatagtgaaggaggtgttcattccaataattccccatctacctcatcttccacccatacgacaacaacttctcctgcgttttgatcatgtgctatatatataatataccaatgagaaagaatgatgtaaaattttgtaacaactttctttttgtgataaatatagagaccacaagttaacaggaaatcgccctactcctacagtacatcattcccttttttttattattattttttttttcttttcctttatatatataatatatattttcattttttgttctttgatgttgtttgtagctcactggacagtcagtaacttgtagagttattttgatacttggtgtagtggaaagttttgaaattggaattaataacaaaatgccatagcacaaagttttttcagcattaatttgatcattgattgattgaaatttaaatgctattgttttgactttatatccttctccgtattaattttttttaatgactcgtgaattttactttaaaaatttgcacttttatgatgtgtacagaaattttaaagatattgtgctaatatattttctcaaaaagaatcagtgggaaatttaagtataatcatattattatgtaggttaagcaacaaaaagaaaattcatattattatgtagagtattgctacaagacagtattatatattatggtgtcttatacggtggtgtcttatacggtagagaacgtgacaaattcccttgtatatttttttacactatcattataaataaataaacagtaaaagattatatgggcaccccccttactaatagccttgataagtatctcggctcgagtattttgggcgatttaagaaacacctctcaacgcccataaagacaggatttagtcctacttagccaaatggaaaggaaagctcttttttaaaggtgataaagaggttcttctcaaagcatttatctcatcttacgctatgttggtcttcaagctccttgctagcttttgtaaatttgcgaaaaaagaaatagctaagttttggtggggctctaataaaggggaaggcaaaatacattggaagaaatggtctttcctctataagtttaagatcacaggaaggttggggtttcgatctattagctctttcaatcaagtgatgcttggcgtatccattccaatccttcttcacttttggccaggctcttcaaagtcaagtattatcctagaactacttttctggaagcagggaaaggccatactcactcttttgtttggtaaagcttgcattggggcaaagatcttcaaaagcaggggcacaaatagagaataggaaacagtgacactattcggatataccatgacaattggatacccaactgttctttcatacccacttcccatccatcaaaccaggaccgagtttcaagccgtatcgttccttttggaaattggaacacagttaagcttaacagtgattttaccaagaatgtcgtaaaagacatcctatccctcccacctccacaaattcaccaacctgactccctcttctggcaacataccatttctggaaactactccgttaaaatcgattatcatcttgcccaaaacatcaggaactctgcaaaaccaactacttctgaccccaatatcgtcactagctggtggaaggccgaccttgtggaatctcaatctccctcctaaaattaaatattttacgcatagactatgttacaacactctaccaactaccagtaatcttctttatagggaaagtagaacctctcctctttgccccaggtgtcaaacgtatcccgagaatacccaacatgctctctttgaatgcaaaggtgtaaagaaggtctggtcaggtacgtcctttaagcctcttataatgccatgaaaggaaaaaatacttttgatacacttctttttttcaagtctcaattgcaggaaaatgagattgaactaatccttttgtgttttat

SEQ ID NO: 298093 - DNA, 749 bp, Cannabis indica
tgtagttgttattttttttttaaatactgattaggtagagcagcttcattattcagtgccaatttgtaatttttctttttcaattattattttttggtggagatcttgtttacatttacatggggaaacttttatctctatttttttatttttaatttacacgaatatacgtgaaaagtttgtaattgttggttagcaggtctaatcatcatttcccagttttttatattctataaatttgcaagtagatatgattaagttgaatcaggcatgctcttggaatttgcatttgtttattttgctttctagtttctgtaaataattttcattttggccttttcggtttatcaagtttcgtatgttaatgtatttttaataacagtgcatcatctcatttgtatctgctgctaccgatcattgtacaatatgtgaatacagttcccagtacttatgcagaatttagcctaaatagtctactcaaatatgaatcagtgcaagaactgcagatactgggaaataaagaccaggaaatgaaatgatttctttaatgtgtgttttacttatggcttaaatattatggaaaaattgcggcataattcttcaaaaagtttactttaggctatgtttgttaggaaggatggagaatagggaggatggagagttggtggaggatgtagaataagagggagggagaggagagtagcaatcattttaagttgtttggtggaagggatgaaatgatagaagga

SEQ ID NO: 298094 - DNA, 1955 bp, Cannabis indica
gagagagagagagaagaggagagagcgtgtttagtttttttttttttttttttttatttatctctctacagtagcataagcatactatactctctttctctctcacactttaattctaatttataaatattctttctgtgagcatctttttttttttatagttatgtatattttatcataaaaaatggagcactctctctctgcaattacaggaagatgattatacttcgtctatgccatgattaatatccaagccttcgatcccaaggctgtcaactaaggtcccagatgagaataatgatagctaccacgcgctatataccttctttccctctaatccccactttgtgtcgactgtgtttggtcggtaattaaacctagatcgatccatatcattgtttaattaattacgtcatttttacgccataataaaataaaataaaaacataaacaaaataaaaggatatttatttgtaaatgaatatagttatcactatatcagctttccatcgaaaaagaagttaaattcattttataaaatatatgttatttttgttgcaacgtacaatttataacctacaatgtctagtttactagtcaatgacttttattattacacatggaaaagattaagactaaacgctaccttagtagcgccattttttgttgcatataattattaatttgaaagttattagctagggccccctttcttttttgcattaatgtaacttcgataatagtaaaagatgagttcatattggatagtatgtgaaaaattaatattatttataatagtatgacttactccattcatgatcatttcaattaatttttaattggttttgacataatttttgtctaacatcctataaagtggcatatattcttgtaataaataatgtgcatttctttttcaacaaaaaaaaaaaaaaaagcctcaaccacccaacatcaacaaatactctaaaacggtgtgggttagaatttcttcaaaaatagctgcatgatcaccaaatcatactacttacttgcagtcaaaccaagtttggttaaagcataagctaacactattaataaaagacctcttacaatgaataaaattaacaattttgagcctattacaaaaactaacaatatcattcaacactagacctaaaaaagtaataagagagatattatttttaattttaaacgtaacactcaaacaatcaaattcaataataatactgtcatactcaaaagaaagacattgggacaaagtctttctaatcgacaaatcttcggccacctcgggcacaaattgtctctaataaccatgccactacaattgagagatgaggagcttttcatttgggagctcgagctgctttgggagagaggcactactagaaaaatagacttcaagaacccacggtgagtactctaaaactgcttaattagtgacccttttactgtacgtcactaatgtgaataactgaaaagacaatatataatgaccattcagtgtaattattaaattcttttagagtccctcacccctcaccgtgcgtcactgtaagcttttagggtccgacattatcaatctataaaagtagcagcaacccacaatttactaatgattattattaatattttcctttttatacaaatttgaatccaaaaatattgttgtatattgtatagttgcaaatgtagttctacaaatataaatttttttttttgtgctttgaattggagatgatgttttgtttctgttatatagaatttttaataaatttaacattaaaaaaacaaaataattatgagaaaatgcactttctattagttgcatgataaaattttgggttgagaactaaattactatagacaacaaaaatcatataccatataataaaaaaatatatacataataataaaaaataaaacaaatataatataatattattaaaaaa

SEQ ID NO: 298095 - DNA, 4447 bp, Cannabis indica
acaacaagaggagatgcataacaagcttcagaagatatggttaagagggacgaagagaaagttgcattgaagaagcttggaagaagcaagagatggatagaatgaacaaggagcttgagattatggctcatgaacaagcccttgctggtgatagacaagcctcaatcattgacttcttgaacaaggtcacccaactcaccaaattagacaataataatattagtaataacaacaacaaagataatgtagtttctctcacttcttcttcttcttcttctttaaatattcctcctcctcctccttcaaatccaaatccaacaataacccaccttgaaaaaaaccaaaccaatcatcatcatcctcattatgatgataaaaaacctagtagtagtagtagtaataaggatattgtagtagtactctcatcatcaacagctactactcctactaataagccagttgccacgtcatcagccatcaaaacagtccaaaaccctatttccataaatgacaaagaagacttgggaaagaggtggccgagagatgaagtcttggccttgattaacctaaggtgcaatctctacagtactgtcactactgctacagctacaggagaatcatcatcaacatcagatcatcaccatcatcatcatcatcataatcataaagctcctctttgggagagaatctcacaagggatgttggagttgggatacaaaagaagtgccaagaggtgtaaagaaaagtgggagaacattaacaagtacttcagaaaaaccaaagatgttaacaagaagaggtcagttgactctaggacttgcccttattttcaccagttaagctctttgtataacaaaggaagtagtagtactactagtacgacacttgtttcaacgtcgtttcaacaagcccagaataataataacattaatgataataataatcatgatcatcgtcaggatgatcatattattattacaatgaataataacggcgaccaccattctccaattactactactactactactccagctgatcatcatcatcatcataatcatggtgagatgagttcattatcagataataataatattattattcgtgatgatcaccatcaagagaagagaagcagttagagtcgtggcatccacggcttttgatttttgagttctgattcattaagttttttttttcttttgtttgcattattaatttttatttatttatttattttgtgagtgatcagtgtgtgtgcatgtgtgcatttattgacataataatatgcggtaccctactaccccttccttggttttgatcttaataaaattacataattacacacatatatatgtaatagtatgtatatatttatatatataccacactctagtacctacattacatataaaacaacataatgagtaatttttttattttatttgttaatttattagttgggcagggattgattttattattactttatttttgttttgtagtgggcaccgacaataattttgagaaggcacgaacatatttttctaaatgagagatttggtgtcgtctgagcattgtcattttttgttttctgaattttactatttcaataagtttggaaaagacattcttcagagctctctcgtgctgatatttctatatgggaacaaaacaaaattagtgaaaagaaatacatgaagggagagagagagaaagagctggtgaattaagaatctttcgtaggtaacagtagtataaaagaaattaaaggattaatatatacatatggatacaaaaagttacaatttttttatgttaactaaatgttaaattagattgggttgctgttccttcttataaagttttgattacaaacaaaatgacagactgaggacagtatattaattagtgtcgttgttcttattttctatataattttacgtgcccatgtgtatatccggaccggagaattaatgtatcttcattttactttaaaaaattcgcatttttaagttcttttttaattttaccatagcatagagtaattcatgattttattaattactttattatttgttatggcatgcatatttttcagattgacaatatataatgcgtgtataagagattgattaaaaatatgataattttttctcaagaaaaaataaaaaaagttaatatgattatttaagaatatcatttatatatatattatagaatcatgtttgaatataaatactacaaaattaaattagattggatacataatttctattgtgtaaacttttattatacgttttattaaattttctttttatttaatagatataaatacaaacattatatttatctaattattaaaattcttatcataattcataaggatgatataccgttaagaaacttgagattataatttagtctatttcattcttaatttaatttcacctttatacaaaataatcgatcatatataaaaataaattacaatataatatttgtagtgttgatgaataatatagtcaatccactcatccttaatttatttatctttcgtaactaataatttaatatgatctatctccctttcaaaaaaaaaaaaaattaatatgatctatctatgtacattacttttttttttttggaaaattattataagcatgcataactgaggataattataaacctggtcatcctcaacaaggtatattttcacccccaagaaaaacgtttcaagttcacatcgttcaaaaacataaatggccaaaaacgaaaaaagaaattaaaataaaataaatttggttgatttttatgaggtgaaagtttcagagttaggttattggcttagagaatggtcaaattgacaagtgcatggcataatacttactagtagtagtactagtagaagaagtctccaccgtaaatagggtgagcctgggccccaccacaccacatgcccctccttcctttggcctctttctcttcccttctacctgtccccacctccacctggctcactgggtcccactactgactcttgcattgcagtgcagactaactcaaatcaacgtcacgtgatggggcccgtgccataccccaatccatcgtagaacaccctctctgtattaatatacttataaattataatcgatgatatattatcatactattactatataatacataatacatttttattgagtgggcccactaaaacactgctctctgctctcctacacgtgcatgtacgtgatcaacggttcagattgtattgcttaaacttatttgaatatctgaaggtcaaccatttaagtgtgtgttttttgttttttgaaaaatataagtcttatgggtgaaatacgaagatttattaatatggtttttcaccggagagtcgttgacttttgatacaattaatttcacttcggattgatattgaagtgtccatatctgtttgttgtatagtattccgcactggaatattgttctttgtctttatgataaattacacgcctcgaaaagagtagtagatatcaaagatcagacaaaaaaaaaaaaaagtgagtcatactagatagagtacgacagagtttcttaaaataaaatattttataaaggtcttttgggccctaggccttcattatagaaactttatatatttgaattgggccaaattgggcccagaaaagatagtttaggctcctttaatttgaagttgtagctagcttacacatctcccggagttgattgtacttttctgttttagttcaaatggattgcagtttggtctaaatatgatgaacattgctaacatacttttttttttcatcattttttattttttgaaattttgtaaaatatttattataaatataatgtatatttttatttaaaaattcaatgtcaaaaacgaaaatactaactgataggtgtaaaaaagacaccccacctatataacattttccatatgatttggattggcaccaaaagtgaagaaagtttaccaaaaagaaaataagacaatgtttttctttaattttacctcaacacaagagtaaaaagctttaattgtcttatttatatgagcaataagaatataacaattttaaatgtttctctctctttgaaaaaggtcaaacatatctccctccctccttccctcaaaagggattagctttagtcatcatttgggtatatgttgttgaacatcatgtactattacaagtgcaattatgaaaatgtgtgatcagtgtacttattatatgtagttaaacctaaaacttaaacaccataaggatgacaatagatatggccaaagcttttatatatctaacatctacatataaattgatctccacaaaaaaaagcaaaaaaaaaaaaaaaaacgaaaaaaagaaaacgtaaacgtttgtttttacgtttctttttactttttttaacttttttt

SEQ ID NO: 298096 - DNA, 2748 bp, Cannabis indica
ctcttctctctctctctctctctctctctctctctctctctctctctcttatctttatttttttattttttgtaatacaattattttatccatttcatgagccctaaattgcattctaggtctagaatgcaagcaccgccacttttaataaacttaaaatacatgctgcttcagtattttttttttgttcctcataactgctggttctaatgattcattctatcgctcaaattaggcatgggatctttattatcatgtatttagacggatagataagcagcttcaaagtcttacaaccctcgacttgcaagtaagaagagtatatttctttgtatattctcacttttacttgtagctgcactaacttctttacatttgcataatagtctgtctcaccagagttgttagattgtcgcaatttggagcttgctgttccaggaacataccgggctggtaaaacttaattatatagttatcaagaccatattttgtactgcacataagtttactaaacaattaaattttgtatttcagactcaccggttgttacaattgcatcatttgcacctcaacttaatgtcataacgtctaaacagcggccaaggaaattgacaattcatgggagtgatggtgacgattatgcctttcttttaaagggtcacgaagatctacgccaagatgaacgagtcatgcaggtagtctcgtctatccgtttggtttttatcatgaattctcatgcacttccacgatatgctttcttttcaatttactgacatattgccctccagctttttggtttggtaaatacattactggagaattcaagaaaaacttcagagaaggatctttcaattcagcgatactctgtgattccgttgtctccaaatagtggattgattggctgggtcccaaattgtgacacccttcaccatcttattagggaatacagagaagctagaaaggtttgttgataagtttttcatggttcttgttgcttgaaaaatttaatttgcattcttgagcagtgtgcatggtttcatgtgttagattctgtgtgattaaactgcaattagcttgttgtgatgaatgcttgtttgattgcagatcacactgaatcaagagcataaatttatgttaagttttgcaccagattatgaccatttgccactcatagcaaaagtagaagtgtttgaatatgctcttcaaaatacagaaggaaatgaccttgcaagggtataaacattgaaccattcgtattcttttttatttactgtcctttcttgaatgttgtcttaaggttactggagctgcttttttgataggttctttggttgaaaagtcgtacttctgaagtatggcttgagagaagaacaaactatacgagaagtttagctgtcatgagcatggtaaatatttcttggtcttcttcaatcctatctttatttatttactatctaattcttgcatatgtagagctatattaaaatttctagcatgttctgatgttcttttcttcacttaaaatttgtattttagcttttggtacatatccttgaaaaagtaatgcagacaattggagtgatggaaagaataatggggtggaatacaaaattggagtgatggaaatgaaaatgctcttactttagtctttgggttttttgatacctaaggaaagaaaatgtatatttagtgaaataataattttctaaaatctattttttattttattgaatgaaaaaaaaaaatcaatagtgtgaaaacaattctgcaatttacaaaaattaaaattggcattttttttctcctaccaaacctgcactttttaaggaaaaaaaatcctttcactctccgtccctccacgaaacatagctttagtgttccgttctaacttttctattctgagtcaagacaatttataacttgtctactgtaatatttcatgtttgttttcatttcaggttggttaccttcttggcttaggtgatcgccacccaagtaatcttatgctgcaccgctataggtacatttcaattggtaaagaatgacatgggtatattaccttcaggcttttggaggtgtctaaattttctttattttacagtgggaagatcttgcatattgattttggggactgctttgaagcttctatgaatcgtgaaaaattccctgagaaggtcatcactgtgaaaaaatcctcctattttgcggttgttttgggtcttcacattgtttgctcactttgctattggtagtgcaggttcccttccgcttaacgagaatgcttgtgaaagcaatggaggtcagtgggcttgagggcaactttcgttctacttgtgaaaatgtgatgcaagttctacgaacacataaagatagtgttatggccatgatggaggtattcttgtaaaaaaatggcattctattcttttggctataatttcctaattaagagattgtggaggagtgttcattggatcacatccaatggatttggacccatcccatcccatccgatccaatctaattatttattggatattggatttcgccatccgatccaatccaattgaattgaatcatccgatccgatccggtccaatggatgtattggattggatcggttccatccattggatgttttgactggtcttttattggattggattggatccatccaatggatgaatccaatctattttagccactatttaggctgatttcattaaaaagaaaaaatatatgaaaaaatat

SEQ ID NO: 298097 - DNA, 3145 bp, Cannabis indica
tccctacgtcgttacattccattaaggattaggaataggcgtaatcagacctgctttctacatctcttgttatttgggaccctattcacttctttgggtttctattcaatcgagaaattacctctggagacaacacagttgacactgttggaataaaagagacaactgactggaacttgttgaagataactctaagggcatcatactccacatttttcaaaatgtcatcagcaagaacagaaacctgcaaaaggagtaagttacagacttgtgtcgtcattacatggattgataatacaaaattttacaacataataagctctgcaaaagaaaaatagttcatcaaagagtattaataaatcaagcgatcaaccagataaaatttactattaagatgtataaagattcaaaggcaacagaatatcaattggctaatgatgagatcaatgattaaagcttaaaatagttaaagtagtttttcagcataatgactaacaaaattaacctaagaacacatgaactgataattttaatacatgcaaacagacaagatcgttactcagtcatatcataaatgggacaggatcctgggataccaacctgagtataattaagaggattcttctgcaactcagtcattgtcaggtcaatatgtttctttgagtcacgtatcaattgagcttttgccttctcacccaatacaacatattttgtatgtttctcaggacctgtagtaaataaaaaaaatatatttatattcaactttaatgacattgaatcttcacagacattaaatactaaacaaccagcctgcagatttaccagaattcatcttgaagaaacccttgcttatcctgaccgaggtggaattaattccaccacaaagtcctttgtctgaagatacagttacaataacgttcttcttaacatcaacacctagtataacaccataaattagttagcggaaaaaatactgtagaaagttttaaaagtcaatacaaaagaaaaaaaaacacataaagaatatacatatataagggggtgattgttatgggatttggattcttgggtatgggaatgagaaaccaaatctatgtttggtgtatgattttagtggaaggtttatgtttgtgtggttgtatgttagtttatttatggggtaatctcaaactctttgaacacttgagtttgagattccctttatctcaacccctctcaaccatagtccaccaagtaaaacactaacaccaaacacccccacaaataaaagtaaacaaaaagaatcatgatgtatcacagcgatcagagtgtttgcagcttttagtaatacagagacttcttacttgtataaatattattcttcgatgccaaccttcaactcacaaaccaactacttctagaagagcaataaaataaccaacataatcagtcgcaagtttattctactctatgttttttaccccccatgttgcagtctacagtggcttctagatctacccttcattaacatggaactttaaggagtaaaaatatgataccaccgtgttgagaaacatactgggaacatcaccaagaagtgcagtaaaaggctgccataagccacgggaattttcagctttattttgaattgctcgtagctttgaggctgcaaccatcttcattgcctttgtaatcttttggatatttttcacactcttcattcggttcctaactaaataaacaagacatcaaaaagctatcaatacaatatgtgatgttaccatattttgccaaaataatatcacgacatacatatttcctttaacaaaagaccacaagtataccagcccattaccaaaaagaaagcaacgtataagaacaacacttaccaatttgagttgaaatagagcgtactcctccacaaggagcctgctccctgcacacccaaacaaatcaaatatattcattgttagctacatgctactgttattagcttcttatactaaaaaaaaaaatgcacaaaatgcagccgcagctgaaatgacaatgcttcaaaacttttcacgtatattttcattcaaacttacgaccaaaataaaattaagatgtaactattcagaccacttaacgttctcaccgcatctcttaaaatggcgagtaaatcaagctaagtaccaaaccatatagttaaatggtttaaatacaatggcgcagaggtttaaaacacaagactccgcaaaagaattagaatttcaaagatttcacaaagcacaactatgcttgatgccaccgtatatcttaatcaaagcagtagccgcgaaccaaaaaccaaaccaaagaacgcccaaattcaaatcgttcaaaaaacatccattcattggtttatggtatggatgcatcaatttaaaattatatatgctgcgtgcatttttgtgtttaccaataaatagaggaccaccccacactcatacacacacaaaaaaaagtctttgactattattcattaaaaagaaatttgaacattgtttttcccttccccaaccttctcggaaaccaaatagtgaaacgataataagatttgagaaaaataaaaatcatactcagcaatgagagaggatcggagggcggcggcggcagagatcggatttggggaggtcagaggggagagatagcgcctcccctctcgtctcagagctgccatggccattggtacagatcgataaggaagatcgtgaaaaccctagaaattggaagcttggatcggaaacccttttcttacgagtgattagagctcaatgacggagagagatgtgagcgtggcctttgggttaatgggaaattggttttggcaaggacgagaattgattcgtacaaggtcaaaaatgaaatgacgtcgtattgtattttctttctttctttcttttagggtttttgtttgggataattgcagcaagtacccaaaaatttgaggttaatgcagattagtctcaatctcaaaaattggcggtaaaaatactcaaggtcgacaaagttgtttgtccattcatacacaatcgttagtataagtaacgtgacacgtggacgccccagatttaatccctttttaaccttttttttttgaaaataaaggaagctttattaataaacttctttcatgattacatca

SEQ ID NO: 298098 - DNA, 2636 bp, Cannabis indica
aattaattaatattataattaattaattttttaaaaaatataaattaatacttttgccggcgcattattgcgccggtaaaaatggccaaaaactattggcgccaaccgtcagattggcgccaatagttttgccggcgcaattatcaaagcaggttcatagcagataatgacattttttaataccggtgcttatttttcaccggagtgatttctcgccgataaaagaaagttttaccggcgcatttactctacgcgttggtaaaaagtcttttaccgaccaagcttcccagattagctttgccggcgcagttagtgtacttttgccggcgcaaaaatgcgccggcaaaagtgggttttcttgtagtgagaaaagaattaagtcacattaaaattatcataattaaatatcaaacaatcttcattttacaccctaataaaaagtctagctattcattataattgaaaacatttgataacaattaactaagaacataaaaaaagagtagaagaaaacaactcatcgaaaaatgttgataaaagtctccagagctgaattttgcttcaatttttgtcccttcttcattgtttgcttaaagtgttgaaaaagaagtatttttatagctttgggtttgggttaaaactctatttttgttagtttggcaggtgggttgcgactttacagtatagtgtcacagctctataaggtagtgtcgcaaccctattttgtcccttcgaatttttcatagcgggtcacagttctataaggtagtgtcgcaacctttgaagcctaatttttgggagagacgaatcaagagttccatgactttgttgccaaatttttgcgttttaatccaatattgaggtgctactcctcacttaccaatttttcaacattagaagctccatcgcaccagatcttttagatttctttcttgaattattttattggtgctctagtaataaaacttcatttaattaattctttttgcacaaattttttttcttgaattcgctctattcttctcaaattctaaacttgaaaatattgataaccaaaagcgtaaaatttcacaaaacacaactaaaactaattaaaaatactttaaaaacctaacaaaaaataggactaattaagtcataacacatcattagacgtaataatggcgtacactaagtacatgactattgcattattccaagtttgtctcagggccagaattagatgggataacattttaaaatatcatttatctctaaggaatatccctagaaggactatggaagttgctaataactaatcatagacctaaccatttcaatcaacatatgattttgatattctaaggaggtaggtcggcatacaatttgaagtttgtttaaatgatctttaaactacatattcaaatatttttccacccctatcaatttgcaagatctttcacgtattacgtacctaatcgatttatagccattactagaaactcatgaaatttttcaaacttttcaaattgtagcataagacgaatatctatagtaatcgtctaagaattttatgaagtacttataaccacccctagcttgtacacttatatgtcaaaatacatttgaaaacaccatccaagtgggtatctgacacatgttctctttgtagagaaagattttgtcaaaattactatgagcaagaaaaagtatcattgataattcttaattgttactgatcttttgatgtatatgattcttagttttaattacaacaaagaattcattgtgtagtgcgagtggattcttagtcttagaatataaatctcgattccatacattcaacacacaatttggatctattaattgaaatggttattgaaaactcgtgagagttaaccgaagtgttaacgtaatcgagttactattctagcttggtccgtcactaaagtaaaattacaattttaagttaaacttgccttgtatatcttattgcaattacaagtattgtaagaaggagattcaattttatttcttaaaaatttaggatagttatcatttatggatagaatatctaaaatatgttcatctacacaacttattttctaaaataagctaaggatagtattgtcatctattttgatcttgttggtttgttgaaaaatgaagaacatgaaaagaataatctgatgaaaagttgtggagtaatagaataacttgggtaaatttttctagtacatatcctttttataagaaagtggagcaacatcataagttgatgttgataaaccttcttatccaattatatatatgttgtgaatattttatcaggatctagatttactaacaagtctgttgaatgaacatcataaatatgaacatctctaaaacaatgaaattaaacacataagattttagaaaaccttacattgattgcaacagaatattatgactcattccactcagatctctaaccattgttcctttctgtcgcagtgtattatcaagatctgagcctggatctctttctctccttcgagttggttatcagcttctttcgcactatgattgagtacttgactttctatgtgtgggcatggcactctatcactaagggcgaattggttgaagaataatgaaggagggttcgaatcact

SEQ ID NO: 298099 - DNA, 6251 bp, Cannabis indica
aaacacagggtccaattggtaacttttgcaaaacagatggtccaaaatagtatttacccaaaaactattcgtgtaattaaatatttaaatattatttttaacataataaattattcgaattttatttgaaaacaaaagaaaagtgtgctacaattacaatatattaaaatttgagttagaataagtcctagccattggagtaaaaaaagtcacatttccattaaaaacatttgaattgtgtttggttatagtgaaaagtgagtaaagtatagtcaaaactcaaaagcctttttggctcatgtcattgatggaatgacaagacaaaatactaagctaaaataagcacataagtattggtatttggtaccttgaatatttataagtaccatttatttacaatgtcttacaaatcacactactcacatattgtattgagatctcatattaaattcattcaactttaaataataattttttatctttttatttttttgagtcctcaacttcttcaaactctattcaaacttattaatcgtttttttttttgaaaatgaccaaaataccctttttttgtttacacatagaaagaaaaaccccactcaaccacagtttttaacagagtcgcagactacagagagaagagaagcctaatcaacaaaaatatctccatttcagacctctctctcattcatggtactcttttactcctaacccttgttcattttttcactctttaatgcttctgaatctcaaagtttgtttcttgatctaaggcattcgttctaacttttcctctttagatcatagatttccccaccattaaaaaaagcttcaatcttttttcatcttctcagttttctctcttcaaatctactaaaaccccacatgggtattgctcttttctcagttttatagtaagtctataatgggttttatgcactcaaggcttattgcttagaaaaagaaaaggtcagtaatcactatcactctttctctttctcatatatgtaatattctcttgtctttgagtttttgattgaaacatgtgttttcatgtctttgtgtttttgcttattgtggattttggaggttgaagttaattgggaaagttcttattgttttgtttagttctattgagttcatgcattacttgaatctgttttcttcttatcttaattgatcttgcttgtatgggatttttgaaaagtttgagtctttgagtattggattaatgatatttggttttgaagataatttgattttttcttatccttactttttcaatgttgagatattaattaatcccaatttcagttctttttccatggtttattcaacttaaatttcatctctttgatcaaacaaggttaaattgtttcatattttgattgggttttcaatcatgtaatgcaaatacttgctaaaactgcaaaattttacctttttcttaatatgatttcttaatttgatttaattatgattggtatagaaagaaagataagttaaacccattaatattataacctaattaatctattcaagaacattgtaaatcaaattaaaagaaggggaaccctaaatccttttttggtatgtatataaaccacccattgagttttaagaaaaaggttgtgaaacaagaggataaggcaaaggggtttctcatactttattttgaagaagactaagtttgatataatagttaataaggatattttgattgaagaagaagaaactctcagtgattaagatgtttctataattgatgtatataagagataacatgttacacccaagttttgtattcataaacttaggaagggagtggattttatcccgtgaggatatctatttcgcggtcttcataaccattggattaagattgagctgatctatcaattggaagccaaagtacatcaaagtgagcttagagtacataaaacaatgcttatagtacataacaaaatgcattcgatttttttaagaagtttctctttgagttttgtggattgagcatctctgatttttgctattgtaagtgaaattttgtaccttaacatagtgataagtataagtttgtttttggctactttatgttaaggtaatgaaatgattattagattgagatttgatggaaatgaatatttagttattttcatctttgtttacatgttttgatttgtttttcttttgttgggcagaaaattgcttttttgtgtatgaattatacttttgtgaagttttaagattatgggtagaggtagaggaaaagggaagagattaactgtgagcaatcacgatgacaccggaagtggtgaggaagaaaagataccggcacagaagagaagaggaagacctcaaaaaccattgaaggacgagatcgatgaagaagaaattgagaaaacagaagaggaagatagtgagaatgcaaaagctgttataacaacaacaacaacaacaactaaagaggcgaaaagtccaactgcagcagagaatggaaagaagagaaagcgatattcgcaagtaaaagagaaatcatcagattcggttaaggaagaaaatggtaatggaacaagatcaagcactgatgactcaactaagtctaatggatttcgacataatgggagtaggcgaaaaaacaagccccgtcgagctgctgaagctggtgttgaatgcaagtgagagtgagactagtactagtagttcacatgatcaattgccatagaaactgaggcagagtacacctctagtttctagtttgcaggttttttgttccttcctacaccttttttggtaatgcccatgtcattaatttctttcttatttaatttgaaatatttggaattcattatgttggttgtagttttttcttattatgatatataatgatatttaaattcttgactagttaatttattatactttgtataatcagcaaagacattacttaagatggtttttctcttctttgattgaaattactaatacaacatatggcttggtatcaagtaatacatgtatattttaggtggtggcattaaaataaaataagcactcgtgtaagtgattatttgatacattaaatcactataattataatgtaagctaattaggatttttgttttttgaactttgatatgcactaaataatattctctgaatttttaaggtcgttaaaaatttttcttgaactattgcggttattgtatttaagaatttttattcaattttagtaagtaatgtctaacatgaatgaaagttcaaagaacatgatttactatatgtcaaagttcgaaagatatgatttggtagatattaaagtttggagagcataatttagtacataaataatcactaaattagtaaaatttagacaaaagtctctaaaaatcttaatagtttaagaaaaaattttaacggtcaaaaaaatttaagggatgtgatttggtacatgtcaaaatttagaggatagaaattttaattagctcataatgtatattgtcgtgtatatataccgaataaaaattatctctatacttctatataaataaaagtgacgttctcacctaaaaaatttcgaatacattaaaatgtgaatcttttttagtaagataagggtgttgttgtttaaaggtaaatagtagagatatagaatagggaagttgaagttttgagttgctttgaaatgaagacttgtgaaccacataacatagcatagcagagcacgttacactctagggtcttgtgtttgacttggacttaccataatataagcactttaaagtcacaattttctttatttataaatatatatagttttgaaaaaattctacaatgtcctttgttgacccatgtaccatgaaaataaaaattagaaatgaatgtaatatatttttgttttcttgaaggagtggaataaaatttaacatttacacacaaaattcataaaaatacataattttttatcaatcattggaatgattttttcctttttttttaaaggaatgttcatattagaatgaaatcgaaatttgattcatttttattttattctatttttatctccaattaaaaataacttattaatgataatttatagtgatttgattaatttaattactaatggagcattgtaagtcaaacaaaatgtatttttgtctattgtagatattagtgaaagtttatgtacaatcctctttttttaatgtaatattttcttttttaatctttcaaattttcatagggtttttagttttccaagtttaggaaaagtattactgcatgtggataatcttaaatcttttttaaatgataagttccaaatatttccatcaatacaatagattatattaataattttttaaagcttttattacgtcaacatattatatttgtgtgttcaactaaataataatataatttaataattaatagtaatttaactaaatatatttatatataaccaaacacaattatttaaacaatcatattatacacttaatataattaggagagtattattattggacaccacttcctaatatcttttataggtagtattatacatttaattaatgatattttctaaaattatttttttaaattatatgaaatttaatatttacgatatgacactgagttgcagaattttttatcgcgagccacatggggatactaaacaacgcttatgccaatataatataaggctaattaggacttaatataacgcttatgccccctaaactattgagattgttggatttaaggtctttttttccaattttagtaaaaaagtctaacatggatgaaagtttagaaggcataatttagtacatgtcaaaattcaagggacatgatttggtagatatcaaagtttgggagcataatttaatacataaacaatctttgaaacagtaaaactgaatgaaattggacaaaagtccttaaatccaacaatctcaataattcaagatgtatttttaacgatcttaaaagttcatagagcataatttaatacacgtcgaagtttaaagggtaaaaatactaattagccataatataatatccaaaaatagaaaactttgagttgttgacaaggtaagtatatatgtatgatgatcatctaattttagggtacgtggctaggtttattagggctttattatgcttatcaagttgtgagttgaactggatcacacacaaagattaattggatgacacgtgttacatatatgacaaaacaaatcttatctatcaattatataccttaccttcttacctttcctagttttttcaaattatattatattatttcttttatatataaaaaataactattaagactgcagttacgagtctttgcattgaatcaaaagaacacttgttattaagttactttactatatacgttacaattataaagctatatatatagacacctttataagtttcaaattccaaccaaagatctgaaacaaaagctaattaaagtgaaagctttttccactaaattttgtctttattattttcattatcatcttaatgtttacatatatttatcttgtaacgttcaaaaaataaaatgagacaattatgttgattttagtaaaatttagaattttcactttcttatttaacaaatagagacaattaatgtcgtgttaataaatattataaaaattttactttaaaaataaaaaataaataaattgtaattaattatataaaaattcataactagggatattagttacaaatattacaatttattgtgattagaaaaaatatttttagtcacaataaacgaaattaaggacaacttatatttaaatattatattttaaaaatgaacacaaatacatgcatgtataaagatgattaacacaaaaagtaattatacatatatagtttgagttttaatatcactaagtttttggagttcaaatacattaaaaatatagcttcaaaatatgtccaactaggaacagagttagaattcaactttaggacgacaaaaagaaaagaaattaaaattaggatgacaaattgtaaattttgaagaaaataaaaattaatacaataataaagaattaatttttatttttttagtaattttggggggtccatggtcgctcttgtgtataggatggctctgtttctgagtctaacatcttgtatttatagacaagttatgttggtgtctaattagggttttccaaaaaaaaaatcacatagtgcatgtttggcatcat

SEQ ID NO: 298100 - DNA, 6400 bp, Cannabis indica
gttcttttcttgttttcttttattgagttttgacaactattttgtggcagttggttgtgtcactgactcaagaagggctactaagggagaggaggccagagttggccattggatcaaagttataagtatgtccaaacaaaaacaaatgctatttattattagttcaggtcaaggcacgaatttattgagtgtattgtcaataatcctaccattattctgattgttaaagccctagctagtttggcgtaaatattctctctgcactgcagccatctggagatttttacatcagtattcaaatacataaaaaccagagccaaataatgagcagaagcctgcctcatttgatagctgcagggaatatattttgttattagtattttatctttctttggtgtatgacatgaacttctgaaagtatatcttagaccatttaccgttgatttttaataataataataataataataataataataataataataataataataataaattcttgttttatttatcagtttatgcacaagtatatcattcttgtcaaaatatggtcaaagttaatggagagtaaaggaaaaccattagcctaattatttagtctcctaatatcagttaacatggcagaataatattttattgtaatattttgattgatataattaacaatatttatcaatgagcattagtcttttgtaaggaaagaatccaaaaattttctttaaggacaaacttttgcacataaattgttgaaaaacggcatctttcaaaaatgaaaatgaaaaaaaaaagaagaaaaagacatactaattgaaaacatgctgttttttaattgggatgttgacagttactcgagcttgtaggtgttggattggtctttaatgtttggtttttctgtttattttttcaacattgactgtttaattttattttttgtattctttatgcgatcttttgcgaactagtttttatgaattatccttcatttattaatgatgtctcattttatttttcaatgaaattttgttctaaacgacatcaggtcaaaagcgaaataacaacaaaatttcgaaaaaagaaaaggaaaagaaagacatttttctaaacgacatcatttctgataaacgatatgaatctgggaaaacgacattttttcaagacacttttcaataaaatcgacatcgctaaatattttacaaattcagatatcaaacattttatgaatttacaggttggtccccgctacaaagataatttagataattgacgcttactccaaatattttgtacatataaccttcgccgtcaccgcaacccacctctcctcttctctccatcgttatcttccacacgacgattcaaatatcacaggtcagatttccatggaatccttctctcctaacttaatatcttctcaaatttcccccagaattttcttgcattttggatcgaacgaagcttctccctggtatctttattagggttcaaattattggattttactttgtgattgctttcatacgattattggatatcaagcagtgaatttttcttagttagttttgggtttagattagcttttcgtataaataaaaaaaactgatgataaaatttgtatattgggtgtattgtttttcctcatttttcgggcacattgagaaatttaatagtcatactttatggcacaaatttcttgagactggtccatttgtggacaaacagttgatgttaacgaaaaaaaaatgtctattttcggtgcaaggctttgatttgaatttgatcatagattcataggtaatagactttatgtatatggtgaaaaattgatgcattgttgggaagaaagattgatcatgctgaaatcttatgttagaaagtttgcccagatcattcgattgatcttgcagcttgtgaattccaaatgaattattataatgttaacttctataccttatggtttgagcaatacaactttggtgggtcttttatacattaatgtttcatttcaggactcttagcctaaattcatggaagagttagacaatgagtcaaatgctatgagtcaaatggaactgactcagccggcactcatttgtgggctaccagatgaccttgctgttttttgtttagcaagagttcctcgaaagtaccatagaattcttaaatgtgtttcaagaagatggagagacttgacatgcagtgaagagtggtattcctaccgcagaaaacaaaaacttggtgaaacttggatctatgctttgtgcaaagacaaatcagagcaatattgctgttatgttttggatcccaactcatcaagaagatgttggaagccaattgaaaggcttccacctcgtagcttgaagagaaaaggcatgtcaattgaagtgttgggaaaacacatatacttgttgggtggttgcggttggtgtgaagatgctaccgaagaagtatactgctatgatgctttagctaacacttggtccgaaggttcttccttgtcaactgctaggtcattttcttcatttgtgttctttgctaagtcgattgggaatagtaccagtagtatggttgttttttttttagaagattttgaatgctctttcataaatctatccttttttttttacttcaggatcatctgtctatgcaatgcttagttgttcattatatgtcattcttctggcaaggattatactcttgattaaacaaagtagtatttgtatttgtgattaactataactaaaataatgatacttacgagttacgagtagtatcattgccaccacaatttacactacatttgtctatctcttgcgttcaggtgctatctttcttgtgaagttttggatgagaaaatatatgccattggcgggttaggttcaaattcaagtgatccacactcttgggatacttatgacccgtgcacaaacacttggacatctcattcagacccaaatattgtttctgaaattgaagattcttttgtcatggatgggaagatatatatccgctgtggcatatcctctgtaacttctcatgtgtatgcagtggtttacgaaccatcaagtggcacatggcagaatgctgatgctgacatggcatcaggttggcgaggtccggctgttgtcatggatggaactctttacgtattggatcagacttcaggaaccaggctgatgatgtggaagaagggaagagcatgggtaccagtgggaaggctatctcccttgctcactagaccaccctgtcggcttgtagttgttggtaagagcatatttgttgtggggaaaggtctaagcaccgtcatgcttgatgttgacaaagctgttaatgttgaaggggttatggtgagttcctctatacctaagttgaattctgatgatgatgtaattagctgtaaatgtttaaccatttgaaacattatcttattttaatgattcctataaatctactgactatttcttgtaatatgtttctgttgtatcgtattgtatataaacatctgcaattcatactttaggctgtgctgtttcttattacttgtcatcattcattttgctgtaagaacacccattacacatatacccattgactttcatgttgtgatcctccataccatcacagcaacttttcaactttatagcaatgtaaatttggcttcatatattcatagtaagctaattgtttctcaaatataacagttagtctagaatcaactaagcaatttaagtacttgtgcaggcacgtgtaaaaactaatcattatagtccctatttattcataaaatagaaagaaaaaaaattaacaaagaagatgaaaggtgctagtggtacatgagggtagaatctgaatacagtttatatgccagggacataataaaagggagaggagattctgttctctacatctttcttttcacaattaatgcatgaatggttgggactgggagatcagttacatatgatgtaatgtcatcatcctactattgtacactctcaagaggaaaattactatttttctccttttcctttgcataattatcgtacacaatgagaactttacaacccataaaaatggaaaaccagacctcatcagttattctcctgaagaagctggatcatgccttcactgtagaaatcagtttccatcaccaatgtcattcttcactagttaagagctaaatcaataccagtcaagggttgtgagcttagctagttcttttccttttaaaagctggatgtatggttctgttttgagaatccaatttgtcaatctttgaaatacactctcgcatcctctttagaacaataggcattttagaggcattacttgaaatcttatccttgagcaaccgtattttctcaatagtctcttgatctccatctgcaggtatgctggaagtaacttgcccctgtcctgcatctgtacagtgcagatatatttagtgtttctagcacacaactaaataattattaaggtcattaaagaaacgttttggggaaatagacacgaactatgaaagcaagcacaattaaggaatgtaaagtttgtgataaattttaaaaaaataataatgaaaaagaaaaagatgctgctttaaatgagactttttttcactcaacagacaagtaccaagcattattaatcagcattcaatagtaatcttattactatccaatcattatttgatggacagggtagtaatttaggtttcagagtttcttgcttcctccttgaatctctcttgtctctagcctaaggtgatgatgctagactgaaggcaaattttaacaaggcccgtccttgagtctaaatcatttacttcattagtaaaataactgggatttctcttagtgtttcagtcgcaagtcaagtgcaaataaaagatccattgtatttaagaaaactacaagctataaaatttgaatttcacaacacaacgatattcatttcaccgaattttaaccagaaaataatagtttttaggttactttcatttacttgtagtctataccaatctatgagaaacgaagtcaaattagaagaaacccatataaacaagagcgaaaaaaaaaacaaaagtaaaaaaaaaaacaaagtactttcatagtttttttttttttttttttttttcgatctgggagacaaaaccaagataaacccacaccccgaagcagaagaaagtgaaactatacctgtgtttcgatcacctgacgttccaggctcggagccttctggtaaaatgggtctctgagttgcaagaagagaaacaaacgtgtctttgagcttgtcgggaagactggctctgtattgaataatctttgcggacaattctttgacctccgactccagctcccccaactcttggggttcaccagcctccgtctctaggtcttcagggccatcgttcgaagccatgactggcggaatctgaacccaaacgaatagagaccagagagatcggaggcttttgcgaaaattcaagttatgagatttcaattttttggagggtaaatgggattttgacgttagggtttttgaatctttgaaattttgaaattatgattatgacgttagggattttttcttccaaaaaaaaaaaagaagtttatgatttgggagaaatcatttcctgataattttggacttggagcatggaccgggcctaaagtgataatggcctgtattcattcgtcattgtgggttgctaatgggccttactagatcccgttagccatatttcagtaagaacactacatcactaactctacatttatttaagaaaatttacaatggcacccacaatctgacttatctttttcacttttttccagatttttttaaatgtttttacagacaacagtaatttttactttgcaaaaatataacagcaacgtgaaaatattttttttagaataacagtaatataacggtttgtatttttgtaaaaaaattataatcataaaaaagttaaaaatactatagacccgcaattttgtaaatttattatattttgtgagtatttataaaataatccctttattaatgctaccaaaaaagaaaaagaaaactccacattttatagtctcacctataataaaaatattttctttccttctgatataagaattaatgaaattttaagttttgagtgataatttgattgtaagtacatagtaaatgctcatttttttttccttttcttttctaattcttaccaccaagcatttaggtttgatttggagttgggcaggaaagacaggttacccacaagtagcatattataagggaaatttacatgttatactaacttttgtcatttttttacaaaaatactgccagacagtattttttactttcttactgtgtttttttataaatttcatactgcagtata

SEQ ID NO: 298101 - DNA, 1787 bp, Cannabis indica
catcaaacttttaacagaatgaatattttgttaattttttataaaaaaggacatttattaacttaatttttagatttagggccattttgtatcttggccctttttttcaccaggtggaagtatgagattaagccctttgttaggccaattgtctaggctcggcattggcccaacaataccttcataagctactttatatgacactttatggtacaactgatgaatatagccccatacttcatacttgacaaaccaaattgtggccaatgcatgtccacatgggattcacgtaagctgaaatcttctacttgtgcatgtatgtaggtccaaatcaacacttaaacgctttccatcattactggttacctaaaacgttgaagtagttgcaagttctacagaacaatttgtagcaatttctgtttgcttttctaatatcttcataatattgttatgcaccgggttcttccatttgtctacattctccctatttttgttaaacctacgcattcgccaaagcctcaatgactccatcaaggttactatagtcttgtcccttgcttccatgattgcattattgaaactcttacaacaattattcagcaacatgtcacacttgactccgcctttgaagtgggatttactccactcagatgggtttttggcagcaagccaattgtaagctttctcatctacatctttcatcctactctcaaacttagctggggttgtggctcttgctgcagaccacaaaatttgtttcaggagaagtccaggaaagtccttcttgaagttattgtgcatgtgtctcacacaaaaacgactatcaacaccgatgagaatcttctccattgcattttgtaaacctttttgtttgtcactcatcattgtgtccatgcagggatttgtgggatgtaagtcttctttcagtagctccgaaaaccaagtccaactttctgtattctcttttccaactacagcatatgctattggaaaaatgaaagttgacccatcaatcccaatggcaaccaaaagtattcccttacaatatccttttaagtgacaaccatgtaatctaattatccttctacaacctctaataaatctatccttggcagctcttaaacatatgtaaaccttgtcaaacacccttttaccatccaccaaatcagtttgtatctttgtagtgctgccatagttagtttttaacaattgtttgcaataatcttccaatattgcatattgttcaacaacggacccctctagtatttcccttgcagttgaacgagccccaaagaattgccagtttgagacatcgaaatacttggtattctgggtcatcaatttgaaagcggcatgtccatattgggatgcatcctgaattgatcaaggaagtactttgccaaccactgtgcatcaacacgcatactattcaagattaaaccacatttgtgagtctttttgtattttttgattcaaaaggtttttccatctgttttaaaaaaaaatacttatgttaataatgatttaagctgcattagaaagaagatctataaactaaatcaaattttaaagtgagaattgagtgaaaatgagattacatatatgtagagagcaaattgaatttatttttatacaatagtaaaatggtttattgtgttgtattatcatcacaagtatgaacaagtctattagagcaatattaaaaatatatattgttatttactatgatgatgttgggttttatgccctaaataaaactcatttaattataatcaaatttacttatt

SEQ ID NO: 298102 - DNA, 3999 bp, Cannabis indica
tttaatatagtgtaaaaggaaatatttttttattttttttaattaagtagctaaactaagcataaatattaaaattttacttttattattaatcatttgaacaaaatctaataatttaatatttttaaaataatatttatagttaatttatttaataatacccattaaaaaaatattctatatatctaaaattacttcttctaatcctaaataattttattattatttattactttttttcaaatttgacacatgagattaaaaaataattggctacacaaggaaaagaattgacaataattttcaacaaaaacaaattagatgactgaacatttctactctctcatctctctcttaaaaaaagaagaaaatatcttgaaattaccgaaagaaaagacacaaaaataaaaagacgtttactcggccaaataggacaaaacggcgccgacttcaaataatggtttcaaaaaaattcacctccaaaaacatttttattagcgagatacagtacgccacgtcagcaatcaccaaatatatatatttataattaattttatatattaacccccaaagttcccaagcgacaattctttcatttcctttgggtaagctgctaagcgagccctagaaaagctgcttcctttctctctatatcaatgggcgatcatttctctttattctagggttcaacaaatcatatccaatcgaatctcagaagttctagctagattcaatttttcagttctgacagatacatatcggtaaaatctcatccaatttgggtgtccgaatatttttttgtttttcttaaaattcggatcttagtcaaaatcgaaagttcttgtttgtatcttctctttttaggttgagagaatatttctgttgggttcagttggcttggtcatatgatattgtgtgttttttaagttgagaaaatgtttgaagagctgggtctgagctcttttttcatttttagatttttgatgttgctgtttaagttttttgttttggtacacgtgtacgagtttaaattttcaagagatgatctttttgggttgggtaattcatgtttctgatagttgttgttttaattcattgagataagtgaggttttgatttgtatgtgtcttttgattgtcactatttattggatttcaatatgagcttattatttattcatttctggtttaagaagctatctttgtgctcaacttaactcgatttagatggatatatattatatttaaaacaatgatgatcccattcaaactggctttcgtttcaaagctcatgaagattgtttattttttgtctacattctaattggctgtaccgactattgacgtgattttcgcccattggagatgtaattacaaacaaaatgaatattcagtttaggaaagctatggtttgtcattacatgtgttctgcattgaggctattgagaactaggctacgtgagtgtgatgaactaggctacgtgatgtgtctagtcagagaaaagatctccaggctagggaggaaaaaaatacgttgtaaagattgaacctagaaatatctatattttttagactgcttaagaaatgggagaattgtgttcttaacttgttgttaagtggacgagtgcctttttttcttcttcaaggttttattatctgtcggccatctgattgtagtattgaatattatgttagatttaattatttgtactgaatttatcatgtagcctatttttgattttttttttaaaatccacattaaatgttcaaagaatgtgatgtcaaattatatgtttctcacttcaagatgtcttttcattcagttttaataattgttctgcctgcttgggtggaggcacctgaatcgttagtgaaatagcagaatgccaaaggagagaagagatcgttctgtctcacgtgataggtgccgattttctccatttccttgcagctctagtaatagaaggcgatcgcctaagatttcttctgattctgaagaaaatgttaaagaatgggaagaagccagatgccctgtttgcatggagcatcctcacaatgcagttcttctcatttgttcatctcacgataaagggtgccgcccatacatgtgtgacactagctaccgccattcaaattgtctagaccagtttcgcaagtcatttgcaacagataccccatcaacagtgtcacaacaagaagaaaatcaagtaataacagcagaaacagaactacaagaagaagaaactcaactgtcaaccacagatacagtgcgggaagaagacgaagaagaagaagaagaaactcagcttctgaacactaacttgtctcctgatcagaccttagaatcaacagttactgtggtgcaagaagaaataacagtggaggggtctctcacttgtgagcatcagatcccaccaaagattgtgtgtcctctctgccgtgggcaagtaaaagaatggaccgttgtggattctgctcgtcgtttcatgaatgcaaaatcaagaagttgctcatctgaaacatgtagttttacgggaacttatacagatctcagaaagcatgcaaggctagagcaccctcaagtgcgcccatcagatgcagaccctgagcgacagcgtaattggaggagattggagcgtcaaagagaccttggtgacctgctcagtacacttcaatcatcaatgggagatgaaaggagtagtgatgaaagcatcttacctattgatgatggtggttggctgactgtattcttcttgatcagagttttcagaccaggatcttcatcaaggagcagcagctggtcaggtagctctagaaccagagcgcagttgagtatcagaagaagatcaaccagactatggggtgacaactatgaagaggatactggttcttcttccagagaagaagataataatgaatcttctgatgatggatcaggtccttggacacgccgtgaccgtgtcaggcgacgcacaaccccagacaacctgccatgacagttgaagtagtgtagcatctggttgtattgctaactcatcttcagctttcaaaagtaagctctgttaatctatatagactggcattagtcaatcaataggtttacttgacttaaacggtttcacttgtttgtttcaggcggaaattgagagaattttaaagggtttcgaatatgttctactgagtgtggaacaatgcgtggagttatggatatgtatcaaaagagtgaaaaaaaaattgtaatttcttgaaactttcgatcaatctatgatattttctttggcagctttctcttcacttgcactgcaattactgaacttcctgttttaatgtgtaaaccatttaataaaacgtgctatattcgcgggcaacggtgctttgaaactgtgaattggtgcctcgagttcgacctttgaattggcagtaaagaaactggaattggctctagctattgtcacctctgttggcccgcagtgaagaagtataagaaccacgaaagagatgtgggaaaggaaagcagacttgtttaaccagttgcaccttacaatgttattattagtagtacttcctcgtcttaaaaagttaaaacttcttattttcaaacttttttcatcaagattttggtattttttaaatgattttaaaatgtaaatattttaaacatgactgtattgtagccaatttttcacggacagttcaaaagaattgattttttttttttgtcaaaaaaaaaatgattgatttgttgtatcttaatgaattgtaaaaaaattgtattttttattttctttaatcataaaatattcttttaatatttatttttttaactaattattaaaaaacaaatttatttttttaattttttttattagttttttaagtaagtaagaatgaattcaatagaggaattagttaagtttacttaaaattttagatttatttattgtaaagctcggttacataggtctatggtctcgtcactagttgagataatactgtttgc

SEQ ID NO: 298103 - DNA, 2693 bp, Cannabis indica
accggcgcgtgtgatacacgcgttgaacaagcaaatgaagtcaaacagttcttgtcttttacctctttttttagagagagaaagagataaagagagagagtttttatagagtgttgtcagagattaggggcaagagaacgtgcagaatttgaagggtagatctggatccactcaaaaaccctttctctctcttaaaatctttctttctctcactgccactcttaaaaagtctttgtttttataaatattcaaaggagagagaaagagtagtagtagtagtactagtactatagcttagtttagcttttaacttagctgagtttcttcttggatttctttcattataagctcaaaatcccaaaaaaaaatactcagagaaatcagagagagccagatttttcttgatggggttcttcatctaatttcaggctataattataggaaaaaatagaaggtggtggttagttttagatttgggttttttgtagtaaacttattaactttgattgattacaattatagtgtttgaagttttgagctttatatagaaataaatataaagactcgatctttcatatgggtaagttagtattgtacttttatgatcacttctgagtttcaaattttaatttggcaaaataaaaaagaaaatagaaagagaggctaactcaactcaactcaactcaaaaagcccaactcaaccactttgtaaaacaactcttattataaatctatatagtctccttttaatcaaccacacgagaatacactactactacttttttttttctttttaaaaccctttctttatctttctctctctctttctcacactcacacacttcaaaaaaagctttctttttcttttctctttacctttctttttcttgggttttgtttgcaggaataagagaaagaagagagagaatgaaatagagatagagagagagagagaaacactactatactactactacttctagtactactcttactactaattactactcatttcacaagttgggttggtaaattttcctagaaaaatttcaacttgaacaacaagaagaagaacaagaagaagaaagtttggttttttaatttttggtgggttagtgttggttgtgaaagaaaaaaaagagagtaaagatcacatttttatagcaaacccaactctttttcttcttctttttttagctatggattcttatgaagctacaagagtagttttcacaaggattcaaaacattgacccagaaaacgcttcaaaaatcatgggtttacttctaatccaagatcatggtgagaaagagatgattagattagcatttggtcctgaaactttacttcactctgttattctcaaagctagaaaagatttagccataaattcttcttcatcttcatcttcaccaccattaacaccgtcaacaacagttaacggctccgttaacttatctctaacaatcccaaactcaaacccaacttcatgggttgatgagttaacaattagcccccaaaaaaactcatcttcaacttccttaaactcatcatctttacccttttatgcaaataataatgataataatatcataatagatgattttcatcttcaaaacccagatttgttttaccaagattacttgtcttcttcaagtccaactgatcatcaccaagccgtttggtcaaactcctctgttaatcatagaaggagttgctctgtaagtgatgtgtgcctcaatacagaggatcccaactctggttttggatggaaaccttgtctttactatgctagagggtattgtaaaaatggaacaagttgcagattcttgcatggagttggagttggagttggagacaataacaacaacggctcagcttgtggctcagatggctcatcacctaagcttgataacatgatggctgctgcagcagctgcagctgagccatgtcatcatgagcaacagcttctcagatctaagtcagctcatcaacaaagacaacacttagctgcagcttctcagctcatggctgctgcagctaactcatttccttactcaccaaagtctatgaattttcttctccaacagcaaaatgaaactcaaaggtacaatctttaccatttttggatttaaagttttgatttttatttttgtttgtttatatatatatgtgtgtatgtataggtcagcagctgcagcagcagcagctatgatgatgggtggtgaagatttacataaatttggtagatcaagacttgaaaggaatgattttgcaatgaatggtggtgttaatccagcttctagacagatctacttgacttttccagctgatagtacttttagagaagaagatgtttcaagctatttcaggtttggtaccaaaagattagtgttattttgtaaaaattaaaaaaaagttggtaatttttctaaatagttttggtttttggtatttttgcagtatttatggaccagttcaagatgttagaattccataccaacagaagagaatgtttgggtttgtgacttttgtatatgcagagacagtgaagctcattttggctaaaggaaatcctcattttgtttgtgatgctagggttcttgttaagccttacaaagagaaaggcaaagtccaggacaagtacaggcacaaactctttcttctgttctttcttttgtgttttttttttt

SEQ ID NO: 298104 - DNA, 4445 bp, Cannabis indica
acctagcataaaatttaatatacgtgcctcgcacgtagtttttttgctatagtcaaacttatagatattatgttatatttggtatagaaggcaaaggcaaagtaaaacgactgatgaattagttgtcgttagaatatgatctctctctcctcttcctctgcctgctccaaaactcatatatcgcccgaagatccctttctctttcgattgtctattgtttagggtttctctttcatcgatcgttctccatcgtttcaggattctagggtttcaaacctaagttccaaacattaatattttcattcagagagaaagagatggttttgtcgcagaagctccacgaagccttcaaaggaaccgtggagagaatcacaggccctcgaacagtctccgctttcaaagagaagggtgttctcagtgtcagtgagtttatcactgccggtgataaccttgtttccaaatgtcctacctggtcatggtaattgtttcttctccaagtttccccattcgtaaattttgttgcatctcgtgttactatttagggttaaggatgatccaattaagccttatttacaaccgtttgtttttagattaaattttaagcctcatttagggcattcgaatttattttggggttgactttgaaagctcgattataaacttgtaaagcttggtctattgtgggttacatcattggggtgttactaaaggtgttcaatttaaatatgatgtttactgttaaattaggtcttttttctctctcaaaaatgtaattttagaatgttccgtttctgattaattccattagttttgtatcgttgctctaatagcttccgcaagcctggaaatattttccagagctattggtatttgctagaagcacctgcgaccatctagtccttatattttttaccgtatacatccaacgaaaatagtagacatagtttgttacactttcatttgctactgaagggtctttgaaatttatttgcttgtttaggttattattcatctttggtttcaagtgggtttaaggcactatgatcttatcttcttcatgggttttcatcttgttagggaatcgggtgagccaagcaagaggaagccatatttaccaactgaaaagcaataccttataactagaaatggtatggttgcataatcaatattatgatagaatattaatattacgtaggcttactctagtttaacaaattgtagaaagaaaatcacactttcatttatttataatgattattgcactgtgtacaatctaatcctggtttctcttgaaaccaagtaaacgctactgaatggtttttcatctcttgctcagtcccttgtttgcgaagagcagcatctgttgaagaagagtatgaagctgcaggaggggaagtacttcttgatgatgaagataatgatggctggttggcaacccatgggaagccaaagggtaggttatagtaaaaaatattaatttctcgtttaataatagatgtttactcatactgtctcatactttttagagggtaaaagtgaggaggatgaaaacttgccctccatggaaaatttagagatcagcaagaacaaagctgtaaagttgactccctcatattttggcggggatgacgatgaagatattcctgacatggctgattatgaagatcatgataacgttattgaaagtgatcctgtaagtgtctaatttctttttttcagtacgtatacactatgctttcatgtggcccatatgtatgaatataatgtctgctttgtacattttagtttttatcgattgagctaaattactgcatttgttgttacactttaatataattcatttttatttatttacaggcaaccttgcagcctacatatcttgttgctcatgaacctgatgacgataatattttacgcacccgaacctatgatgtcagcatcacgtgagaatatctttattattattgttaattttttttatcaaggagtcagtttcttatcttgttagaagcctatactatctgaagacagtcaaatgttgatgtaatagttttgtctttactatcttgtagttgcattttgttagggagtactagaaatagtatcttatttttgaaggttaggaattgtagtatagaaaattagcactaatatcttcttgggttctgtttcatctgtgtaggtatgataaatattatcaaactcctcgagtgtggcttactggttatgatgaggtttgttttgtacttgtcttcagttgtaatttgcaaaaagtatatcacatgttttttcgttactacgttatagattttattactgtcattgcttgtccgactagattcttattgctgtcattgcttgtcagattagattcttattgctttcattgcttgtcagactagatcttaacttgtgagatgtagtcaataaaatttacagctttcaactccaaggggtggtttagtggtaaggagaagtgttggaaagtgctagtagtgcatttgttccaaggttctaatccccacaagctcaaaatccttggggccgctaggaggactccctatcgaattgctaggaccaaaacttaagaaacaaataaataaagtttagaaattccaaatctctttctgtttctatgaatctttcatgtccgttatgcttggttagtttacattatgagccaataacttgatgttattttggcctatgaatgtcctaatttttttattatttctcaatgaaaatgcttgtgcaactgatcatgcccatcccttgctctcttagtcaaggatgcttttacaaccagagcttgtacttgaagatgtcagtcaagatcatgcccataaaactgtgagtgctctacatgagcttacatttaacattttacttgaacttcctctggggagtgcgctgttttgtggagctataaagaaaatggatttaacttatgcctttgattgtattaatggtcattcataacaaatgcaggtcaccattgaggaccatcctcatttgcctgggaagcatgcctctgttcatccttgtcgacatggagcagtgatgaaaaaaatcattgatgtgctcatgtcacgtggtgttgaacctgaagttgacaagtaatttttcccttaatacatctgttcaacttttaacaaaataataataaataaacttgtacagacatcaaatttgttagagttgagtgatataccttgttagattgattttgatcacatgttaatgaaattcattattgcagactagcttttttctcattgaatgatgaacgtcttataacaaagtaactaaaataactgaaaagtaaaaattctgcatgtccacaccttgtggtgggaaactagatatattaagactagaattgacaaattgattgtagtttatgcatttgtatataattacatgtggtagaataatttcagttcacattattattcaaccgtaaaattttgaaaactaacaattattattttctattggtgataggtaccttttcttattcttgaaatttgttgcatctgtgattccaactattgagtatgactacaccatggactttgatcttggcagctccagcaactgagccaaagaaatttcgagtaagacgggatctatgtttgcttaatgttattggcataattgaagtgattatctctgattttgtcctttgcttctgaaagggactcaatttgtggtctgatgctttgccgaagccaaacccaagtacatacaaactgtgcatattttcacttgtcctgctccaaaagtgtacatggtactccccgtcaactgatggaaacggggtttaatcacttgtaccccatgctataaattagtgcgtggataatatcatttgtagatcggtcaaacatgtcaaagctcaattttcatgtgataggttttagaataatctgatctgccttgtcaattatcattagctattatttgtttagctgttttaagtaaagggtacatattacgtgtcgttaactttcgccaaaaatattacttggatctaatactcttctaagttatttggaacatgactagtcgtgttatttagctattttggccagtgcgaccttgttgatgtagtgctatttagtgactttggccattgcgttcatgtctatattttatgtctatgtatatgaaactagttaatatagttatagcggttaatttatttttttaatattataataaatagttacttaaaaatataattctatatagtaaaattataaatatattatcttattttatattattttaaataatttactgaaaactaaatgtacaattttttaattattatttagaattattatattaagaaacttaaaatttattatatgtagtattttaaattgttttgttaaaagaaattatttttataaaaataaataaataagatggtatagaaa

SEQ ID NO: 298105 - DNA, 2458 bp, Cannabis indica
aaaatgtattttgggtcccgaacctggctcgacccaaaataccgagttttgattataccgcctcgacttgtcagaaaacacttgcaaaaggacaaaacaaatatactatataataatatagtccataagcacgctataacattaaaattacagttttaccctccccaagtcaaaattacaaaaatatccctaactcaccaacgggatcttaacatgtcatttattggtataattcataaatattaaattatataataatataattccacattaatacatatttaattagttagggtttgctaatctgattccttaatcttaaggtattacagatatggtgaagcaagtcaggtctttctttctttttggagttcttcctgctggtttgaatcatactcacattgtcctaattccaaaaaagaagaactcagtaactatgggcgatttgaggcctattgctctttataatgtcctttataaagtttgttctaaagtgttagctaaccattcgaaagagttctctctttggtcatttctaaaaaatcagagtgatttcattccatgtcatttgatttcagataatatcatgatttcttttgaggttatacactacttgaaaagaaagcaggttggtaaggaagggtacatgactccgaagctggatatgagtaaagcctatgatagagttgattgaaagtatcttcatgctattttacttgaaatggattttcatagtcgtttagtgaatttgattttccattgtatttcctcgattagttttatggtcactcatgagggacgtgaattgggtccttttgttcctggtcgtggtattagacaaggtgacccactctctccccatttatttcttatctgtgtggaaggtctttcctctcttgttaagaaatatgaatcttgggatgatcttcataggtgtcgagtgtgtaatggtgctccagttatttctcacatactttttgcggatgacaactatatttattgcaaagctacggaacgtgaagcaaggaatgttattcggttgttacaagtgtttgaggctacttctggtcagtgtattaatgcttctaaatcaaccattttgtttagtttgaacacctttctggcgactaaagattcaatttgtggaattttgggtatgatagaagctcctaaatagtctttatcttggtttgtcttgtacaatgggacacaacaaaaatattattcttggttttcttaaagataagatgcaaaaaagaattcaaagttgggaaggcaggtaaggaagttctattgaaaataatggcttaagttcttcctacgtttgctatgtcggttttcttgttaccatttgaaacatgtattaagttggaagggatgatgagtgaattctagtggggttcaagttctcaaagccgtggagtaagttggattagttggcaccgattgagagcacataaatatcatggaggcctcgactttcatgatttgtgagatttcaacttgtctatgttaggtaagcaggcttggcgtcttttaacgaatgactcttctcttgttgctcgtctttacaaagctcgttactaccctcggggttccttccttaatgcaactcttggaagtaattcatgctttatttggaaaagcatttttgaaactcgagatttgattaaagctggagcatgttggtcggttggctctggttcaaatatgaatgtcctaagggatctatggcttcctgatgcctctttttcctttattatctaatttttaattggtcttgataattgtttagtttcagatcttatggtggtagattcaagaacttgggtttcaaaaatcattgcatatttgttttatgagagagatcaagaactcatgttttgtggaaaattacttgattgaaaattcctcctaaagtcaatcaatttttatggtatgctcttagtggctgttttgcaactaaagtttaattagtgtctaaacatgtattaattgatatgacttgccctatgtgtcattaagaggctgaatcaatcttccacctgttggtaaattgtcactttacaaaattatgttggtcccgttcaagcgcggattatggtaacttaattggacaagatttttgtgactgatttgggaagattatgctacagcgctctgcttcatctggtctgaaaaaagaggcagcaatggtggcttgggcggtgtggaatgttcgaactcggtggtttggcgggagaagtcttcttctacaagtccttaatcaataattatatgcataatcaaagaaaaggggatctctgtttattcctttgggatcagaaagagatttggagcattcaacgaaaccagtttctaatacgattaaggtgaatgtcgatggggcaatttttacttcagctaggaagtgtggtattgggttggtggctcgtgatagttctggcatgttgattga

SEQ ID NO: 298106 - DNA, 1736 bp, Cannabis indica
aaaaaaaaaataaataaacaaaagaaagaagataaaaccataatttgtttaaggaaatgagaattaatacttactccatataccatgataaaaagtaacaattaattatacaattattacttttttagaaaaaattacatgtgatccaaaacaacaagctatatatcatctacaaagagatttatacatgcaatcttttaatttactaaagccttttttctttatgaaattaatataaaatacataattatatgagtgcacgcagtgtgtaattgtattcatttccaaaaagttaatgacatccattatttgaaataagaacatttgagaatttcgactacctaatcctaaattaataattatattttcccctgaactaaaatttaattatcttttaaagcactgaccttcatcatcatcttgaaacggccaccacatatttattaattatttaaaacaaaaaatatatatagttggattagtacgtacgtagttcaacaacctcaactaatcacttttaatcaaccaattagcaaagcttgatttaataataaaaactacttttggagacttatgctttcattatgtttatacattaatatatcaagaaatatatggtctactcttaataatatttcagtttctctgtattaataattaataatctttttaataaactgattaaattatacctaataatataagaaattaatcaaaactataataattaaaacaattatagtttattggcgcgtacatattatatatattaacataatatacaattaatatatataaatatatattgtatggattttttggttgtgcggatgttttgctacaaaccctagtataatttatatataggggatccctataaatatagttgtatttctcgaacactaaataaaattcagtcacaaaaaccaccatctaaagatagatactaagattgataatctcaccttaattaatttggctatttataaatgaagttatctttttcattcaaaaaaaaaaaaaaattaattattcgaacagccatccctatagatgtatgaatttgggaaattaaccaaaacaacactcaatcgcgcgagcttaatgctatattaggcactaggaatgtctagtacatactacttaaaaataacaccttataattagttaatattctttaaaaattattatttaagttataatgaactcgatactaacagtctaacactacaaaagtatttttacgagtaaagtactataatgaaatcttatggaactaaaatatacatatgatttatatagttgtaaagaacatgaaaagagttgttattgatagattttctcaggaaacaaaaatagaaaataagtgttgttgatagagattggttatgccaatttatgacagatagggatgaattgtaaataggcgtgatgtttataattgttttgatgtgcaataaaattttctcacttacaaaaaaaacttttaatcgcaataaaatttgtgactaaaagcgaaaaaaatataattaattataaatcaccatttttatattatgactaaaagatccgtgattaaagatattcatcacaagatcacaatttattgtgactaaatgtatttttagtcacaatacatgttgtcacactaaaactaatttagtaacaacttgtatctaaatactatgttttaattacaagtaacttttttgtattaattgtaccaataataatat

SEQ ID NO: 298107 - DNA, 3189 bp, Cannabis indica
ttaaaaacccaatggataaaaaaaaaaaataaaaaaaacagtatatgagataatttcctaaaaatatattgttagtaaaatttaaatctttaacatctatcacgatctaatttaattattacatcaaaactaataatatgtctataaatattattttttgttacaaatttattatgtctctcgtcttcctcttcctttatacatatcattacttttgaagacttattgaaattgatttcaacttaatttttaatctctttttcttttctttttaaatgaaaacttcattcaaagttttttttttattattttttttatttaagcgtttatatattacaaccatgttttacctagaattcgaacacaggacctccaacacacacacacccacctatggccacttgagctagcctcaagtggttaaacttcattcaaagttaataaaagggtaagagccctacaagtccaacagaaaaactgcaatctcactaggagatgataattgttggccaactgcgttgattcaaaaggagcaataagctcaagacccacgtaagagcatatagagggacaaactctccaaaaaaaacctaatgtcaatgccactaagaatatgaggtgcacaacaccgaaagaactaaaaaaactaaaataagcaagccaaacaaaaacataaagaaaaacaacttcaaaagtcatcccctaacgcaaaggaggcaacacgacgacccaaaacaagcaaactaaaagcaaaggagcgatgccatcttccaatgagaaaagtccacactaagccccccattgtggttttcaacggtgaagatgctggaataaaggaggcacacccctttgggtaaaacatgagtccgtcctctacatcaacaacactctgaaagctaaccacaagccattgtgcaccagagcctggatgccagaatggtaacttaagggcacacatcaatatctaaaataaaaagaagaaaaccaaagctccaaagcctaagctcgtgcctgaaaagagccactagaaaacatcatccccaaaatcgaaagggaaatagccagtagaagcccaccatcgtcggctctcaccatcccaagaaaccagagctacccacacccaccatcgtcgttatctcgtgacccaagagaacaacttcaaccgcaactcccaactgattgcaagaggcgcccaaccactgtggtcggcagccaagcgcttaaaaatgcaagcactaccgaaccagcacctaggagtgaggcccaacacccacacgagccatccaatgccaaaacccactagagaagagctttgtcgttacattgagagaaccaaaagccccaggcaccaccagcctagattcgggcgacggcacccatgagagcattaaaaaccctataagtttctaaaaggagaaaagagggaaaaccctatctaagagagagaaaaaaaaatcacctcgtttttatgagtagataaatcttatggtggtgtactttagaagtatatttttttattctaattttaaccttttagaacaatactgtcaaaaagaaaaaaatatattttactatgataagaaattagattttagtcgtaatagtgtctaaaactataattagactttaatttctttttgtctttaatgtaatatattttgtatgatatatttatttatatttatattgggaaaggaatatttaaacttaggatttcctctttgtaagtagaagtataaaacgactatattttttaggaatattgacgataaaactacttaaattatataatttgtgacacttaaccctacaaacccattttttggtggtaacaccctctgaacattagttctgtttgctatttactattatgttataatgatagtcgtccttgtcataccagtccttgatgtagccgtcctcgtcttcctcttcttcttcattcatcttagtatctttttcatcatcgacacggacatgttgtttctctgaatcatcctttcgacgattcacatcccgcctctcgcatcgctcgactgggcgtgctccggcgagaggaggagtttacctcctccatgattgccttaaggccgctttgaagaatttatagggaaccatctttcgtgtgaataccatggctgtagcactagtctacttattttttcagctttgaatgaaagcatcaaaatattaaccgaaatttttaaaaattaaatatttaggagctaaagaaataatagcttgcaaaaataaagagatgaagattttttacgtgattcaagtgttaataaatcttagtccatgagtcagtctattggcatttaatgtcggtattgacatgtttataatattttataggaaactctaactttgtaccttaagtttctcttgaaaaagaagaagacctagagttatattaacagagctttagctatttttgatttgcccccttcatatgagaagtgaaggatatttataagctaagtgacaagtatggacagacccatgacccgcctaaggtatctgcttacatcctattattagggtaaattacatgcaaaataagatttgactgttgaatccttggaccaaatcacgctcgtgcgccttacagcaaggtaatttgggataatgcgtacgacatggacacttgtccttcaaaactttaacctttaaaagtgatggtccgtagtacctgcctggtaaaaaggtattggaggtgcgcaccatactatgctaggatataggagacatgatctgatcttgtaaaaaaaaagtataaccgtcactttagcgacctgtcgtatgtaaaaggtcgacatccgcgacacttcatgatggtcgacatccgcaacacttcattcgaatacttgttcaaatataaaataagtgagcttccttgttagaccctttcagattcgggagaggtattctgccttccacatttaagaagtcgaggcaagtatgaatttgcttccgtgtatccttccttcctaggtactcttcagttccaggaagccttcccatgacaaaacggttccaaaggactctcaattaaaggaataaattatccatcatcattaaatgccacgtgttatgtttcacagaaatgcaaataacaataattatattaatattttttatttttattttttaagtattcttttatatatataagggttatttgcg

SEQ ID NO: 298108 - DNA, 4595 bp, Cannabis indica
ttttgaacgttggtgttggtgtaggggcatctcggaattgatgccagcttttcctacacttacattttgtaaaagttaccgatcaaagcttatattttgttaaatgataaattaaactcagtattttccaaaatagcactaaatagtaccctacattaattttttgtcaaagtaaaacttaataataactcaatctaaaagtattatgacaaaactagttacattttctacaactattcgtgctagaaattatcttcaaatttgttatatttataaaaaaaatattgtcaaaaattgaactcaaagtcttatttatactattttagaaaatatatgatttattttaccaaaataaaatatccaattaataatttttgcaaaacacataatttaaaatggtattaaccctacattttataatataaaaaaacattggcttagagaaacggcaatatatgacaaaagggacttgagcttgggttggcaatgtgtttgtgaccaatgcgtaaagaaagtatggagaatttttgagctatccaaatccaaatcaaaatcttgtgtgtgtgtgtgtatgtgtgtgaacgtaagcaaatctgtgcacatgataactacaactacattttccctcctcgaatatgcattgaatagctacattgtttttgttgccgaatcttcaaaatgacatgagcattaatatatggcacttgtatttgctcaacaccatcatatcgtttttttatataatataataaaaagggaatcacgtggtgcagttctgaaaattacgtactaactataggagtcttatacttcatcttaccttaattgaatcatcggtaccaccagttatgagggttcccatcccatgatgacccaccacagcaaactataggccttcaaaggccaaacataattcctcacaacgagggctgtggttagattcgaaccatttactcaaacaagggaggttgccagtaaaaacttccttaccactaccatagcaagctataggccttcaaaggccaaagcataattcctcacaacgatagttgtagttagattcgaacccttaacccaagcaagaaaggttgccaataaaagcttctctactattacaccacacaacacgaacaccaccttatcttgataataagctatactcgtatgtttgtaagtttattattcgagtaatgatatgtgcatccaaatatcagccatggtaaaatgaaacaaagataaatatgattaatgtaatatttcgatacatattttgagtgtagtatcattaatttcattatttttagttagagtgatacaataggacacatatagtcaagtgataagaaattctgagtagtcatgggagaggcttaatctagaattttatttcaaaacagttgaccattaagatgaaaaacttctttcttttttctttctgcagggaccttggaaggaaacataacacaaagtactcgaaaatgaacatatgcattgccccttttccagtgaaaacatgttagtgatccatgtctgatcatattcctatcgggatccagaaatgtacctggttttagttaccagaaaactcggtagaagcaatatgaaggaaactcgattctctgattctgtgttctatttatgcaaaaacacttaagatgaaaatgcttctgtacagaacattaatgtcttgccaaccaaagtagcaggattaatgtagaagcataattattcttttcaaggccaaagaggacttggtctgcaaataaaccaaatatccaagtaaacacacacacaaaaaggagagtttataatttatatgacttgaagcagcaaactataagacatggataagcaagaaagaaattctatggaccattcctcatttctcaaaataggttacattccatgtttcgttgatgtttaatctgaacttaaagctaatcctatcatcctatattcctattcttatagagagccaagccaaggcactcattgtggtccaccacattctaatctactaaggcagaagcataaaccacttaacatggtttccattacaagagcacttaaccaaccaaaatccgattcacaattcagaatagtatgacagtgtccatgaaaaaaccattatctacacaaagccaaaaaaaggaaaaatgaccaaagagattaaactagaacaggtgaaaaaggataaacctcaaaataatctctgtgaaggtttcttcccgaagatagcttcccaaaccaaaggcgaaaatggagcttttttgtccaaaaattctctaacagctttgtcattaactgtaaaacccttctgtcttaactgtgtaatgacaatgttagcttcttcaacacccttttcctcacacaacccatcaaccaagcccacaaaagtagtgacattcggcgaatgcccggcttccaacatctccatacaaaactctacaccatcatctaatcttttacatttatacaaaccctgaatcaatacagagtaactaaaggcatttggatcaatcccattgctttgcatcttcctaaaaattctaatagcatcatcaagcttctgagccttacagaacccatcaacaacagcagtatatataacaacttcaggtatagtacctttctccctcatcacaccgaaaagtttcattgcttcctgaacaagaccatctttgcaaagcccatcaagcatggctaccgcgtttggaataagacccgtttccttcatcttcttaaatatctcatccgcatcctcaggcaccggtggaggtggtttgggaacttcttgttgccgagactgttctcttttatcgtactcagtatcattagctccaagcttgaatctttcaagaaaactgttgtcttctaaaggattttccctcttctctgaatttctcccacgaggtttaggactctgggtattgaacggagctctccctcgcatgggtctgttgggtttgggctcccacgagttctgtggaaccctttcgcctgagctttggctttgattcgtcacttcactttcatcgccgccattaatgctggagctaaaccatcgaagctccttcgataaattgaaaggtgatgatgatgcttcggttgtcaaaattgaggattgagatgaacgaacaagagagttgcagattttggagaggacaagcttcgaaacattacctcgtgagagctgcataatgcataagaatcaatggcggatagggtttagattggattttggtgagtggagatttagggtttaagccacaacaacacgagtattggagaaagaaggagtcgtatagtattattggttcatattaggcctccctaaactacatcacttatttcaattaagtccctaatattttaactttagcaattaaacctttttttttttgaaaaaacaagagtcattttctatacacgaaacagaacccctgaagtcagccggacgccttgggttttcacccaatgcccaagttgacattttaactagggttttggtttctgggtccgtcttagtacaaatggctcaaactttgtattaggacatgaataaggcctatcacaaacatatttgaggtaacagaatcaaaattagaacattttcagtttttgagcacttgaagaagcactaagtgccctagacacccaacgtccatgctaacatattgtcaacctggaacgcttccaactataatattgaagatgtatcccaaacattttcttcgtcttcatctagaacgaggaaacaagtactttcgggaacgaaactgattaacctgaaggccaaaacaaggattaacacccaagttgacactttgtcagcctgggccatttccatcagcaattcagaagaagtcttccgagcatatcctccgttttcatcaacaattaagatatgagtgctttcaggaaacaaatggagtcgtctgggggtcagaactaggacccagcacctaggttgacttggtgttgagcgcagcacccaagttgacattttttcaacctaggccatttccaaagagtttttctaagaagtctctagacatattctctattttcaacaagtatttttgggaatcaaacagagtcatctactagcaaaaaattggacctagtgcccaggttgatacctgacggctgacactaggcccaagttgacgttttgtcaacctaggctattttcagtcattttttttataaaagtggtcaaggcatttttttcatcattagaaataacaaagatacaagtgatgtcgtggagcaaacaagatctccagggagccagaacagagccccaacatccaggttgacatgcaacctagttcacgtgtttacgctcatcaagcataaatttttgaagttatttcaaagatatatcaagtcatttctcacacccatattgcaattatgaagatttcaagtctaaaattcattctcaacatagttgcaatttttttcataaattacccaaaaatgatcccacgaacgagattcaagctctgaaagttgacgattttcatcaagagtcaacttttaatattagatcatcatcaatgaccaagattagcccaaagtaatttttt

SEQ ID NO: 298109 - DNA, 4772 bp, Cannabis indica
ctatggtcaggtataggttagggccaaggttaggattggggtctaggtcctgtttagggtcgggttgggatctgagacaagttctgaggtgtgagtcgggtaggggttcggggcgagtttcgagttgtgggaccatgggtcgagattgggttccagggtttttggttccgatacgggtaggggcaagagtccagatcagggccaggaagatctaggtcgaggctggggttcgagtcggtgtccgaggccagtgtgggggcaaaggctcgagtttaggattaggatcaagagtattgaatgtcgaggttagtatcaaatacgatatataattaaaaatatctatttctattttaaaaaaaaaatacaatacaaattacgcttcaaacacagtaatatttaactaacttattaatacaactcaatagaaaaatactattgcattttaataatactatacaatacaatatgtaatagaacattgtgtaacaaatacacccttaaattttaaaataatttgaatcttactagttattgtttcttgttgtagggattgtcatcatatgcaacaaagagaaattgtatgagtgtactaatggaaaatacaaaattcgtacaagcatcttcaaactccaaccaaaatcaaacatctcctctcacttgtctaaggcgtgagttaagaagccttcctcccttaggcttataccgttccatttacagagttcccaagcggctaagcaatgtcaatgaaaaggcctacacaccacaagtagtttccattggcccaattcaccatggcaagaaaagtttgaaaccaatggaagttcaaaagaaaagatacttacgtaattatcttgaacacacacaccaagacatgaactattacgtaaatatcataaagctcaatgaagaaaaattgcgcaattattacgccgatcctatcgaattttcgagtgatgaatttgtaaagatcgttctagttgacgccaccttcatcatcgaggcattgctgataaaggctggtttcatagacataaacaacaacgtcgaggattgcatctttcgacaaccatggatgttgcaagacatcaaacccgatttgttgttacttgagaatcaattgcctttttttatccttgaggaacttttcttcccagtaagaatgtttttctctcagcagaatatttcaatcactaagctagcccataatttcttcaataatgttgttttacaccttgaagaacaatggaatgattctgatcagagattctcacatgtggaacattttgttgatctattcacaaaactatccacctacccagtgaagccaaattgttatgatcataaaatgagaatggaaactttatacctcccaagtgcaacaaatctacgtcaagttggagttaagttcaaggtgagaacaaccaatttgcttgacatccaattctgctatgataaaggaattttagaaattcctaaactcaatatatatgacagcacagaaatcgtaatcagaaactttgttgctttcgaacaatgccattccttccgtaacaactattacataaccaattatattgtgttttttggattaccttattaatacccctgaggatgtggaattgcttgttaaatatgggattattgctaattatttaggtgataacaaccaagtggccactatgataaacaagctcggtaaaggggtttcatatagtgaggatggtttttattttgctgaaatatttgaacaactttgtgactactctaaaatcccttcacacggaaggaaggctaatttgaaacaaaactactttcactcaccttgggcaggtctttctgtcattgcagctgtttttctcatcattcttaccttcatacaaacagtttgttctgttatttccgttgttaaaaactccaagtctcactagtttctatggtatggtagtttatttattatgtgtgagttgggcttctttttgaattgaaggatattaatatcgaattgtgtgactataagataatgtttttctataactctcattattaatgagttcaaacaatgttgtatttgtatttggagattcattatataaaattagctattgaatataatgtgttgatagacgaagatcaaatcataatgattgggtctttatttcttcttgcaagtataaaaaaatttctaaccaattaatattgccgaaaccactgagcttgtccacctccgcagagagagtggccatgacatgaaccgtgccttgttggcacagccgtatttactatcacgggccaagaagctcacgaccatgccggacctgctattttctttcctatgctatctcaggcatctctgctatgctctctgttttctgctacaccgaatttgcagtcgaaattcccatcgctggaggctccttctcttatttgaggatcgagttaggggacttcatcgccttcattgccgccggtaaccttatattggaagccatcatcggcactgccgcagtgggtcggtcctggtcatcttacttttccagtttgttaacaaatgacactgattatcttcgaattcgggtcaattttttgcctaaaggatttgatctatgggacccagttgcgtttttggttattgtaaatgctatagcattaagtgggacgaaaaggacctctgtcttgaattggatcgattgtatacttagtcttatggttattgtgttcattatagtaatgggaattatttgtggcgatgtttcgaatctgaatccatatttcccaaatggagagaagggtatttttgaagctgctgctattgtatacatgtcatatgtaggttttgatatggtggcaccaatggcagaggaaactaagcaaccctctagagatatctcgattggtttggtcggttcaatgagtatgatcactgtaatttatctagtaggcaatgacctctgcctacacctcctatgcacttgcttcggaggtctcctattcacctctgtctctcccagttaagagatattcttcttacatgcgagttcgatctccagtcatgtagcccttttgacatatctaacaaaccgtaggtcatgaatatagtattttcaagtgggaactcaaatctggtctacaaaaaagttaaagtttaaagtcatacaattttatttgtacaataattttaactgaagtattacaataaaattgaatgttaatgctaatttgtcctagatattctgaatgtctgctttgtcaatgctctcccaggtaaatttattcatgggaatggtgttccgaacacagagtttgaccatgttgttaaacttgttcccatagttgtctatgggttctccggatgccattgaaattttaatttcttccccgcaggttgcttgcccagttcatcttccacattttttcccttgtacgctcgtctaacaattactacaagagatacttttagtgttggttcaaggatcatttaattttaaaaattgacaccatagagtattcaagtttgagttgtaaagtataactgacatttaaaaaaggccaatggtgtcggtagtaagccaagactaaagtctaaatagagttttaaaagagttaacaaaaaaacctctatggtatgggttgataaccaagactcaaacctcttaaactctcagccgataattgagactaaagagaatataaaatatgaaaccaaaacaaaccaattgaaacctcgccctctctcattttcattttctcatctctttgcgcttgaataatatcgttcgttgacccaaacacatgaaccggaggtggcctagtcatcctcctcctctgtctgtctccttctcttagttttaccctcaaaatcttgaccggccaaaacaccaaaacgtcatcacggtccaaatcattccgaccatccattcactctaccctgtctcttctctctcctcttcaactttatgctagccccttcttctcgatagtcctaaaatcgaacaccatcctcaactctagtaagtattgtttcttactcacttttattctcacatccaaaatcttatctcaaccccatttttggtgttaattttttttggcagagctttaggggctgtttggttgtgttttgaatttttcagtttttaaaattgtatttttaaaagtgagaatacaaaacacatttttgtcattttaaaaatttaatggtgtttggctcatattttttaaagctatttttagatttttattttttactaaaaaattaatattctacaccataccaagacatgaacccatcccacctcagacctagacctagggacctggccctagaccctaagacccaaaccccaaacacaaactcaaatccaaaccccagaaccttgacctagatggatcctggatctaggtcagtgtctcggtctagggtttgaggtctgagtccaagttcgagtctaggtctacggttcgggtctagggtctgacatttaggtttcagtttagggtccgagtcgaggtcagggttcggggtctaaatccggggtctaagttttgatttgaggtcagagtctgggtctgttgtctgagtctaggtttcgagtcccgattccggtcggagtttgggtctgaagtctgagttggtacgcagtccgggcctaaagtgtgagtctgggtcccagtctgagcttgagtcaaacttagggtttggatctgggttttggagtctgggttgggggtctcgatatcgggtctaggttcaggtcttggtctaggtctgggtc

SEQ ID NO: 298110 - DNA, 2493 bp, Cannabis indica
cttatcggaaggagcttcgcaaaaaggaattaaaaagggtattctttcaactcctacttattattattattattattctcatttgatagtggaattttattctcaattactgtcaattttttctctatttgaatccccgccttaaattaatcgcgatttggtctactgatgagatattcactcccttttcgatttgtttactggaaaacttctgaagagcagattttattttaaaataagttgataagagaaagataggattatactttctcatgtatgtatccaactaccaaattgatgcacatataatagaatggtatgatacagcattgagaacttattatagcttaacttaacgaagtcccttttcgtatgtgtatctaatgatacccaaattgaaatttgcacgtatgtatatttttgaaaaacttattgcctacaaataattaactcatcctcattttttttaccttcttatttttcttcgaggtctcactaaaatttgaaagcatttgttattttgctagttgtttcttcatttctttctttccttttaaaattgaagttttgcaatttttttgctcactaatttttccaacttaaaattttcatggttaaagaattgcccactatgttggcagtgttacttgttgatggtttagtttttaaagctgttatcatgctgcttgattcaatacagacaaataggctgaaaaagttgaaaaagattatcattattattcgtatcagtctatcacttgtgaacaaaaaggcaaacaacactgcattaatatctgtaattgtatcatcttttccccaatgttcctctcatttttcccttcagctgttaaataagaagtgagaatgtttgaatttaaattgatcatgttaaaggtagttattaattggcaggctggcagcattgagccgcgttttggcattttaagtactttgggctcacattttcttgttaatggtttcattttaagggtgtagtagattataataattattacatttagggtccatttggttctattaaatcgtattgtattgtatggcattatattgaattgtgttatatgttatttttttatatagtataatgtttggtattgacttctatatatacaatattttgatataaaaaaaatttaagtagtattatataaaaatatgataaacaattttatattatactatagaatgcaatacatctaatacggcgtaccaatcgaacccatttcactcactcactgacccacacagagctattgctttgttcatgcagaatatgctcttaatctacttgccttatactaattttctcacttacaattctatttgtattacaatgagttcattgtttggtttgaaatttgatccatatgctgatgtcgctaagttgttttatctgtgactaacagaataagaaagaaaggaagaaggtgagggaggtgggaattttgaagaaggaccctgaatcactaaaggagcagattgacaagttgaatatgatgagtaagtcatggtctcagtatatttcttatatacacttcatctttattttcctgttataagtgaactatattgaaaatcagtcgtttaaccttttgtttaaaactcaggttttagggaggaaaaaaaatgatttccaaagaattcattttcttctgtttggaatatttagaaaaatgaaaatgtattgcataatcttttcccatatgctctctctcaacgttattactcacttcttcaattaatctctttctttcctctttttattttcttagccatagctcccaaagtaatgccaacactgcaggaacccatgaaaccttcttaccctgtttatgaacactaaattgctagaagtaatttgttgtatttacttacatttttcttttttaaaaaaagaagtcagttagcctttgcctttatttttgacagttcacttttttaccactctcttggcttctattgttcatgtaatttcgtattaattgctgtagaggctgatggtgctttggacaaggcaaggaaacacaagaagagacaactagaggacacactgaaccttgttctaaagaagaggaaggtaatggcgtatatatatggcttttactctttttttttaaaaaaaaattctgctcctgtactatttttcatgtaatcttatccactattctccttcataacactgaaagaaaagggatagaaaacaaatgcattgtttttcagatagcagtgaaactcaaagaacatctcaatttaacttctgcactgaagagtgttttctagattgttgttcaggtgttctattggtggattgcagttgtagttcttggtttcatcacgttttacatactgtgagaagtggtcttcctttctagcctttcaaagcatagtaacacgtgtcttttatttagtatgtatataatcctggatgttgatttattttatgttttatttgtaatttatatatatatatat

SEQ ID NO: 298111 - DNA, 2036 bp, Cannabis indica
atttttttattttaatttttaaattaattacattaactttaattagtaattaatagactaaaaataaataataattatacataattatatattggatgtaactattaaaataatatatagatatagataagttttattaaatttagtagtaaataaattaataaaaaaaaaaaaggttaagaattaagatttaactgttatattaaattagttggaaattcatatatatatatatatatatatagttgagatattacatgcctacctaatttacttattaaaattaattaataataaattagcatgtatatgaaataaaataataagtaattaatcgttaaagttatgtcactatccacgtgtcattttctttattagtatatgttagtgaatgaggttttatctcaaaactaattcgtaatgggatgagtaactcattcatcttataatattatactcttttttggcccactatccctgatcacaagtggcttttttgttttactttttaaatcggtattttcaaattttttgtggcttctctttttggttctacttcgatcgatttttttttttggtcagatagtcattagagggttttttttccttttttattttactttgataccatgttagaatttggggagttccattctgaaactaattgtcaataggagtagctcattcatcttatatattcaattatctttccacttattagtaatgtaagactctctataattaaattaatttttaaatgaaaataaaaatttaataaccatgactagtcaagggactatcatgtggctattgacttgttctgaaaatataatttaaatattattaccatcagaaattaaacttaaatatttatttataataaaaaattaaatttaaatatttatactaccaaataatagcttgtggaaggagatctttggtcattttgatcaaataagaccacaaaatatctaggtaggggatctaaggcgtaataatagtagagacttatataagactagatttgctttccaaaaatacattatacatatttttgtatacagaagctaataagtgtgaaaggtaataataaaacaacagaaaagtccagtagtatcatggacagaattgaaaaggacattatatccattccatatttccattattaattattttatttatgttttgcacatgttatcgtctaagtatttattaaaactcttgttatcccatgagaagcgacactacctctatgtttatatagttaaaattcttgcagcatctttgccactttttgaaatgcttgtttctcataaactgaatatcattcaaacaatttggttaattttctagtctgcagcaaccaacattaatcatcattagatgcgacctatgtatttgttaatgttgaaactatcaatgacttgttcttatccattgaatttcttacccgataggataacaaattaggttaccatcattggtgaatctattaagctataagttttagtctaatctctctagatgtctctagttctctccaataattggtctaagtggtgtcaaactatcacttagacacttcaaaggacatcccttgaacgtttctacacttatacaacgtccaggttgatgtcagatgtcaacttgggcgttgggatgtcaactagggcactagaacctaaaatggtcataactcctcaatttttatccgattgacgcaattcaacttttttttgaagatatttaaatgctttatcaagtcatgtctcacaccccagtcgcaattcttaagctactatcgtcaaaaaaaattccaagcgagtcacgaaaataagctccaggtaacccgctgcgggacccaccgaacaccaaaaattggccttcacctctagaaactaattttcattgttagatcattatcaacaatagaaaacaacttattggtatttttctcctatttgcgtaggcctccttcacctataaaagaatttagaatactacccacaaggtcagagcttctctctctagacttt

SEQ ID NO: 298112 - DNA, 4820 bp, Cannabis indica
caaatggtgcagtcttcagtccactttggtggactcccctctgaagacccaaatttgcacttgtccaatttcatggagttatgtcagactttcaaggtaaacggagtcagcgatgatgccatccgtttgagactattcctattttcgctgagggagcgggccaaaagttggttgatctccttgctaccgaactccattccaacatggactgatttggcaacaaagttcttgtctaagttttttcctccagcaaagtctgccaagctgcgaggagaaattaataatttttgtcagctggacaatgaatctctccatgaggcttgggagaggttcaaggatctaatcaggaaatgtccatatcatgggattgaaaagtggatgttggttcataacttgtacaacaggttgattggtaacaccagaacgattatagatgtcgcagctggtggggcatttatgggaaaaagtgcaaaacaaggcctatgatttgctagaagaaatggctatgaataatcaacaatgaccaattgaaagaggccaaacgaagaaggagctaggtagctggtatgcatgagatagacggcatcaccaaattaacagtccaagtagaggccctgacaaagctgatggttgttcaagcaaaacaggctcaagttacttgtgagctctgtgggggtcctcacacctatgacgaatgccctagatgtgaatagtttgccgatagatcaagcaaaagtcatcgggaattatttcaagatgtaattttagacgtaaaagttgactaaatttgaaaagagattgtaattattacatactaataaaaaattaatgataatgacttagtgttagtatatttattataattggctgataataactttttgaagatggagaagaagtacaactaataataaagatataaagtgaaatgagttgccttttgtattatacttttgtcttggttttgcatatgtacgtatatatgtgtctccatttgagtcagttgctcaggttagagagaaagaggaacccattgatgccttagattactagtcgatcggtactatatatattattattgccttctaattagtttgaattttgatcacagaaatctcatcctaaatattatcaaaaactcccaagtaacttctctttcattcaatcaagttttcaaatttctggctgttctgttcatacaattaaaaacaaatttagcaaccaaatgagaacattcttgccctgcaatgtcgttggtccccactcatgtttttttgtttgtttgggctggtctggctgtaaaagccacgtatatttttatgctctaagtttctatttctttgtgttcttatttaatttgaatacataactatcttcagttgatggataattagtaactagaatatttaatccaaaagaataaaactaatttaattccttataacttatataatgtatattaatatagtacacacatacatatatttatatactcgatattagttttgctattaacatgggataaaaagaaaaatcatgcatgcttttcaaaaaaacacgtgatgaactaccggaaatttaataatcgatttgaaaatcatttgaagaaatttagttaattagtaaataaaattatcccattagttgttaaaaaataaataaataaaaatcccaatagtttagtttgataattaatgcttagctggtccattaattgatatctctcataagatattgggccatgattatattggaaccaactatatatatatttcgctaactagctgatcttggctagctagattcctatctagctaccaataatcttctttaattagatagaatagaacagctagccaattaattaattaatccatataatttagttagtttgcaagatgtaaaataattaaaaatggttataaactaaacacgatcttgtttagaaacaaattaaatgattcaatctgatatgttacatcatttgggtcatactgtgtccctcgtgacgttattagaatgaacagatcaatatatgtaacttgacaatattgctgttttgattttgaaatgaattagctatagggcatatatagtagtcatcattttgtgtttcaaaaaacagcaattataatggccatgttgctctactaaagaacaaagaatggagtggctggtagcggagacatgttaatgacaataataatgtggtatgtgagaatgatcagcatggatattaattggtcccctcggttgacactgatttctctacccaaacatctcaacctggcctcaaataaatgttaccaaagtttcatttgggatttttccttcttggtctgacaaattgattggagatatagaagaatctcttatcagtttattattatctcaataacatctgtttgtcttccatcactactaatttctttctattaataaactattcttattgtcattaaaaaagaaaaaaattatgctccaactttttgtctacctatttttaaaactaggccacaagaagcggaacaatggtaccagatgtcaaagagaatgggatggtctttattataagtctatgttagaatattttgaatttgtttgaaattgaatgaacatatgacaaattaataagctgatttttcctaaagtagtatagaatactgataatggaatcaaattcacatcttagaaagagaaagtatattctataacttttagttggaaatacctatgttattaatcaaatttgaattcagaatacaaataaagatgatttcaaaatataggttactaaatccatatttattaaagaatattgtccctcatgaatcgaattaaatgtaaaaatattaaattatatataagaatataaaaaatttcactcattatgctttatgccccatatttcttgacagtatttaaagaaaacacactcagttactacctctattaatttagaaaagcacaaaacatgatatgattccatatctttccaagctagcataataatatatctcatgacaaaatttattgaagacgtacaattttgataatttaagcaaagcgtgctcccataattaaatcacaaatatacacattatatatactttttaattcaatattttaacagactcagacagagactgtgtacatattatatatacgcaatattttaattcaatagtctatatcacataattaacacacgtttaataccgttttatcttatatacgtaatcagttaattacaagaagaagagacactatagacacatgcatagcatatatatttataatatattattatattatatacgcgcgtaattattttagaaaataaaataatcccacagtttagtgccggatttataacagctatacaatatattttaaaaaataattaattaattaaagttaaatatatgtatgtataagagtacagccaagccaaggaggagccgacaaatgaaatcgtacatacatacatacacattacacagagcaaatcttttatttttctatcttttgtttatcatcatatgaattaatcgagacgacctcctcagtttttgatacattgatttgatcattttcctgaaaaatataccatgtaatattattaatatgatctgaattaacgagtacaagacggtgttataattataggagtaactagtatatacctattgatcttttgcaatgaagaatagcttcatgaattgaggtgtcagaggttggaggtggagatgtttgatgaataaaattgctccacctcctaacttccagtattcttctatctacatcatcaaccttggagcccactactactaaacgacgtgtcgttggtctcagatattcatacacctttctcaaccacattatttgctctgtcgacgacgatgatgatgacttagacttattacttctccttcttcggaagaagcagcagcagtaataataagagcaacccatttgaacatcatcatcatcaatgttaatattaatattatactcactacttctcgaagaaacgacagtagctgaatctctgggagaagtattcgtagtattggatttgataaggccattagaaaagatttcatcggcatgaacaaattttggggatggggcaataatatttattggagaattgaaatcgaaactctcatcaaattcaaggctctttactatagaagggactattacgttagataaccaactatcggagaaactctcaacggctaaaggtcgagaatgagatgatgatgatgaggctgcagtttcttcttccatggatgatggatataactacaactactgctacacaactactgctacttttaagtttatatatatatatatatatgtgtgtcaagtacttgaaaaccttaaattatatatttatgtaaatgtaaatataattgatattgtagtgtgaaaaagggacacgtgattgggtgtgaagttagaagttagaagttaaagcagtaaagagtgggtgtcttcaagtgcctacattgtctattctttcacgttcattcagcagacaaatggaacaaaattagcagtcttgacagtacagcctttgtcttgtttcaagattttccttatctttaattacatattatcattacttcctcaaggttttattattattattatgtaacttatataatatatataggggtcttttcaatattatacctaaaattaattttatttataaaaatacctttaagaaaattatttgcacaaataccgattgccacgtcagcataaataccgaaatataaaataattaccgaaaattgaaaaaa

SEQ ID NO: 298113 - DNA, 17165 bp, Cannabis indica
ctgcaaatgatgctgtaaacattgacttttttgccagtgcagtttgcgaaatgtgctggtaaaattacttctaccaacgcaatagcgaactgtgctggcaaaagtgacatttcttgtagtagaaggactagctgtcctgaagactgtacccagagtgaacatgatagtcattcgggaactcccttctagattcgactatcattccacaagactcctttcaagatcggtaatcgtgagtgaatcagcttcccatgaaataactttaaaagactttttcatttggagtaactataccacacaggattatttgaaaatttgacaatggtctctagttttattattagatgatttctacattttattatgtatttattaattttgattattgtttggtattaatgtaagaaataatatcattttggactctgatttacaaaaattactaacgaaaccatttgttttggtcaatgacaaaataaactctatattttttaaaattgtaaaaataggagtctgaactcaattttaaaagaaattttttagtatataactaatgtgaaaataattcttaacacgaatagatagagcaaacataactaattttattataacacctttaaatcgagttattattaagttttattttgtctaacaattcagctggtactattaaatactattttaaaaatacagattagtaactttaacaaaatataacaaaacacaacgtttaaaatcgtatttactcattcttaaaatataattatttaatggaaggtttttatagctataccatgcatgccttaaccaagacataaacatataggattaaatataaatgagagaatacttaaagaatcaaccttatatgtttgaacatatactaatataaagatatatttatatatatccatatgcccaatataataatataattaacaaaaagtgaattttaattagggatatgtttaatttgcagttattcattaggctggagaatgaattacagcatatacgtacctaatgatcattttactaaggcaagactaaataatgttgaattatgtgtatatattgttaaattctttaacattcatagcatcatatttaaagtcaaactacattaatataataatatgtacgtttcataaataatataatcatcaaaaactttatttcttatattatatttatttaatttaatttatatataatatataatagtatattctctgtttctcaaattcgcagtgatcagaatacacattagaaatttttccatatgtttttttccacaaacttttttgcatatacaaacaattttttaacaattagcatataaatgataaataattaaaataaaataaagagagtgaattaataaagattactagggtactgatttggcctgttgttggtcgtcatgatgcagttgctgcagggtctcgtcggccctcctcctctcggcggagcaacgacccataaacaccgccactgccaccaccaccactaccaccgctcccactaccactaataatgatcttattgtgtttgccattatatctcatctcatcatcaaaacctcaaactaaggcagtttatatgaatgaataataagagtaataaagagggagctagggagacagagacacagcttctttttcttttctttttaagtgccacgtgggttacatgaggcttacgtggcagtcattaagagtgtgggaggagggggcaaacgaggccttggctccacgtgttagggggcttaacatgcagtagtattgcacatttcaattactccttaaaagcaccgaacaagggagtggccccctcactctcactactgctgcgtcttatctctaagataaatgctaaaaggcatagtgctagcacctatggataactcctattgaaaatgccttaagtgcaccacttagagctatagcgcctattacataaaaattcatacaaattattatgttaaaatgtaattttgcggcataaatacttaagtttaattttcggttgcaaattatatctaagtttaattttttatagtaataatactgaagttatatttttagaactttcataattatatttaagttatgattaaatatgcaataaaatatttatttattcttatttgtttaataaataaattaaaaaactatttaaatttttaaaaaaaaaaaagagtaaaataatcaatttatatctaaataagatctttgtataaattaaacataatttatatataaaatatatgttacatgtaaattaatgaaaattcttttttctccctcatcaaacatggcaatctaaaagaaagttggtaactaactaccaacctaacctccacaattttcctctaattttgacaattatttgacaacaaaaaaagagaaacattacaaatgagagtgatttcaaattaactttattagtaaaagaagaaaaattatttgtgaaaatgaagacattacatagtacaatgtaatgaattgttacacgtatcttttgactctccaaaaggatacctttcccaccaaaaaaaaaaaaagaaagaaaaattgcttcatcaaatgaagaataatacatatgacaaagtttccaaatcgaatcaattgtataaaacataaaagaaaaaactaacaaaaattctccataatgaatatgaatttatagctacacaagctgaccaccttcagctgctagtttaattcgctgttgatgctctgcaaccttataatccacaatttccttgaacaactcggaatccaaagcacaatccggtcggccataaacggctgcttggatgccagccacgagttttgctatctcacggccagaaaacccttctgttttcttggcagcctcttggatcacatcatcagaaagatcctttacagttatgctctgtggctttttcttgaacaaatgtcctaatttagttgaatcttcaacttcaccttcaccataaatgtactttttcaaatatagctttagtagtttaaagcgttcctcttccccgggaagtgggaactctattacctcgtcgatacgatcagtgatggcactgtcaagatcacctggcctgtttgtggcaaggactaaaactatgtccctcgattgatctccagttcggaagagcaatgcatttaaagcactgcgctgagcttcactcatatgtgtactattacgtctgcaaacaaaaaacaagttgtgtattagagtataagccgacgataagaaaagaaatttcaaagcttttttcttattattattataaatagatgccaatcaaactttttaacaaggacatgttcatacgatgtgccttcactatatgaaaagagaaatggtcccatttaaatggaaaccaccctttactgaagcttattataatcagtgatccacggaaactaacttctattctttcacaaagatagctttagccccaacaaatcaaacaccagcaatacattctctgaaattcactattttctgtccaggtacagttcaatctatatatcagaaaaaaagaagagaaggtacttactcgcataagaaagcatctgcttcatcaataaaaagtagtaaacctttcttggatttttttgcccaatcaaatatttgatggatttttgtaacagcctgaggacccaacggtgcaacatcacctccagtcatcatagcataatccagaccctgcacaagaaaaccgagaaacattaaaactagtaactttacagttctggctaccgagtccagctaccccacttttcaactatgcaactgatacccttatcccatgtaaagcacaaaatccaatcatgaattccatacatgttgaaaatttccagcaaggtaataaactgaacaaagtgcaagcctgcaaacaaatatatacatgaagccatgagatggaaaaaataccgattttcgagcaatctcccttgcgaccatggtttttccagtgccaggaggcccataaaaaagcatgttcctaaagggtgcctgatgtgctttggtatttgatgtagcttttgcaaggtgttctattctcctctgtaatgaaggatggagtacaacatttccaagactccttttatttttcaaagtttcggatgttgcagttgcagttgcagttgcagttgcagctgctgtactataatttaagactttactttttgctttagaaaatagctctgaccctgggaatcttgacatggatgattctcgaatcagtgatggttgtcctagtatacgattaacatagccccatacaactctagaaccttctctgaaaaaacagcaagggaaatcagaaggtaattagatgggatatccaatcaataacacaattatggacataaaccaatttgaatttgatataatttgaagtgttacgtttaatattcaggatttgaattttaattatgtggtgtttcgtgtttactagagggacagtaaatttggttgcaatacagtcagctaccctcatcatgaattaccagctccaatggtttattgagtttataaaactaaagatttagttgaagtcaggcaaaaggattgtgtacaaacctagtggtataaactcctgccgctaatgctgtaactccacctacagtcataaccaactttgtcctatcattcaataaacttcttacacctcctgcagattgtaatagaaaaaggattacatcacagaaatgttcaaatattatttaaatgaaaacattaaaaatcagttaataaaagaactttttgcatcaaaattaaagcattcagaataaagaacactatctctaaacatgtttctctgattgtataccttctatatgcccaaaagttgtatttatagcagcaagccatttttctttttcaccggtaattctttctataagcattctccgattgtgatcttcagtcaattttgcttcataggctcgaccttcagcctctgccatcgccttaactcttatggtttcccgttcaatttcagctctctctttctctgtctggcgctgttgcgcttgaatttgctcctctgtagctctacgagcctgttctttacgtgttgacgattgctcttgcagattaaccaactcaacattatgttgcctctgggcttcattgtctgtctgcaaacaagaaaaacaaatataattaagtgatttctatttttatcattttaatgtgctgaaaaggatacccattaatttctactgcactttatataactgtatgcacatagcctatgcatagatgaggaatgaagacctaatagacaagaaagagtaatgacaaagcaatttcagcctcattaatactttggcgttcaacttaagaaaatactattagatccaataataatatgtaaaaaagagaatggtgaaggataggattaaggtacgtttcacgataatgaattcaacaaacttatggatgtgcgcctttatggaaacatgaaagtgtattcttgaaaatttaaagttcaacacaaattctttaaggaaacacaatactgatatcactacgcacctgcattctttttctagctaactcatcttcatatcgtagcatttgtgcttttgcatgtgcttgctgctgtactatattcctttgttcttcagccagttttctctgtctttcctgtaaaaaaaaaaaaagatgaatacgatataagttgaggtgcatatataagaagcgaatgggaaaaaaaaaaatgacactaccaaacttcaaattataaataatcaaactctcagaagcatgaacttcagtgaacatactcattacaactaaggtacataagttataacaatgaacaaaaatgtacatgcaataagaagccttaaagtaaagttataaatggtatctcacaatatcattttgagcttgaattgcctcatgatgagccttctcagcagccaactcggttaggcgggtttgttcctgttttctcatgagatcaaagacctgcaaaacacaaaccacccacatggccaatttatttagttgaccttaatagataaagaaatctcatctcagttcatctgtcccaaaaaccaaaatgctaactttaatttccataaacttcattacctataaactaagccagatgatttaaaaatttatttgcttttttttctttttctaaaaccatctactaactaaagagcacaaataccattaggttttcgtaaaagggtgatcatttcattttcagcataacaaaaagatacaagaagaactgatattcctcttcggcaataaaatgaccccaaagctaaatttcaccatttccagcaactttcccagcataaaaaaatgaattgaaattgaatataaaaaaccaacaaaattgagaacctgtttagcgttgggagagctattaatttcgcgaagagctttggcacctctctccaacgattcagggtcgaacccggaccctttggactcttcagctttcgctccatcagaatccgatttggaattttccgttttgtccgacgaagaagacgaagaaaagaaagggaagcgaaatgaggaatcggcgtacgcggagtcggagagagtggataacgatgccgccgcggccgccattgctacacacgaggaaatttttgagacagccattgtaaaatcttcgaattgtgattgacttttcttgagttctaacagaaatatggcaatggtgtcattgttcagatgcttgagaactagaaaggtttaagctttaaggcttggcgcgacaatgaacgataaaccctaaacccctaaattgtagggtttaaaggaaatgtgtattttttctcttctttttgggcaattttattttctctacaaccgtttaatttttcattttaacgacaagtcgtttatacagtgaaattattttttaaataataatgataatatgaagaaattgggtaaatacaattttggacactgtattttgcaaaagtaaccaattagaccctctgttttgttaaatgacaaaatgaaccttatatttctaaaatagtacaaataggaccctaatttttttttagaaaatttacactaaatactaacagttatttaaatttatacacagtaacataatatttatttaagtgactcgggcgacacatttcataacctgaacagacaattctgctcttagtggatcgtacaggaagaaatgactctcaaagtcacagatagaaattgtgacatctgagcatagtatacatagacagctgaccagcttccatcaaacaggtggctcgtatgcactgaccaaaaaatgcgagttggcaattttagaaatatatcttgtatgtctttaaagcttgcgagtcacgacacaatccttaaattcgtgggacagattcatatcattagagaagaaaataaactattttccaaatgtatttctcattgattttggaaaattaaattgatgtaattaatctctataaatagtggattcatctcactatttaaggacatgaaattcattcagagagaacactcaagagaaaaattctgattcaagagtgaaacatttagagatcattgtaagagctttcgagtgagatcaaaacattcttgttcattcttctcataagtcaatacaaatacaggtgagtaggctattaccgtcaataagaaatcgaacctttataaattatggtattttctttaccttacattatttacattttgttattcaattatcctcaatctctttaatttgactcactgtcgttggctaaaagcgaggtcaatattttagtactttcattgagaacaaagacacacaagtttttatttaaagtctttttcaggacacacaatggttgaagaaaaacggaggggaaatcacactgatacaactgatccaatggccacaaatccaaatgtgcagacacctgcaaaccatagagatctagccaggacagaccctgctctgactaatcctcaaccaccaacaggcccacaaactgtaggtcaaaaagtgactactcctctggctaggttcactctgggtgtgcaagagactgggactaccagtattcaaactgagcaaaccaatccttgtactgaaatcccatctgctgcaaacttttaaaggccaatcagtgatgacactgaactacagaacttgcgagctgtactagggaaaatacaaggctataataatactcttcatcatgatcaacaagatattggagcaactataaattttgcatttgccaaaaaaagacgctagtttaaagaatggcaggattgagagatgaaaattatgagagcccagcaagcagcaatcgaaaaccattctaggtaggtcgccatattgattaggaaagcctatcaagtcaccaaccagtagctagtagcagatgcttacattcctcttaggccacaacacgagccagaacaacatccaactgaacaccctcagtaaactcaagttaataaaccatccaatccaaggccacagagtcaaattgtgggccaaatggtggacgagcaagttttgtcaacctgttacttgagagagaatgatcagccttatactcgtcctcagacagaggtactgaaccaaccccttgttcataatggtcaaacaagaaggcctctaggaaaattagtctttactcgattgggtaccgtgcacgacctcaagaatgatttaaatcacagaaggggattagacaaacatgatatccctcctactgtataactagataataaaaattactctgtacccgtcccagttctaagagatcctaatgtgtcacatgttggtcaacatgtaggtcaagttgatccattagtgcaagcacaaatagatcaacttaagagccacgttcaaggcctaactggcccaaaactcacagatttaaaacttgatcggactagaggatcaccatttcaccagaaatcaacactatcgacctaccgcccacgttcaaaataccaacatgaaaaatgtatacgtgcaaagaagatcctttatcttatattaaatattttaaaatgcaaatagacttacaagcggtgagaggtgatgtacggtgtagaatcttcccaactactttgtagaggttgcccagcagtggtacttcaggttagctccaaggatgtttagtccgtagaattctttcatgtcagaatttcatgcacaattctcttcttctcgacaactctcattttacttagaagacctagtcaaagtaatacaaatactagaggaacccttgagagcttacatcagtagatttatgactgaagcaacaaaagtgaaaagatttattgaagaaggtaggcttgctgcaatcctaggaggtattgaacctctaagagaattgtggaaagacataaaaagacttactgtagggtcaataacagtattcttagactgagcagaaaattttataaagcttgaagaagttgtttagtgtgtggacacaattggacaaaagaaaaataacagcacaccactgcaaccaatacattcgtctagccagactagaattcccaaaaatcacagcaactcgagccaaggtggtaaaagatcaaataatggcaatagacagagtaatagaaataaaagtaggttcagtgacaactctgaacagcatccttagaagaatgcctcaaagctcactgctttcactatcctaatcgaggatatagaaacaatcttcacaactgcccaatccatagtgccatataaaaaatctcctcccataaagaaagacatgagcaaaagggataccaccaagttttgtcgctttcatggaaactatgttcatgacaatcatgaatgcaataatttgaagcaggaaaaaaattcctcattaggaaacccgcacctgcagaaatatgtcaagacctactaaaaacaaagggctgccaaatcagataacactcaaaattagtcgatgcctccactagtggacgaacatctttaggttatcattgaaggcccccaccttgctggagactcgggcaaagctagagaaaaatatgttggcgccttacaatatgaacagacaaatgcagttctagccgtagaagaattccatgttggagaaccaatcatatctttcatcgaagcatattctgactacattatttatccccacaatgaccatttggttgttgttattcagattgtaaataaaatggtgtctcggaccatggatgataatggagcttcctcaaatattttgttcaaaacaacatatgaaaagatggggtttcgactaaatgatatggttccttgcacttagttagtatatggattctttggccaaagtgtttctatacttagacaaaaccatttaccacttacattgtgataaactctaacaagcacaacgatgatggctcaattcttaatgatcgatgtaccttctgtcttcaatattatgttaggtcgaccaactttatatgacctaaaggttgtcacttcagtatttcacctatgtgtaaaatttccaacaagaaatggagtgggttgtctgaaagtaaaccaaaaaactacgcgagaatgttataacctcgctctatctaagaccaaaaaaaggaggacaactccggccagagttcagagtaaggtaaaagcattgcctaataagaatttgcccaaggcagggatgaaatgtgaacccccaccttggggaacctaacacaaatgttaggctggtagaagagctagaagaagttgaaattgatcccaccatgtcgaccaggaagcttaaaattggcataagtttactgtttgaaataaaattagctttaataaaatttctaagagtaaacctcaacatttttgcctagtcacatgatgacttggttgggatcgatccttctgtaatgtcttatgccctcaacattgatccaaactttcttcccgccagtaaaagaggagattgttagacaaagaacgtgcacaatcactaaaagaagaggtagacaggctccgcataaacagattcataattgaagccttctacccaacctgggtagataaccccatattagtaaccaagtcgaataaaaaaatgatagagtatgcatcgatttcactgtcatcaacaaggcatgccctaaaaagtgttttctactaccaagaatcgatcaactaatggatacaacaaccgccaatgaaatcctaagctttatgaaatgagatattttagcgttgttgggatgttatttcgacaaaaatccaatatctcgcaataaggatcttatatctggtcataatacaaggatcttttagttggtcataatataaggatcttgtagttagtcgtaatacaaggatcttgtagttggttgtaatacaaggatcttgtagctagtcgtaatataagaatcttgtagctggtcatagtacaaggatactgtgcctagtcaaaaatacaaggatcttgtatctgcttgtaatgcacacttagatatgcatctgctcgtattacacattctgcttgcacctactcgtattacacactcagctatatgcatatgctcgtattgcacactcaactctgcatctttgtattatacactctgatatgcatctactcatagtacacacccacatgcatttgttcgcaaacaatatggtttggccaagtcaaagatcaattctttgtattttaaatatataataattatttattcttatctaaatatttaattgtacgctaaacgtggacattaacctactacttgtaactttccactaagataagattgagtaaccatgcatcatcatattcctataaataaggattcactcaaataatggaatgaggcaagtataataagtcagctttatgcaaaacataaaaaaatgacttaaagggcaattattatgcctaatttttgaactatttaattaacaaatcacattgtaagtcacaatgcataaatataacaattcttgcaataaatacattgtgagtcaagtcgaataaactcaagactcaacttgtgatgcaacctcgtctaaataagaatcacaagatttatgaattgaggtatttttcgggatgttattttgacaaacattcaatacctcgcaacaagaatcttgtagctcgtcgtaatacaaggatcttgtagctggtcgtaatacaagtatattgtacctagtcaaaatcacaaagtttatgaattgaggtatttcagcgttgtcgggatgttattttgacaaacattcaacatctcgcaacaaggatcttgtacatggtcgtaatacaatcttgtacctggtcgtaatacaaggatcttgtacctggtcttaatacaaggatcttgtagctagttgtaatataaggatcttgtagctggtcgtaatacaaggatcttgtagctggtcataatacaaggatcttgtagttggtcataatacaaggatgttgtacctagtcaaaatataaggatttcgtatctggtcgcaatacacagttatgcatctgctcgtattacacattccactatgaatttgcttgtattacacactcatatatgcatttgctcgtattacacacccatttatgcatcttcttgtattacacactccgctatgtatctgctcgtagtacacatctcagtgatctcaccatgcatctgcttttaaacaatacggtttgaccaagtcaaagactatttctttgtattttaaatatacaagttatttattcttactcaaatattttattgtacattaaatgtggacattaattacccgtacttataagttataatttttataggattgagtaatcattattctattcttataaatagggttcactcaaaaggtgagaagaggcaaggcaactctgatttatagaaattttgtcaattataaacatataattaaaactcagaaacaatgttaattggtatgctatacgtaaatttaactacataaaaatattttatgttcatcaaatattttttcattattttttattaaatataatctattctgtaattaattaacttcttaaattaagttaacgaaaaatcgcttacattgtatttgttattattacaaactataaagtacatagaatttcatttatttatttttgtttgtgtggttattattcattagagaattgaaaggtttatcattttgtggctttgactaagaaaagtggatgtatatatagaaagggccggacatgagagcatgcattataggtatataatacaatcatttttttggggggacacatgattttataataataacatatatattaatttataaaatactaattaaacagttcatacattgaatgacgaccctttgattttcatagttaaacagtaagattagactagacaattaacaacatcaatatatatatatatatttaggaataatacaataaaaacgaaaacgaaaaaagacaaaaaaaaaaaaggaaaaaggaacatgcatgatcgagagaatcttagttgagtgaagaccaaactaattttatcttcattcactttcctacacacccaactttttctacagctttcttcacttcgttgccatcaaacataactatatataaatatatatagatatatatagatacgtacttgaagatgatcagaactacctgaaaaagaaaaaataaaagagaactgtgtattaataaattatcatatatatacagatatattcacgtgtggtatttattactagtaataatgcaactaaaaggtttttgcatgctttttattatatatcatatgtataggattagatctgatatatatatggggcttagtttgtttgggtaagggacaggataagaagagtgaacatagtgtggtcaggcaacaccttttggctttttgcattaaatgtatatatataagtagaatgttggcctataggcccctaatgataaggagaagagagaaactaattaataataataataataatatgttggagtagttggaccacatgattttaaataagtacttacttgtatagtatttgtgggtaattagtagttttattttgaagaagacctgtaattagggaatgggattttgccagattcaatgtgcttaatatcttcttcaaggatttcatagtggcgtttaacttcttcaggagatttattaccaccaacggctcgagccaccttcagccaccggtcaggtgtgtccttgtcgtacaaagctaacgccctttcgaattgcttgttttgcatagctgtccatgatgaactacttgagctacgaagtgagtttgaagccataatattataatgcaacactacacacacacacacaaagaaaaaaaaagggggtggtgttttttctttcttttctttttaatttgtagctggtcaagtagtgtgtaaaagtaagtaaattaatggatgatgggttgagagaaaaagatgaggatttgagctccttataagcaggaagaaaggggagtagtgtagttgtagtactaaaagggtgtgtgtagtgtgtgtggtggggttaagccagttggaggaaggaatatatatatcttctaaaagggtagaatatattatatataagtgacccgtctccttaagaaccacaagagagcacgacaaacaaatttttccatggtagaaaaaaaaaaaagaaaggaaaagaaaagaatgaagaatcaggatcaatttcgaagacaaaaataccaaatggtatgtaccaaatggtatgtgacaatactttattatttactgtaatttttttttttttctgatttaagcgtttatatattacatcagcataatttgggactcgaacccaagacctccaacacatacgcaccccttatggccacttgagctagcctcgagtggttattatttactgtaattaaatatgcgtgaatatcgatattaaatcatatgttacttcttgtgtgctctgtggtattggggaaagtgttgggatgtaaaatttaaaaggaataactctttggttggtgtaattttttttttatgtaataataatatagtggatctcacattttttttttttactttgggaagaggggaatttaaacttggaatttttctttgttgagaatactacaaaaccacaaacttttagtgagtaaatatgagtacttttcaaaacttgagttttatatagagaaatgctaaagggcaccagtaatgtctagcagtctcctatgtgttaatatcgatattggtccaacaaagtatcgggtcccatataatttaatataataacttttaaggagtatcggtagccaatcacaacgcgacatgtcgagaaggtgttagacactactggtacctaataacaatgctcttttatatatatgtcccctaagtgattttcttgcttatacatttctatgcaaatcaaaacttataacaatctacagttttaaaccaaaaaaaaatactaactacaatgagatgcatgcagtcttcatcctttcgttcattattggtgttatatttttaatttaacaattattataaaaaaaattactatttttacgatgtcacttcacagtggtgctggtttttttgctacttgtgccaaattggaatgctcaatttcaaacaacacccaggagctttaatttctttgattaataatttgttcttctaattataaaaagatgaatattatcatttactcataaatactactgtattttttttttcaagagagagaaggtagctaggggatgattctgaattctgatgataattaataaaatctcatgaacactcaaatcaatattggagtaaataatacatgggaatttgttctattagtatcttcatcatgttccatcgactaaactggattcctttcttttattgattattgatcagacttaatttattatcaagaatcagtagcagccaagccaactagagctaattaattcatcatttattatttatgctcatcatcataaatcataatattaattaaataatatatataaaccaaaattaatatatactttttttttcttatatatagatttactgacgtttgcatatcaaggccttttcttaatggtagcttaagcatcatcagtattcaataatgcttaatgttttgttctaaattaaagtacaatatatagtttgatttatatatggatatatatgctgcatatatatggtgtttttttttaccatatgctacttttaattacagaattagtactctaataaaacttaattacgtctattcctaataaaaatatagtaattaattataatttgagtagtaatatataggtagttaggagttttggaataataatgataatattattgaaagggtattatgattatgatctgagtttcttatcaatgattctatttctagctctttaactttattgtgtgggggacacagccgtactctccctattgctgtctaaatcttgattttgacatttcattgtgtctaattactatcaaattaattaagtagtactactaattaattgttaaactttggcagttataaattataattacagacagactcaattaaagtaaccctatgtttgatttagtagtaaaatggaagaaaataaaatttattaaagtggagagaagataataatgagtgtgtttggtaagataaaaaataagaataggacccaccaaaatgtatccatttagagaaaataaaaagagacaaaaatatttaagtaaaatttactaaattattcaaactaataattattaaaattaaaattatataaacaaaatagtaattttcaaatggaaaattttctttcttttttgtaaaaaaaaaaataataataataacctctatttttgtttaccaaacaatataaaagaattttttttttctttccttccaaaatttttcatccctctacctctcatatcttcttaccaaacataatgcttccatatttgagtctatgtaataatattaggtgcggtttggtaacaattttattttataagttttttaatcataaaatgaaagtaaaattttgaaaaataaaaatgtcttttgtattcacttttatttttcaatattaaaaacagaaaacaaaaatatgttttgtaaagttcattttttttattttatttaagtcgagt

SEQ ID NO: 298114 - DNA, 1851 bp, Cannabis indica
ttactttcatgtaattttcttatatttttagagaatatcgtaaatatatatataataaatgtaaaagtgaaaaaaatttaaaaaaattactattttatgtaattatctatataatcaatctatcaaagcttgattgtcaaagtccaaaactaaacaaaaaacacataacaaatcaattagattgtctagcaaagtctaaaaccaaactcttagtgcaaaagaggatgaagatgtcggagtagtactagagtgtgtgacagagacggaggttgagcccagtaagctagtaggagtagcagctactgcaccacctctacaacatgtccattaaaaattaaaatattagtgtaaaaatgattgtaaattgaattattattggaaaactaaacaaaaatatattaaaatatcattctacaagacatctattggctatagtttggcctcatttagtcatttgtttcatcatagtactcatggggtataattactagggatgcacacggagcgagaaattagcagggagtgcttcccctgtttctattcccgttaagaattttaatccccatccccgcttattttccattggggatagggcgggaaatctcctaatgggggtggtgaatcccctaataaaaaaaataaagtttacactaaaaatttaaatatataaaaatattaaattacataaaaattaaaatattacacattaaataaactaattattatccaaaacataacttaaaattcataaaaataatactatgctaaagaaatgcaaatatacattattaattacaaaatattattaaaaatataaataaaatactaaacgggtccccgtcgggacagagagtgtgatccctgtccgcaccccatttaacattcggggacaaaaagtaatcctagtaatttcactgtgtaattacctaaaatttttaattttaaatataaactactaaaaaatattattttcatatgtaattacttactgttttgtcaaataaaatattaagaattcatatgtaattaccatttcatatctaaacacattttgtattttaaaatataacataattactaattatacaattactctttcatacatatagatatttacagtaataatactgtaaatattcatatattataattaagaaaaaatggagagaaatttatgattatccactaaattcaagacattattttgtagatagatagggcaaatgaaaacaaacaaaaaaagaaaaaacagtacaacaaacaatgactcaacataaaagcttagcttgcacaaacttgtaaaggtgaacccttttccttttctctactttaaagataagcttcaactttgttctaaagaatttgatttactttctttcatcaaaacaatctaataagcttgaacattgaacattgtcatcttgactagtctcacatgcataatagatacaaacaatacaacaataatacttaacatgagaatagatatataggtgatatgactaaagaagaaagatttgaattattttcatatgatcatcacatgagggagacatatatatagatatatatataactttcacagttttgtaaaataatactagaattttacaacaaacttgacatacactagtagaaacgtaacaagttaacctaaagaaagccaaaaataatgtaaatacgtaaacaactaacaaactactgcagcaaaaaactaatacaaaatgagtaatagtgatgtactatcttttttacatttacccatttcaagtttttctactagtcaacaatgaacgtttcacttagtacacacgtcatcaccgtttttcgtttgactctaatactatcact

SEQ ID NO: 298115 - DNA, 2787 bp, Cannabis indica
atagtctgaggtggcacctttctgtgattgccacgtatcatgcatccaagattacgaataacatttagccccaagctcccaggacttgtgagtgttgggagattgtagcttacttccagatgcttaacttaatatcttgatttttcagatgtgttgggatttggaagaagtcttcagtattacctcatgtaattgaggggttggtatgcttgtcgttttgctaaaacatgatgcttgtttagtggagctatggatcttaggctttgagcttaagcgtgtttctcgtgggaagggaatgacagctggacttcaaaagatacaaggtttatggcatggttgctgatgctaccacaaaatgatgagtaacgaatgccttattgtctatctttagatgcattaaatttaaaacccttcaagtctccagccgtcgaatgaagcatcttttttcatcgatgtaattggatttgtctatttcaaaatgctctgaactgttgccactcatataaatggggaactcagtaaatgtgctcacttttcttcctctccttaagcaacgatcctttacccagagaacttctttagacgaaaccttcaacctacaaaaaaccttttccctcacatactcttctgaactagattcttcctctccttctccaaagaaaccgatattttctagcacacagtacaagtccagatgtgcttgttttttctaggagcacagcgtgaccagatcattacgcaacctgtggaactttgaacgtcaactagcaactagcttttttcccttgaatctttctacaagtaagcatttatcccactcaaacggttatttcttgattcaattgtgaatgtagttttttgattgtatgaatttgttgttgtgcatgcataggattgaggttaaataattagggttactatatgtgaaattggtttgcataaattttggggtaaatatctctagagctagggctttgctaaggtattctcccttcaggttgagtagagaagaatgtgtgttatttgaaatattcttgttcgggtgtttaggtcgaacatttctgggttgaaactagcttttgggacaatttccctctgcctctctacatatatattttatgttaatttttttaaagggaatgtttggacttctttgccactgtcgtgtttttcgattctcgattcatcagcataataggtttcttcgtgaagatgacctcatagatgatgagtccggaggggacctctccaagaagtatttgggggaggccttgcccgataccctatttgtcatttggatatgggatattgactgcttgggttttctttccatttttacagtgtctagtgaagataatgacttccagttggcactcgtgaatctcgaagaggttcctagagtgtcttctatggatgcatccaatgtcctttttgatcctatagacccagctgcagaagaggggccttctaaaattttctggatcagacagggatgaaaagacaagggaaaaggaaaagcccaggccatgtttttgtcacctcttgtactgaacaattatattttggaaataaattagagcgaaaatgcgctaggaattatggcctgctagaggcgtattccactaatggttttgtatggaacattccaagactcatgtggcaccagatggctgttcttgggaaaatgccatcccaaagtgtagaaggcttcagagcttagagctaggctcacttctcatgcgggactcaccttccactcacgacctacttcgcccaattttttaccaaagtcagaatttctcaattccatctccttcaattttcgtatagaatgctctccgagttttttgtattatgtaaatgttggggccaggccgcccgaacccaaaagaaatattatacttctatgagatgaagtcgcagcccatgcgagggtatcttacaaaaattggattttattaccttcagtagtagaagcgcacttgatgtccaacaaatacctcctcccactacccataccatcttgagtactggttctttacgataggcttccccatgaagcgagttccaactctttctctagaagaatttgtcttgacaactgtgctaacagataaattgaggtaatgataactttatacgaagattttttagaggaggaactaaaagtggagaacttagtgaatactgagttgttgcactactatggcttcatagccaatttccaaagcattcacgacgtcagtggcagagttcaaccttagattcccaatgatcttaaggagcaggctcctttggaattgtctattatgataactaaggcatccgaggatgaggagcttctctctttagaatgggctagtcatcatccagatcccctccctgaggaggaggagatttaatctagattttttgcaccatatctcgatgcaagcactttcgaaacaagcacttcaggaagaggtaaaattccctttcgcgtaattcatacccctagcctattgtgaatgtcacggatagaccaaggggcatttgacaattatttcttgagtttggatccgcgtaggtatcaactgaaggattatctcaatagagtagatgactagttaggcacctaaataactaagaattcttctcgaatgtcactaaagtgggtcctttacttactatgttcttattgggctttagggaacataacaacttcattatccgggaagaagtagctttatatgcaagatgggaaccttataattactcattccacggttgcatttgttggaaattatt

SEQ ID NO: 298116 - DNA, 1919 bp, Cannabis indica
tgaagtgttttattgtttgaaggtttatttgactatacgccggttgtactgactgtacatcccgaagcacaagtggtaggaatccattcaagtattttcttatgtggtcttctcaccctcagtattcagatctagtgagagtgacttagcagaaaacaatgactagaacaaaaatgtttcaagttgtgttgaagttgaaagcacttaagggtgtactcaaagagctaaataagcagggtttctccaacattcaagtagctgaggctcaagcaaaggcttctctaattaagtgtcaagagaatcttcaaatagatccaattaataatgaattgcacaacaaagaacttgttgcgagaactaaatatgcagaattgcacaaagctctgaaattttttctccaacaaatagccaagcttaattaggtgaagggtggagacgaaaacacaataatttttcacagcagtatccaagctagacaaaggcaaaatagaattctctccattgaaaacagaatgggattagagtggatgatccagctcaggtacaacaaacattcttttctttttatcaaagtttgcttggtgataaattggtctataggaaaactgttttaaaaggtgtaattcaacaaggtccttttgtaactccaattcaagcagagatgttattgggagatttcacaaaggaagaagtgaggaaagtttttttcgaatacctagagacaaggccccaggtgctgacggattctcaagctattttttttcaagataattgggagcatattgggcaacatatctttgaagctatcaactcttttctccaaacaggtcaccttcctaaggagataaacactattattttgacacttattcctaaaattacgtgtccaaacacatttaggatagagataggggagaaagaacactgtttggagtcctctgttggtgtcttctgctcctagccttccttctatgctaaaaattagcctccaagttggaatgatacagaacacctagctccaactcgttttatagacaaattttggaaggttcccctattttttgcaagagtcgcgacattggatagagagtcgcagttctctcatttttttttattttctactacgatgagcgatattattttgatcataactttctcgatataacacaaaattggacaattctagatgttttgaaaagaagaaaaagagatctagaactttcattcataaagtttttcctagaagtgaatggattatagtcaaaaatcaactttaagcttaagatattatattcgattacaaacaaagcttgttgaaatccaaaacttagaatttttcacctattttatcttaaaactctaaaattcatgctaaatccattaaatttgtattatttaacatattttctctcatttaaatccacataatatatttgaccattaaaatttgaaataagaagaaaacaattgtaaacttgaataaaaaaacaaataaaaaatactaaaacacataataaaatggacttagaaatgcattaaaataaatctaagaaatttctttaaacttaacctttgctcgcccttgagtaaagactaaaacaaaaaagaaaataagaacgaacacactaagtaagccaccattgctaatttgctatctatactacattgcatttcctctaaaatctcaattgctattttgaatcaaaatttttgctcgactgcctaaatgttcaatatggggaaataaataatatgactcacaaatgacccaaatatttggactttaccatatatcctcaactcaaaccaacaagtcgtacttccatttagaacgttgtttattcatctgttaagcctagtaaataggtgtatgggtgctacatacaagttggtaatatatgttttatgcatttcttact

SEQ ID NO: 298117 - DNA, 2345 bp, Cannabis indica
gggtgcatcgtagaatcaccctaaattatttaaattttatttttgatactgtaagtatttaaaaattaataaatagtcaacaataaatatatcgtacacaattataaaaattaaatagactataaaaatttctgtgagtctgaaatacataaagaatgtatcaaaaatacatttaatatttttaacatatgaatttgaatactgagtaacacaattattgagttctatattggggggcttggtggttatagtttggattttggttcctataagatttgatggcttatgttctctattttatttcctataattttcagttttagttcccttaatttgttttctagagttaacagttgttaaagtgagagatgataactcttttgcactttttagatttaacgcttcaatgatggtgtcatgtcatatattctctcatcgacgtggttagctccgaactaagatagttagactcatgtctcatgcccctaaacccgggagtgagtccaaaattttgatgaaaatataataaaatataaattaatacttaatctatctatacaggcattaattgattgccaaagaaactactgtgaaaggaatttagatgaggattcaagtataacaagaacacttactacccgttatgcgagtattcacctagaatagcgaatactcaaaatataagctatgaaatagacaaaaataaaaaataaaaatataaagaatactagagaattatagtggttcagtcagaacttggtctgtttagtccactttttgcaatagcttcatcttagtttatttgatttggatcacccctttatatagaaagcatgtgccttttaggattacataaccggtcagacaagaccgttattacaataaattacaaaattaaattaaaataaacatttaaagaataaatgaagaacaattttgtctgttcttgacttaattgcagcaatgtatgcaacttaagaagtcgtaacttgtccattcatattccaaacacgcgagctcatgagctctacggtgttatattcgcaggatggcctttgagcctatttagttgaatgtctgcggtcctttgatcgcgtattcagacattatatgcattgataacttagaatatgcgagttctcagtgagttgccgaacacaattagtcattcgaaccaaacctatgtaaagaagcagtctttacttgtcgcatgagagatatacttggtcattgcgtaaaactagtatatgcgtgactagtattaacttctcttggtcctgcttatcttttgattatgctggacatagtgtgcgactagaccctttctcagtcgcaccttctcgcaagttcgtatcatgcgagattagctgactcatttttccttggtcacactggttgatgcgtttacacttcttctttctacaattaatagcacattctacggttaacattactttgtggttaatagcacaagggtggaggcgagcatacacttgcgacaaatcatcttttcctgtgataattagatccacgtgtcaactgtttgtcatgtagaaaaactattcatgagggacatgtgacttcgaatcctgtagtgaagagagtacttcccatataattcaagtcaatactcaattatagtatggaagattgtaaataattttatcatctaagaagatccaagttcagatcttagtaatattctgcgacaaaaagaaataatggttataaatctgaacagaatgaactattatatttatgccaccaatctaaggttttctacaactttatatgtatttattttattgttttaagaaattcatatttagaatgttagattagtcttataatctacatgcatgttattaaatctagatcctaataaaataagttctaaccgtttttaccaaattgtaggcatcctagagagaaaatcattgttaatgtatgtattaagttttaaaggattattgcacaattttataggaagaagaagcttatatctgcaaattgttgcgatcaattttactttcatgttttgatgtgtttgtgtgttagctgattccgatttatccattaattttgttgtgtgaataatttaagcaaaaatgttagaacatgaggcaatgttgagaagaccatgatactcttggcaacctttcaatctcaataaaaaagaatgctagagatttataatgggaaatttgacattttatgctaaaaggttacacatggttttaaaatattccccctcactagacattttttaactatacttttaattcttttctaaccctaaaatacccttctatcaaaaccaaaaaacctcaccttcatttctctct

SEQ ID NO: 298118 - DNA, 1796 bp, Cannabis indica
gccttcagaggttctatgttcttgatactgcaagagaaaacacgaagagacctcgtcaagagggttatgatgttgagaaacaaagaggacttagaaaaatcggaggatcaatctgtcttagtgtcttactataagatctaccttcgaagtcgctcaatggcagagtggtttctcaaatcacaaacaaaggcatacctacaaaccaataattttgctaactcaaactcaagatgaaataaagaaaacagtaaagagaaaaaaacacatacagattgaatatgaacttaaattcaatgttaaataacaaagaactgaaagataaaaaaggtcaatgccattttagatcttgtgtttagcaaaaagttatcaaaattatcaatttgacctgagtatttcaatggcacataatggtaccatgatctcaaaatgtaacataataataatcttcattgaaaaaaacatagcaatactcttgattcaaaagtgttagacctagttacatttttcactttttcttttcttttttttgctagaaactatctgcaaattggtaacattttagttatattagaaaagaaaattgacttttgtggaatatcgctaacaaggggccacctctagttgctaggcaccagcaatgcttgaataaaaatcataatttgggtctgtcacacatgaataaagggcatccaatttccaatcccccattatttattcccttaagtagaaaacagagtgaaagtaagcaagaaagtaacagtaacaggtatagcatacacagtgtcagtaggaatgaccccaacagctcccccttttaaaagatcaacaactggttccagtttccagctatcagctcctgctggatcaacttcaacatacaccaattcatcttcctgaacaagttaatatatccaattatataagttacaatactttctctcccaaattccaattcaacaactatgagtcttatcacaaaagctagttaaaaacaatcaatgatcactgcaactttgtttctgagcatttcaaaatctgacattcaaaactttcgactgagctgaaaattaaaattggagcaaaatactaaattaacaatgggaggtggagagaaagagaaaggaccttggtaaaacgaggagttgcatatttgagacgcttagggcttctcttaacagaaaaggctaagactttgaggcgagggagtttcttggtgcagaaggaaagttgagattgagatgagttggagtaaagacggcgcgtggagagcgtagatagggaggagaatgataatgcttcagtgtgattgagaaagtgcaattgggtatccaacgacgccatctccttgttcttcttctctctcccagctgaagcttttggcgccagagctgagcaaagcacaggccacggactcaactcgactcggcttcatcactgcttaaagatgatgatgataatcatccacgtacaactccgcaagaatattccaggattttcttggtttgggaaaacgacgtcgttttgtggaagttggtggagaacggaagatggggttttgggtttgggccttaataatcgagcccgagttaatacagtctcagtccaccaatgtctgatttccccttcacttttgtaggttgctttttgttagtagtagtagtcaacatttaacgtttaaggtggtgtttggtaacacttttttaatcagttttctgtttttaaaaataaaaaagtaaaaatatttttcaaaaatatgttttataaaaatatttttacttttcaattttttaattgag

SEQ ID NO: 298119 - DNA, 3483 bp, Cannabis indica
ttttaatgctaataatttttatatatgattatatataaaatactattgaaaaattatataaacataattaaattataaaatatgcatatagtttagtaatgttttaatttttttaaaaaaaatattaaaaaatagagcacgaattcgagctgggatatgaaaatagattggcacaaatacaagctagcacaagcaacacacaatacaaatcttagcacaacacggtaatactaaacttacgagttgggtttactttcaaaatattgacactacacgacactccaacactaaaattgtaattggcaagtccaattgaaatcattgacaagtttcaaatctaatcagtaagaaatgaatatatacagcacaactcaaaatctgaaaaagagtactttcaaatccaatcggggtttctaattaattaagaagaaaaaaacataccccttcaatcttctttgctatctattctttatttatgcttttcctcttcggttttactcctatttcgttttgttagcatcgttttattttttcgttttgaacaattttgttagcaactttgctaacaataaaatattaaacatattaagtcaagtaaattaataaactaggaatttgaattaacagtctgacagatattattggtgcattgttggtggtgcgataggatacgcaacaggcacagcataaggaggatgaggatgatggtggtggccaccaggcggaagcatgacgggtgtccctactgccgaaggcatgtggccggggactgccgccacagggtgccccattggtgcaccgtacatacccattccggggatgtgggtctgaccgttacggtgcttgacaggtggcgccccaatggatggtacagatggcgagttggtattggggtgttgtactccagtgattggagcctggtgaggtggaacttccccattggcgacgctcgtgatgtcatggatactggatctcctcctatctctattcactgaattcagccgaataaagtacttttgggcatggctggccacttgggttggtgtccttgaaattacaaaattccttgagatgcttctccagtcccctttcccaaacttatcgagacccaatagaaataacctgaaataaatatgtaaatctcaaactcatttatccagaaacaacataaaagataaaagttcatacattatagatatattaaaaaaaaaaaataaaagtatttctatcaaaaataaaaaataaaaatacccatgtgcattttcagtctcagaatccatattatactaacgcagaaaatctaattaataatagaccaattttgtacttggggaaagaaataaaatggctatcctcttattcctgatagttcagaaaaaacaaatgaaattaaatgttttcccaaggcacatatttctagatcttgttgtaaatttggtgaaatataaatatatctccactcgtaactgaaaaaaaaagaccatatagctttggcgatggtggtagattcagtgaagaacaagtactatgtatgtgtgtgcacagctactgcagtacctgtgctcttcttcggtccagggtatacctttcctccgctcttgttcagctctagatattcctttgccgccatggccaccagagtcttgagcttgaagccctgaaaagccagaacttccatggccagaagaactcattctcttattgtccgagccagaaacatcatgagaattatccttactcatcattgtcttattagaagagtcagagcctggaatcgtactgtagttgggaactgggatacgaccatcttggatggcagtgatgtcgtcgaggagcattcgatagtgtcgtttgagctcctccatggatttagcgggaaccatggaagccatcttcttccattgctcttccgattcctcatcctcttcttgatccgtagtgttcttccagtgtatggctatggcgttctcaaaagctttctcctcttctttgttccaagtcgtagtaatatctgtagtagttgaagtacttgacatggtattggtagtaatggttttgagtgttttttttttttgttcaatttattttggaaatggtgaaaaaaaatgggactcattaattcattattattttttattttattttgttgagtgtgtaggataagagtgtgtgtaggataaggagtgaggttgtcatagaactatcaattgacgaggaccactttggaattggagggatgggttgtttgtcaatattgtcatgttcatatcatgcttacaaatttttttagggaaatttctctagataggtgtttgtttgtgctccttcaaaaaaaaaaataataataaaaaaaaaatgtttgtgtacatctatacattttaatttacttggaaatgatacattagcaattataatggtgtaaaagtctaaataaatatagagaaagaaaatttgtgaaattaaaattttccaacttttagatcttattgttcatgtttttaaacaggtgacacataacgtaaaaagaaagagataatctcataatctcactaattaaaatcctttagtaaaacccaattatggagaagtttcactgatccgagaacaagtcaagtctaagaggtatgcagaagtttacctcgccttactttagcttcccggtcacggaagacatataaccactctagaactcggagtggcccaaactcaaaactttgcccaaacgatacccgaacgggtactcgaggggcctatcgcgaacgctgattgccaaaaagagtcgcggacgtctaccttggatacaaacctggatcgcccaacgacgattatattttttctgacacaggatcagatcttgtcccctatacaaggacatggtagtgcgcgcacctcacacaccttttttccaggcatttgcttttaaatgttaaaccttttggccacatgcgtccactatgtacagtggtcctctagtgtccagttgcttcaacgcaaggcacaaatcccttcctaggggctaacaatcagctcttttttgcatgtattttactccattagtggactttttgcaaaaaccctaggcaggtcatggacatgtctatacccacccttagcctataaataccattctatttccatacgaaagggggatcacaacctaaatagtcaaagctctgttaatattattctaagttttcctcttcttcaagagaaactcagaatacaaagttaggatttctagctaaaataatttaaaaacataaaaaaaatatgccctttgcggctaatagattgactcgtagattagggttaattaacacttgaaccacataaaaatctccatctcatttatttttgtattttatttcttaagctcttaaatatttagttactaaaacctcggtaaacatttttggtactttctgttgggctttatgccctaaataaaacgctattttaatgtaatctctatcatttgaatat

SEQ ID NO: 298120 - DNA, 1762 bp, Cannabis indica
tttttaatttttaagtatataaaatcaaaattcccatagtaattcaatgatttaaaaaaaatgtaaccattgaaatctcttccatatatatactataaatgaaaataaaacaattcttttatgcctttcattatcccaaaattaatattattgatttttaattgtgtgattgctctatttgcttgaatggatgtccaaataagtgtaaaaaaagatattagattcatttcatatattctttgttagtaaagatatatcttttttgaaatattttaaccttaattttcttaatagaatgattaaaccacgggaagcacgaattagttttctaattcaatataagattaacaacaaaaaagtaaaagtcaattaacactcaaaattgaaattagaaagaatgttatcaattttctcaagagaaaaaaaaagaaagaatgttattaagagagagaaaaaataggaaggtgcttgagagggggccaccaacttcaattattatattattgcgtttataatatttattacgtcggacacacggcgacaactagtaagtatataataaataattatattcacaaatccaacgcaataaaacgacgttggagcatgttttctggctttttgtttgtgtggctatcggcctatactaccccaaatcccaccaccttcaccaccccttcagtctcctctttttctctctcctcaaaacgacaacatgacaaccagcaagactcccaatacgacatcatcacactcaatccaacaagagtgttgcatgtgcggcgattacggtttctcttatgagctttttcagtgcaaagtttgccaattcagatcccagcacaggtaattaaataaatttaatttctatgtatttttgtatatttttttttctgattaaatttttgttgataggatttacagtttattgatcattataaatcttatgttgtgagttcatatgtgcaggtactgtagtaatttgtacccaaacatgcctgtctcttgccgaacctgcaattggtgcctcatgattcaaaacgaagacaaaacccaacactcatccaactccaattcatcttcctcctgtaaaaccgaagacaaaacgacatcgcctacgaccaagatcaacaacagcgatcatcataatcaggtgggttccctcattttaaggcgccagggaattcgcccaatgaacctccaacaactcagcgggcctatcaagaaacagaaatcggtcgagatcgtggtgcctccaccgtctccatcgccttcgccggtggcgaagtcgccgtcgatccggaaaagggtcttgacgaatggggcaaaagaggagaggctgagacgaaccaggtctgccgagatttcaaacgctccaagtccaactggaaatgggatcagttccaaacaggtctttaggagtaaggtcaggaggtacaagcttttagatgaagtttctagctaataaacataataatttgacaacttttttttttaagtgtgcaaagggaatagacttttagtttcttacataagtagatagttatggaatggctttggttcgatgtgggactgtttttggtcccaatttccatctatagctccatcgggtataatgaattatggagttttgttcaatatatgtacaggaggaggagaaatattatttactagttaaattaaataattcatatagcaatatctctttttttttttttctttttttggatcaaaaaacaataggatcgagtaagtcaggcaa

SEQ ID NO: 298121 - DNA, 1141 bp, Cannabis indica
accttaatgaggtgcttggtgcaaaactcgactaatgatcaagcaccaaggcaagctcatgttacaaaatggccccattgtaggtgtgccatggggcagcacaccacactgggcactacaagggctcaataataatgctcttttctaatttacgcattctctgatattgcgttttacttcaatacaaagttgattctcttttaatgggacaacaacactttcattattgtcgttttaattcaaacacagaggtagctctttgaatcctctgatcatcttttcctcggacgaatagagcgacaagcaggtgggtggcagcattttattttccttttccttgagtattcttgttgctgcattcgttttaatgcaattttcaccactatgtcattactttcatcgcctgctgccattgtatttttgtgtaagatttgccaccgctgcataatgaccttcgtattgagacctccgtagaggaagataatggaaatgtttctattttcctttgtcttcatgttatttttctagctaagcccttgagatctacactgagtttctcacatctccatgattgtcgttgattctacaactgggccgtatggatttgtctttgtgattatttgaaacaacatgtaatcgctgcttgcagcacattcagtaaattcttctagcctctgccttggcatttgaggttgtgcaataccctttttttattattattttttttattatttttattttaccctttcttcaattctgcttctcgtattgataacaattcatctgcttgattttgtggatcataggacttgcgatctcgttccgataccgttgttgtttacaatttctttgaagtttaatggcgagatgcgtcgatgccaaagcactctaaaatttgagctcctcaagatttgagaagctccaagggtagacactaaaatcaagaccctctaaggcccaagcccctccaagactgagcatcctcgaacagagatttgtatttgacttggttgaggtttaagtgcagtggctagctccagattcttcccaggtcggggattgtttatttctgttaggctatttttagcgtaagttttgagtcacattttatagttttttttcttctttattataatttttg

SEQ ID NO: 298122 - DNA, 3537 bp, Cannabis indica
ttttgtaaagttttggtccaaaaacatattgtaaatttccctaaaaaaatatattatttgattattgatgttaaatttagcattgatatgagtactaatagtatccaatatttttgataaaaaaaaatatattagtgtgtaggtacattcaattacatacgttgtttggttattgatattaaatttacgagcattgttattgagtactaatagtgtttaatattttttataggtgacgtcttaagatttattagcgatattttttaaaaattattttcttaaattatatgaaacttaatatttaattacactaataataatataatatctaagaaagtaccctccattttagcatttttataaatttataccattctttgggctaaaacttatatatggattacaagtgtagtgatttttcaacaataaacaaattttctgccactgttgattatgaaaattacaaatacataaagtcatattcaaaagatatgttttttggtcttaaattcttgcattttccaactagtaattgcaatttacttaagcacgtgatatgtttgaaaactagaccctagcctatatatatgcaacctacaataaattcattgcattgaaacttgataaatatcattcaagaaagaatctattttatgagaattttgggatcaacaaaagaaaaaaaaaaactttaatatgaagatccatgcatggtctcaaatatcaatggtttatatgtatataataaaaaaaaactaatgaaggtatgaaaaagttatggtttaaaagggtaaagttgaagcatacatattcttggttcactaaatcagcttaattaaaatacagacaacgtgaaatctcaaggctcttattgttcttgtatatattatatagattgttcaatttggttcaaatcaactattagtcagtaataattgacaacaagctcagtgatttggcatctttttaatgtttttatttttcatttaccataggaatcattgactatattcaaagttgggccattgggacttactataagtacaaataagcaaatttccataaatttaaataattgtggcttaataatttgaggttgttatatcccagacaatttgctcatttgaccaaagggaaggccaatgcatttaagtcaaataattaattcaaaaaatatagccaaacagaaagtcatagtctgtggtgggattataggatcattcagttggatattaaatgattcatcacattcatgagcttatctagtttatctatttttctttttattattaccaaaaataataataatggtcacacgtaggggtagggatatacatgattcatcacattcatgagctaattaatttaattgtttttactatcattctttcaaattatctatgtatagaggctatatttattttgtaggttagttttgttacgggtttataattatagaaattttgctaataaatttaattcaataaaatatgttggagatgcattttcttctaaattttaagaattttttatttttggttttattaatattattgttaggatgctaattcatctgtcatttttgatttttctttgtagatattttatggacttatcatgatagtttgtagtattggacatgctagctactattcttataaaagtattgtcttatttttttgagagatagtttatctttagtttgttcagaactagtcaaaggaaaacatctttagctagttgttttttagttttgactttggatcttgtttcattaggtttgattttattttatttgaatcaagtgatagtaaatgaaaatttagtatgttattaatatattatttggttcgtacagtcattctaatacaatttattttttggtttttgttttgagttgtctcaggtactatttcaggattacaagctgaagctctaacctttctagtgcgtcgcttgattacgttatagttttattgtctagatctctgagacaattttgtcctatgtggctcgcttacttcatcaactcatgattcggcaaggcatgtctttcggttagatgatgagctatcctggttcgaggaggtttttgcgtcgatagtagatatctacatcgtaaattcataagtgtttctattcgtcaaaaaaatgtgtaattattcatttgtggaattatattatattttaaaaaattttacacaatacacctagaaattaacctttttctttagaattttataaatttttttttatatatttttacgaacttttttcttttatttacatttttacaaaaaaaaaaacaatcttacaaattttcacttgtttttttcataaaaaaaacgttgctttaacattgttctaaaataacgaaaaaaataactcttactgttgcaaaaaaaaaaaacatgttgctttctcataacagcaatgtcaaaataacatttttttcgaaaacaatagaaaaagaacactatatttttgtaaaaacataaaataaaatcagtaaaaaatatatatataaaaaatagatccgtaaaatataaaatttttcatttttatatattaatgaaataatctctatattctattatgttaaatgttatcaaatttcatatataaatacaaaattaggatattggcgacaatagtatctgaactatccattttgttacacttaaccccacaactcaatcttttaggggtaaaactctccaaactaccattctgttttgctttttactattctaacaagtttctaaagtcaagtcaaagcccgatgtccagatcgcaccacccaccaactcttctgctcgagtctatgaaacccatgaagctccctcctagaccgcctgaaacccaatcgtccaagcccaatcaccatcgaccaactctccacctctgcctttcattgagaaggctctaggtgtgaggttcttcacgctttaaggtgagattttgcagctcttctttttttttaggtttgcatctgggattgttcgatattcgtcgacattagacatgttcttcactctaggattcaaatcgtggaatgggtgtggaaagagatgcaacagatccagacatcgatggcattaatctatggctttacaggaggagatgctacaaaatctaaggatttggatctatagttttttcttgtgaggtttgttcttcattttattcgaagagttcacactagggtctttcaagtcagcctcaacactccaagaacaaaatggcttattagttcaatttagatgaatatattttttttgatgacaatgtgtactcaactcacgagacattgtgattaaaataggaaagaacgcactcacacactaccaccacaagagagaggtgtgtaagagagagagttagagaaagatagagaggcttgcatgagttaaagaaagagagagagagagaattagaaaattcaattgtatttttaaacctgaaactgatctctcttttttctcttctccagttattctgaatatatcatataaatatataatgttataaacaaac

SEQ ID NO: 298123 - DNA, 610 bp, Cannabis indica
ccaaaaaagaatggccttggggttcttttttgcttgaaaactatttttaaattattggatattttaaacccttgtaaattgagataactctgattgattgccctgatatactttcacacacaaataatgtattgaattgaaagggcaaggattgagacgttatatcgattgctaaattgatatgtttttcttttttcattaatcacaagtgaaacaaatagaagtataatctaatgactcatttgttacatcctatcgtattgtattatgttatacagtattgtgtttggattgaattatattgtatcaatattatttactacaatactatatttggtattaacttgtatataaaattatattatcttcatcataaatttatcccaactccaacaccatttaggtcctgggctggggatgcgttcggggtcgggttggattgtgaattgagtttgggtcttgagttcgaggtcaggcccaggaccaggtttgaggttgagatttccaacctaaacctttgtaaatattatagaggaaattacacttactatgagattttaagagttcttatgataaatatgacacatttaagtttgaccaatttatatgg

SEQ ID NO: 298124 - DNA, 4684 bp, Cannabis indica
ggcttagctggaaaagtcattggaatgggaactctcaattttgaagggttgcccagattaaaaaatgtgatgttggttggaggagtaagtgctaatttacttagcactagtcaaatttgtcaccaagggtatactgtctcatttgacagtgatcattgttatgtacttaatgatgttaatcaatgtatcttgtagatatgaaggtcaacagagaagactttggccaagtgggaaaagaagaaacgaagtgccacgtgaaaaatagcatgagaaaggttaccactgccctgactaagtgtcagtggtctcataccaataatgtttagccccaaggatttgtctcttcaatagttcaagaaagagtttgaaaccctaatctgataagaattcctacaaaagggctagaatacttaacttgttgggaataaaagaatacaaagggcaagatgtcatcatcaaatggaagaggaaagtgttatacacgaacagtgacacttccataatgtcagtggttgcatattaatgacaattgtaaagggaaatggcacttgaagaaaataaatcacacatttactgaagacttgaaccctaaagttaatgttgcacaagaaagggggaaaagaagtcatacgtgaccactaacactcccctagtgtgaccttatcaaaagaagttagcacacgactactcacttctcaggtgtcagtattcccccaagtataagaaacaagggagatgtgtggtaaatagttccttccaatgtccttagtcacatatcataacacaaggtggtgttttagtggcacttgaaggaaggtaacccaacatgcatcaaagacttgaccctaaagtcgaaggtggcataagaagaggggggaaaaaagtgatgcaggaccactaacattgacctagtgtcaatgattacataagaaataccaaagagaagtgacacgcgactactggaactttgcaagtgtcagtggttgcccaagatgaaaaacaatgagaaaatgtgatcaatggtttcttctaatgttagtgtttagatagtacatggcagaatcccctttggagatgtttttgggaaaataactccaactcaaatgagcactgacactttcctagtgtcagttctcgtgtggtttagcaaggaggggattcttgggcactttgagctcaaaccctaagaaatgtctactaacttccaagtgtcatcaaaacaacttaagatggccaacaaattaagctcacacctagtgttagtgctcgtccattatgtattttcccaagggtgaggctccctcagcgtattttcaacctatctcttaaagacagaagcttctagaagactttcaaaagcttaaccacctatgcaaatgaagaaaatatttaatttcatatattttatttattattattaaatgtaaatgcggaactagaaatggtattttggaaccattctcccaaattgtggaggagtaaatagtgaaactctaggcctatatacgcatactatctagatatagggaggggatctacactctgatctattcttaaaaccttagacttatcatagtttctgagaaatcatagccctactcttggtgacattttggaaagaagaaattcctcatagtttcctagaaatcatagccctactcaccgtaatagagttttgtcgacaagtcttccaaaatcacttagagacacatatttagggatgttcgtggtgcgggtggtgtagtgtttgattattttttcaaaccaacctgcacatgcagttttccaatttctcaaactgcactcgcaccgtgaaactaaaaaaccacagaaatcgcactgcaaaaaattgtacggtgcaatgcgatttctgcagtttagactatcaccaaataaataaactattacaaatacaacaaagcttgagcaacacttgtcaaaaataccataaggcttgaaaataaatatgaaaaaaaaaattcaagtttcaacaatacaataattagtgggctttgggctgggccttcacatattggacctaaataaatataaaaattagtatttttataatatacggtgcgatgcgatttgaaccgcatattaacaatttaaaaccgcaaactgtaccgcaccgtgggattcaagaaaaatttaaactgcgatcgcaccgcaaagaatttcaaactgcatttttttattgtgcaagcggtttgagcgatttgatgaacaaccctacacacactaaagagatctctactaaagatcttacctgttgtaatcactaaaatatattcttgagagcataattgttgtgtgtttaagcattgatcaataaaataacaagtggactagccaattaccaccacatcaagagactaaaccactataaaaattatgtgtctgattctatttccttattaaaccaatttatttctgacaatcatatagtgtgaatctaatcgctataaatttatgatcttcttagattaactggcaaaaaactgcgtcaaaagcttggtgctttctttgagagcattagacttaagtttgcttatactacatctgtaacacaataaattttattctcataaaacacatataaattctatcaatatttaacaaatcataaataaaccataacctaacaatacataaaagtgaaaataaaccaccagatcagaaggaaatacaaatcataaactgaaaaataaaaatagaaacatactttcatattattaggaacctgaacctccaaatcatcactgtcatattcttcctcaacctcttctacaacttctttcatctttttcgaaacatgcacatcatccattttcactttaccagctgctctctgcatgttgttttccaaaacagatccacgactaccaccagaggaaccactagatccacaagaactatttgaatcaacaccatcgccatcattagaaacctccttcttcttcttatcaaacattacttttgcaaaataacaaggggaaataagcaatcgagtttaaaccatcgctcaacaaatttcacataaagataaagaaactcaaacactcactaaaatactaacacagagagaaaaagaaacccatcaccttaaggaaaccctaaatacacataaactctctcaactcaaatatcagaccccaaaataaaaaagatgactaataagcaaaagaaattagttataagctatatatatccaaatccctatacccactctataaactcctaatttttaaaaattaatattttcaaatataaatcatttctaatacaatttaattgaatcaaatttttttttaaaaaaaaaaataagaaaatcgtggcaggaaattatgggcacataaatttacaatcttgggacatgatggacgtgcgcaggtggtgacgtcatcaaaccatgtatcaaaagctatttaaaaaaaaaaaataattattttaaaaatattacacgaaaatggtataaaataattattaaataaacccaccatatttttgaaatttaatttcaaatagtattctcaaatgtaaatttttcataataatatcgagaaaataaaatacagtgatattttataaagaaataattttgataaaattaattattcatacaatttattgttgaaaagtaaaagatgagagaaaaatgcagtattagattgcataaattgagaaaacccaaacttcgtggactgtgtttggcgcataacccaacaagaagagaagcaaatggtttgcttgctctcttatccattggcttctataaatagtatctatggtagatttatttcgggtaatcttgaattctattctaaaactctgtcgatttgtgaactaaaaactctctcttctcttctcttccctgagtgtcgccccttcttgaagagcacaacaattgtgttcctcaatttcacaaaaagttctcactttcacgagttgagattctaaagtgtgattataattttaccaattaaaaaaggagaccactcgtcctctttgatctgtgtaaaaatagtcaaggagacaagtagtcatagaagctattcatattcgaaggaggatttgtgataccgctcgtggtgttcaaaggattggatctgaagtactatgctacaagagataaatatttttatttgaatttttttctgttatatgtgttattattaacaagatctcattctagttatggttgctagtgttggaaaataatttacagcatcatattatttcacgtaaataattctttaatattaataattatttcctataacatgcaaaactatgaatatgagatctcgttgtagtagcggaataatgtttcctttcattcagtactttaccatttgattcttgtctatagctattagaagttgttactaggccactccaactattttttggagttagttatttttctgtttaattcttgccaagttgtgtaattgtagcacatgtcattttgtacatttgcctatataaagacttattttcagctcagctcaataacaagaaatcattctctcattctttctctgtttttagtcttaattctcacatatggtatcagaagttaacctgcccaattcaatggcaaggccttccaccagatcccaggatggaatccttcctcaccctcctgaaaatactacatcagatctcccaactgatgtta

SEQ ID NO: 298125 - DNA, 2492 bp, Cannabis indica
aatttttagtgttatggttggaattgaaaaaaaaatagtattgaaatagtatcttgttagtgttgatttaacactaaatttggcattatgggtgctttatagcatttcctcatatgtttatgaaaaattattgactatttacaattggtatggtgtaatgaaaatgctcatttgattaggacaaaaaatattgtgcatatgagtaatttaactatttattgtgctaaaatataatcaagccaaatagaagtcttatctcatgcttgtttgtatttgtcaacagttgggaacttggcaagaagtcagttggccaaagaacaagtgaggttttacttaaatgaagaggagaataagaggaggaacatgttgaaaaagtacattgatttgtgcaatgatgccaaggtacgattaatatgaataattaataaaaatttagtgagcaaaaactttgttcatgtcttagcctgttttttttaacagagattacttggttgcggttttgtggcaggtacctgttgacacagtactagttgagcacaattcaacagcaaaagcaattgttgatctcattcctatacataacattaactatctggttatagggaaaaagctacctaatttgaggtacactttatgcctgatttttttcagacataaatagacatattttaggtttttggtaattatataagtgtggctaataattctttatctcaggatattgaaagaaaaaagtatactaaaggagaatatgtgaagagaatgcccctgaatttgtcaagtaaccattgttagtaatgaaacaagacttatccattcaactaatcaacaggcatcatcaagtgatccagggagatctaatcatcatattaatggccaccctgaaagaaacttgtttatgtgtgcatgtttttcaggcaagttattctaaaccacctaattattattagtctcatgtcatcttgaattggttggcaatcggtttttgtatactgtgaatcaattggaaggtgccacatcagctcaatcaacattttaattgggttgggcagcattaaaataccattttagcctttaattacctatttattagactctacattttattacattatatcccaattttttgcaaaacggatcaaaatacttcaaacttaattgttttcaaatataagatcaattgttgggtcatcagcaaaaaaggtaactgaagataaaaatgtatttaaagttattgtgaccaaaatcaagttcggatactattttggtctattttgtaaaaacatgttcaaaattaatatggattacttttttctttttcttttctctaacagcatgtttaaggtgaaatggaggccttaaacttgcaaaaatgcaacaaatggaatggtggatcgatttcctacaatgaggaacactggtaatatggtaaagaacttggacctagaaagaaagaatatatgacatcataaagaggtgatgaaaagtccatcacttgaccaagcctacaagaagaatggaagaaggggtgataagtcatgtgattcatgtgtcaacctaactataagtgtgtcagatttgaattgacttccctataacctaattaatgaaatttgtcattttgatgagtgtaaaaatgtactaaataatataatgattagttaacctaaattttattcaagaactatactaatataaaatttaaaaagaaaatcaactaagcatgtcaaggctaaattaaattgttaaaaacatagaagaatggaaggtcattggtatgctttgcctgacatattagataagatatttacaaaatttagtattttttcacttagaaaaatatcagagatttatttatttatttatttgataagaaggtgagctttatattactaaattgttctttaaattttgccaatcatgcaacgctagactgaccttgtgtgttgttgaaaattattttatcatgatctaaatttactaacatgtatgttgattataatttataatctaacaccctagatatgaatatatcctaatacgatgaaataaacacatataaagtttagaaaactttacattgatggcagtggaatataatgtctcattctgttcagatctctagcctttaattcttttctgtagcagagcattatcaagatctaaacttagatcttctctccttaagtttggttaaccacaattttccacactatgattgagtacttgacttgctatgagtggacatggtattctatcactaaagacttataaattgatgaagaacaatagaagaggatttgaaatacaaaagaaggaggctctcaatttctagttgtctaacaaagaatgaaaactaggtaattttttgagtttgatgagaatgagagcatcttattccttttacagtattttaactagagtttagaatttaattatattgattaaaaaagataaaataataaggcgaaaatcatcactaagtggctgat

SEQ ID NO: 298126 - DNA, 2215 bp, Cannabis indica
tctctctctctctctctccttccaacttcgataaagttcattgctcctctctctctttcggcctatttcttctcctcccggcttggcgttctctgctgccctcaattatcacaggtaatgagtttagcttttgaaattttggtttaattggaatttttattcaatcttgtgtttgatttagctaacttggaggacagaatggatgcgaatatgaagaaattacaagaaagtttagttgcgcttgagactgaagcagagcgtctctttttagcccgaaaccaggttggttttcattaatgtcagtcagtaatcgtttctccttggatttccaaaaaaaaaaccatggagtttcaaactcaagcatcaaatgaaaacgttgtactttaggtacgggtttagggtttattaagtaaatgatcaagtgagaatggcagacatttttttttatgcttttgaattagaaagtggataggcatattcaaaggatcaaatcacaagaagggtttcacaatatggaattctatgcagttgtagttgtggaaatctattttggtttttgattgaggaaactttcttgaagagcaatttgttttgcttgaacattgttagtagactctgtgaatttgttggggttaatatgcagctggttgagactgataagctaagaaatggaaatagagaagcacttacagctttgaggaagagagctcgaacgacaaagaccagtgttccatccccctttgagtcagtaatgaaggagattggcgtatctggatcaagacctttggtaaaggaagtatgcaccacctgtggcagccacgactccactgaacgcacatggatgatgttccctggaactgatgtctttgcaaggattccgtttcatgctgctcattcaatcatagagacaggtatcttttaatttatcaatactctcattgtcacatctaaaatctgatgatgtaattgaactttctgcttgatttttgttttagttttttgaactgttattgtggaattccattgctttatacttaccctgttataaattaatcaaggaggctatgtcgggttacatagtagtcgaagctgttaccttgttaaatctgcgctgtaagtgacaacttatgtatgatgtcttgagtcttgaaattggtttttgattccaatttgtaagtagtgttttgttgtcaaggactccgaaacaattgagattagcagtttgcagtgctctttgtctaaaatgctgaagttgattctgacagtaactattgttataatttgatagtatgtggattacaaaatttagtaattgttacagacattgttattatatgtgctttgagtagtatggtatatgttgtttatgttatttcataattttattgctgttttgacataaaaaaaaaaatcatgcaaaaatgcttctaacttggagaacaacacacacacacactctaaattctacccttttaatagtgtaataatctctttaaacatacaaaaagagtttcatttttctaaattgagtttaatcaacccttatatagagatgaatctagttcaaaatgaagataacaataataaatatgttaaaactacctcgtgtaacagaaaaatctggctagtgttctgagagctcagctgcttggaccaatcacaacaatcatcagctatattttcttatcaattattaacaattggatcttgttttgtttgactgcagatcaagaacatcttgactttgaaaccaagaaactccacagctatgtgaaggataaaactctgttgatatcagaaaaaggtgcacttgcggacaagatcagtccagcggtgctcaagtctcttgtaacccttacaggaaatagtagaaagtaagttacgatcttgttcttgtaatatgagtttcatttccaagcaaggaaaaagcgattaacatgtaaagtcttctccttttttcttgttttgatgtagtaacatgcaaaatcttcttactttcttaagtttgtgtttttattcaaatgcatggccaattactttacatgtttggcactccctataagtaggagtgtgcagaaagtcatccaatccaattccaaccgaccgatccaatctcaaccgatccaataaaattggatatccaatcataattggatcggattggatgcaaattttgaaaatccaattagatcggatcggatgttggatgagacat

SEQ ID NO: 298127 - DNA, 1702 bp, Cannabis indica
acttaacccccttaactttttttaggtggcaaaacccccttatgtttatttttctttgcaaatttgatatgccagttaaatattaccattaaatatcaactagatgaccactgtatacacctatgtatatgtaagagtctaacctcgaagtcgatacagtagtaatccagttagtatttaacggccagtaatatctaactaaaactttaaaactttaagagttagtaaaggattgtgactatgagattctctaccttcttggaaaagcaaaggtagtaacagatgccctaagttagaagggtctaggtcaagtctatgattcggaacaattatcctcgaagttggtgaaaaatatgactagagctggacttgaatttctagtgagaagatttgctaaggtctccccacattagatttattggaacaaattaagctagtacagtaaagtgaactagtgcaaataaaaaaaacgaggttgatacaccgaaggacttcttagtgttgttgaatggattactggaatataaagatatagtttgtattccagatgatgataagattgaggaagagattctagatgagtctcacattacattatttcgttacatccaaaaatgacaaagatgtatcagatgtaaaagcactatattggtggtcaagaatgaaaagttatgtgaatagctatgtatcgaaatgttaaattgataggaagttaaggtaaagcttcaaaggctagcggattacttcaaccattgaagattcttgggtggaaatgggatgatataaccatggatactgtggtcgggttgcattgactacgaggattccatttgggtgataatgagtagatataccaagtcagcacacttcctggcagtgtggatggcatacacaagggattagtttatagacttatatactaaggagatagttcgacttcaggatgtcctaaaatcgattatctcagattgtgattttaagtttacttccatgttttgagaatttcacaaggactacgggtgctaagatgaagttttcactgcttttcatcctcaaactaacaaataatctgacgaaatcatctagatatttgagatgttgtaagaatgtgtgttaaacttgaaggatcctacaatagatatctctcttttgggtttagggcttaaggagattttattagactatgtgaataaaatacatgttaattgtgaaataaaatatttctaggtcaattgactataaaaactgattagttggccagaatgtcacagcagtattaatttgtgaagttttagttggtattagttatgtcgagaaattttaagatttggttatgaccgttttagtcctaatacaagaggttacttaagtggtaagtaaggggatattttagtcattatgttagttaagtttaatctttgggttttgtttgttagtgaaattctagaaaataggttttatgttgaatattaagttctctttagaaagaaatagagataacataaacctaagaaagaaccctctctctctctctctcggctcacccaaaaaaaatgcaaggaagatcaattcttctttagagtatttccatcattctcaattgttagagtattagttgtatattagctgtaaaagaattagatatttagtagtttcctatttagtctctagctttgtatataatatgtattattctatgaaa

SEQ ID NO: 298128 - DNA, 4865 bp, Cannabis indica
tttatttatttttttttgggaaaaattaatttggtttcactcttaatcttttttattcttcatattctacaatataagaaaagcaaacgctcccgccttaaacttcattcaatgtgcatttaggacacgagggagaacacaaacctatcacaaataagctccgaagggaaacagctccaaggaagctaatagccaacaggaaaaaagcaacctgttacattatcccccgaaaagtcaagggatcataaatccaacgttaaataattagtaaataaaactggttacaagcatacattaggctagtaaaagtgtcaattcctatatagtggtcaatggaaattagtgcagatttgaatgtgggtaaatagtattttcataattttataaatgcaaggatgtgatacctacaaccattgagcgtaaaagtggaacactgagtacttttgttgggaaaaccggacattggatagtaagtgaactagccaactaagacaaactaattaagatgaagataaaactaatgaaaagaatcaaaagttgacaagtaccttaacaaaaagcatcccatcatttcccttggcaagagattttaagacattgacagcaccattccatgatgacgctactgatgtggcaactctttgtgacttctcttctgacagctcaaaatgagatggggaaagtttttcaacactgtaccctaaactgcaccagtacaaagttccatttgaaagggttagatttcatctaatgagagtaggaaattcataactgactaatagaacttcaaattgacgtagagaacttcaaatctaatgacacggagagcttgcccctgctaaaagtgaataattatcaaatgagaaagcagcagtctatttacattcagtgctgcatcaatacgtcaaaacaaagtgttgctcttacagttttctaggtaagtagccatgaatcagtaagaatattgctattcccaaaagaatctttgcaaatgcagtaattatagaaaatccagatgcaacaaagttgaagtagatggcagcaagaacgatcaacgtgatgattgtctgttttttatccttccaaagtaatgtgtcagcaactgcaaaatagtaatgccaaattacatttatccgtgaaaattaaacacatgtatactttgcatgttctcgtacacgacactttcaagttggacttggcagctcagaataaactaatcagccatcaaaattattcaagatattccaaatgactttaggaactcaattgtgttttctccctctgcttctcatcttatagcatcaaccctagtcatcaattcttcctataataagtaatttgcccctttccttatggggttgagttgggttggaaaatatttgcatcatcaaataaagctttcctacataaggtgtactcttacttataaaattagtcatctaaggaaatttgaagattttttttggtaagatgaccaaagtccaatacttcatacctctaccacttccaagatacgtggaagctttagatggtccttctcttttaggttgatgttcagcccttaagtgtggatatgactccaatgtccttttgagaccttcctgtagaaaagtaaaatcacaaataaatcaaccaaagcaataatttcagtcaataaagaaagataatctggattgctagcacatgtaaatcaccaatgtacaggtacctatcagtaataggtttccaacccaagtacacatattcaacaacattacaagaaaagaaaaataaataattgtaagcctatatctaagataaggcaaattattggttggaaatcctaagtagaatgcaaatacgtaatgaccatgcaagatagacttattttattcaaaggtatttttttaaaatgttttcagttcaagttcagcttatatttcatatgtcgaccgtggttctaattggctaatcagcattttctctttattcactcactttataaattttcattgcttaacctctatcttttattaaactacagatatgacagcacaagtttaaaaaaattgattggaaccacaaaatcaagagaaaagtgtaatcctgtgtttaaacaaatagttgttactcattactttgaaagatcaaacaacctgaagagttacaatgggagtgtaatcgaggcgatcctttgctttggagcaattaaaagacctagtgcaagagaggagtctaactcttgaaggtatcaactgtggaaccttcatcccatatggaccaagcagcttatatgtccactcaacaacatgtgcaattggcatcattaccaaggctgggatctttattcttggcctgcaaactacattggttcaggaaatacataataaaatatcatggaccaaatacattactgtattcttcaaccacaattcagagagggaaacattaatgattttggagattgttccttatagtaggatgctttatgcagcaaggcttataaaaaaaaatttgttcaccaagagaaataattaaaagaaaaatgcacacaaacagaacaaaatagaagaactcaactgaatgataactgtgcataaacaaatccaaaaatttacaaattagttgaatggaagagctaaagacaaagaaatacctttcatagccaagaccttcaagaataagtgaaagaaactcccaaaacttaataggttccatattggttataaaataagcctgcaaaaccaaccccaacttagtttcatattcgtaagataatctaccagattccacaccaaaagcatttcaaagaatgactctttctgtcaagtcttaaggcaaatcaagttaacataattttatacggcattgttagcaataacaataaagcaatcagtttttagacaaataaatccgtaaaaaaattcagccataacatataagtaaataaaatgaaggcaataatctgttcgtgatagaaacagggggtcaacttggccagaaactacattgtatagtgaaaaagaagaatcgctgatagagagaaagggaaattaataatatctaattccaaattagaattcacatcctggaaacttctactatcaaaagcttttcccatgagacatttggatttaatagaaggaactacagaaagccaaacaatacagtttcatctttctgttgaaaaaggtaaatcagcacctgtcctgcagctctttcaacaaccgccccctctgacgataatgcccgttccgcgcaaatgtgggcatgagcaacattttcaacataagtgaaatcatatacattgttgccatcaccaatgataaactgaacatttgaaaagaaaggagaatcaaaagtgaaaatatattccttgaagattcttagtgacacataatgtaaagaaaaagggtaatgcatttcgtttgttctaatttatttatctaaatataatgtagaaaagtagagaacatttacaataaaaaaaacatactttggatttcccagctttagcagcagcaattagagatggcaccagcaacttatcaccgggaccaaatatgctgctaggacgtatacaacatgttagaagcccattaacaccatttgacttgattaccaatgcctctccttccgctttcgttgctgaatagtgatcgttgtgctggaaaaattggacattggcatgagcaacaccaacctagttagtcgcaagtacagtctacaacccaacccagacctctaattgaactgtatttcatcatgagattaatacatacataagtctaacagtctaaacaaataatataacggatttctgggtattattcttacaaagctgagttgggtcaattcactacctgagggggatatggcaaagactcatccccattgactataccgtgaaccccatcaaataccacactaggagagctagtgtatatcaatcttttcactttttgttcaacgcaagcatcaatgacattcttggttcctacaaagaaaagttgaaggtgcattactacatagaataattatctactgatacataacgaaagccacccaaaaaatacagtaaggaaactttcagtcaacataacatttcctaccatcaacgttgaccgaatgatgcagctggtaatattgatggaggaattcggagccgccatgtgaaacacagcctcagccccttggaatgctgtaccaaagaaaaaacgcaagtgaaaaccaactcccaaatcaaaatcccttgagattttacagtgcggaagagggctgacctttgagaacttgggccttattacgaaggtcgatagtgacgtaaacggctcggccgtcgcgcaaagcttctccaagaatcccattttcctcggatggttccagatcaatggtaggacccaaatcggcgactcgaacagaaaatttttctgatctaactagcatatttaccaaatggcgcgccgcaaagccccggcctccggtgacaacacaccatctttgttcgccggcggccattactgttggttggaaaataccaatagaggattggaggttgctaaaatggatctgagattgaacagagcttgaaactcagtgacggagtaacactgcgggggaagtcagacaggtggctttacaagttgaacacatgacgaagagaggtatgtattttttggaaaaaagcattgcttttagaatttatttatttatttatatttggaaatagcagttttgttttgagaggctttcaaaaaaaatattatttacaagcaatttttaaaatattataattaggattattaagcttttccctctcttgagccttctagcaagtatgcgatccatcttaggggtgttcacaaagtatccgatccaatccaatc

SEQ ID NO: 298129 - DNA, 4283 bp, Cannabis indica
ttctaatatataaacgcttttcaaaaaagaaaaaaaaattattatctactactaaaattcttaacggaaaacaaaactattttgctaaaaatatttttccattttctcttcggcccctcaatttttcccattttgcccaaagcaccccccgaccacccattaaccgggcacgaccgccccttctcccacaccagtaaactcccaaccacccagatctaccgaggagaagctcaactcgaccggctgagacaggcgcaagaagaaccactgacgacagactctcctgcgccgccgtggagaaccgcagagaccaagagcaaccaaaaccttgtcagaccggatcggaagcacgcacagacaccgcggccaagcccagtgaaacggtagcaaggctctgaccgaggggaagaaaatgcgaaatctgaaaatgcactctgtgcggcgctaggctatttgccaagagaaaaggtttgaacagttatagtaaaaagggaaagcatgcatatgaatttacgaaagtctcaatactaaactactctagaagctaacactgaaaatcatgttcaaaatggagtcctcatcaacttcaactcaccaactctctgctcacaacatcggagacctcatcgattccgtcgatgcttttctcttcgactgcgatggtcctatttcctactaactttttcttaatcctttctataaaaaaattgaattgattttgatttatattattaataataataatactcaggtgtcatttggaagggcgacttcctcatttatggcgtccgccacacacttgactggcttcgatcaaaggcaatctttctcattcttatttttccattgttatatttctttctcaatttatgtatttaactcattttgggtttaattacagggaaagaagctcgtgtttgttaccaacaactccacaaaatcaagaagccaatacgccaaaaagttccaatccctcggcatttcagtcagccaggttctttttcatttctttcaaaaattaatgagaaaaggaataatgggtttttcagtccatattcaatatacttagttcctgatttgtaaattaagaatcatttctttccctctttatttgtaggatgagatattctcgtcctcatttgcagccgctatgttcttgaaagtccataaatttccccaagataagaaggtttggaacttaatttactccattaaagcatggaattataaaaaataataaagcatggaatattgaaaatggggtaatgaatgttttaagttatccaaactgaatactgatattgatattatatgtgttgtaggtctatgttataggcggagaagggatattagaagagttgcagctagctggatttacaggttttggtggcccagtaagttcatcatttattgctttctaaattaacaaacaatgagccctgtttttagttaattgtcattttttatacaatcttctggccaataatagaaatgtaggactcaacctatcctatatgttgtcactggcagttagttgttttattttgactttattgttttgaaacgttcataagacaatattgtattgcaggaagatgatgaaaagacagcagagttgaaaccaaattctctctttgaacacgataagagtgtaaagtaacagcttcactattttatatatgtgtttacttgttatttctgctagctattgagaacatttgaacaggcgattcctgttttcaggtaggagcagttgtagttggattggacccacgtatcaactattacaagcttcagtaagaattacttttcttactttctggaaaaacatcatttttgtttactttcagactatctgattgcctattaaaagtacattgtatctatcctgtaatgattgatgtattataatgttaactggactgtagatatggaacactatgcattcgtgagaatccaggatgcgtgttcatcgccacaaaccgagactcggtggggcatatgactaatttacaagaatggccaggtttgcttctttgtttctgatattttatttgaagaaattcagcaatttattgaagttatttcagagtttgctttgggttttaggtgccgggtgcatggttgcagccatatgtggatcaactcagaaggagcctattgtagttgggaaaccctctactttcatgatggactttttgctagaaaggtaggcatatctgttccttttccccctgctgcacttctccttgtcaaaccaaaaggcatgaagatacatctaaaagagggaacataattgcactgcaccaaagctttgttttctgctgcaagattattgaccaaaacattggaataatttttattattgttttattttcagatataatataaggtgctccagaatgtgtatggtcggtgacagattagacactgatattttgtttgggcggaatgctggctgcaaaactctccttgttctttcaggtttttttttctttgtaatgcaatttttatttcatgtaactctgaccacaaggagttaatacttttcatcgctgaggcttgtattttgtcatgacaggtgtgacaaccctccctacccttgaagatccttcaaatactatccaaccagattattatactagcaaggtgtctgacatttttgacttgatggcgtcattggcatcaataaggttggagcatgtggttctacacaatgaaacggaaccaacacagaaaagtaaactcaaatggagcaaggaagcaactacacttttgataagtgcatggttaaatacatctaaggataacattgtggggaatgatcaaatttctcgaagattctgggatcggatcgcaaaatatttcaacaccaactgtaaaggtgaggaacgaagatctggaaagcaatgcaaagaccattggaacaagatgaatcaaaaggtggtacgttttaatagctgttataaacgagtacagcaagcacatcatagtgattggtctggtgagcaaattattgaaaatgctcatgaaatgtataaatctgaaaataacaactcaaactttttgttgatgcactgttggagattgctaaaagatgaatcgaaatggaatacagtctaccaaccacaaggtggtaagagaacaaaggtgtcagaatcaggggaatatacttcatcgtccaatgcagacattagtgaccacgaagtttctgaagtgcgccagaaggcggcaaagagaaaggaaaaggaaaatcatgagcaacatgctacattttatgacattagtgaacggaaagcagaagcattggagaaattgttggcaatagagaaggaaaagacaatgacaaaatatatggactatctcctcatggacacatcgcatatgactccagaacaaaaaaaagatcatgaaaaattgtgtattcatattaagactaatattttaaaatattaatttatatgtatttgtctcaatgttatgcattattttatttaaatgaattatcttttattataacatttatattccaattgctatattttggaggatatattttaaggcctatatgttagttgccacgctataaatactaatgctcaatcttcctctcactttattatcccgttcatctaaaatttccaaatcaaatatcatctaactcaaagttcatcaatggattggacaagctctccataacataattaggatgaaagagatgcatattagctctattttaattatgataaaggctccacttacacaccaacgataaagtatgtcatggacttaattttaattttccaaactatgctttaaagaaatactaaaatttgtgacaaaaacatttatccattgaacatatatggtctaaatttgggaattattttaattagtattttttttttaattatgatagattgattagttgtgttaaatttggacatcatttttttttttgaatggacatcattttaattagcctcataattcttctttattagtcttgagtctggatcgggtctagggtcaggtttggggtttaggatctaggatctgagactagggtctagggttgagtttggggtatactctagggacgagtcttggtgaggaccgatcctgagttaatttgggctctagaaaaaacaatatttttagaccctttgtataataataataagggatttttttaagaatatactaaattaagtaactttttacaaaaatgacgtttttttttaaatgaaaacaaaatgacgtgacacgtacaaagagtgtgt

SEQ ID NO: 298130 - DNA, 6632 bp, Cannabis indica
tatgcactgtttgtttttctgggtttctctggagttacggagttgcattctgtaactacagaaaactgttttcagtaccaattttattattccgcatttaattaatcatttaattaaataatcaaactgggaatattaaaatacagaatttcataatatttattaaagttaagtaggactcaatattgcaccaataataatattaaactttatatgggtgctatttagcaattctcttaaataatagagtgtgagattataatgccaatatgatgctagtactgggagtaaacttagaagtaaatgtatcaaaaataatgtggataataaaaaaataaaattatattttgggattgttggcactatttttagtatggagatatgggacaccattgtgcttaacatttttataacatgacgtcttataattaggagaattgttaaaagacactattgatgtctaacacttttttcggtgtcatactactattagtgtgattaagtatcaagtcctatacaatttaagaaaataagttgtagagaatatcgctaaccaatcgtcaatcgtgtaacactacttttagaaggtgttgggcagtactgatacctaataagaattctcattaatcattattaaattaaaataaatcaattgccacacaagtttatgacttcattccatcggtgattggtccagttggcggagtgaaagtagttcgacatagacaaagaaaaccataatatattaggaaataacggccacaactaccggtccatggagttgaacatcaaacacgaagactcattgttgagacgagagacgccttcactacaaactcacctcactctccattactccaatccatgcaccttcttcttcctcatcctcctcctcaaggtgagtcacctcacattcctcactctcaccacttaactagggttagggtttttactttttcattttgattcaatcactttccaatcccacattcatttttcatcttcctctactagaatgttggaaccagagcgtggttcgagttccgaagctgggattttatcttccggcttctcacatgttcgtcaggaggaggttgacggtggccattttccgccacgaaatcctttcaggcgttcggagctagaggaggaacgacgagagctagaggaacaacgaattgctgcttcttatagaagagactttacggtattgggtgacaatgagaatgttcgggaggatacctggtcttgtgtcatcgtcctctttaccttttggttcttcagtttgtactcaatttccaataactctgctttgtttgatttgcatgttttaatggctaatatataatggttttatggttatgttttttattttgttacagtatcgatgactataattctgggagtatatgggtctgtaaatgttcagcttggtccaaattgttcacttcttttgcaacctaactgtatatttgtgcagtctatgaaggttggttgttatttatgaaaagttcccttttccatgtctagtagttatttgtaatctcgggtcatttgatttgcttcatttcagctggaagagttaaatggatcaaagcctggccccatggtctttggttttcataaacctccacctcttgatgctgttaaaatttggtcagaaacttatagattgtctatctcgatggattcttacaaggcatgtttttcttttggaaatgtcccttttttccctttctttatttagtaactttttttagcttgtaaatgttgttgtgacttagaagtaatccttgcaggatttgatgtacaatttaaacgttgggtctcaaataaatatatcatataccgtgaactctccaagttcatctattatccttataattgccgaaggtatgctcaaaaagtttccaatgtgggctctgttcatgcttcatcttacatgaatatgctttatttgtactggtggtgatgatagagtttcttccttgaaatgctagttttgagttgataaaagtcatttttaagcattctatatgaagaaacatcctttaaaaatacttttttcctgggtagtttctctgaacttttaagacccttctttatttgttttcttcttcttcttcttcttcttcttcttcttcttcttattcttctcctccttgtactattgagtgcgtaataactgattgcagttttttatgctgtctcaatagtgttgtgaactggcatcttgcagggaatgaaggtctgactcgatggcttgagaacccaacacatgtcaattctactttatcatggaatattattcatggtgagattccaatccaaattttagtattttatacaacaattatgacagttacgtatatattgtatgaccaattattttctcacaggaagtggtatgattagccaaggtatctcaaagtcttctagttattatgttgcagcgggtaacttgaattcagaggatgtggaggtaattctttgaacatgtaaatatttcacagttgattctcttgttttattggtctcttgctgagccataaaatgtgtggagacaagaagctttagcatattgctaagtaagaatctaacctacaaggcctggccatttgatctacttgtcatgggttcttgcttgatatttttatagactcaaaattaacttgtgtaatagtctgttttaattatttgatttataagtataactcgtggtcaatgaattaaaagctggttgcttagaggtgctaagtattttgacaatgacgagttttaaatgctcctagcttcatcagcatgatcgctctaagttgtaagaccctgtgaaattatttacagcttataactgttatcatgatgaatgccacaaaaatggaaaggaaaattattacatctatctctgatgtttaggttgtataaatatatatttatatatatatttttattttgggaggtgcatctgaatgttcgataattctgcttgaatttttatcacagtgaagtttttttcctttctaaatcagaatgggtatctataaaaaattggtctgaaataaataaaacaaagatctgtcatcttatgttctcacaaatccgttcatctgtatctgtttatttaattgtctgatagtcagactctaccagttttgtttagttaaacataagaactaacaacattgcaactgtactttgcaattatatcaacatgttctttttttcatgggaggtggaatgataattgccaaagctcatttgacatctgcatgtccatgaatttgtagtggggtagtaaatgagctaaatatatacaaaggataagaactaagaagaatgaagagaggatattgagtgatatgctgtaaagctttgctctagggagaagaattgaggtctattgaatacctctagggaaatttgaggtctctcgattgttctattgtgtactgatctctttaatcaatcaatgatcatatttgcctatgttccatttccttcaaccttcaatttatctctgtttttgcctattgactagaggatccctacttggggtctatcaattggtatcagtgtatttccaaattgatttaagggcagttataatgagtactaatcacagcacatcatatcttattgactcttaactttactattttaatatgtaaggatttatttaacctatatttctttattccatatatattcattacatctgaacttaacaggtgaaactaaaaataagaataagggcttcccaatatgatacaagtgaagcctattacaaatgcaatatcagtgaagggccctgtagcatgcaaattctattccctgagggaaatgcagctgtcttaaccaatcttggtcctgatcaggtaagaatggattttaattgacagttagtcacactttttctttgtatgctgtttataagtgctatatattgagtaaactgaagaaaagaaattaggacaacaaatttagacaatacatgtctaatttaagacatcttgtttggcagtaacactttctagaaagctaaaggcactaagtatgtttattattgtcctttaaaacgtggtaaagtaactttcagttctcacatacccagtactaaataattttctacttttggctgctccaggttgcagctggccctaagttgtatgtcaaactcacctatgggccgagatgggccacatatattgttggtataggtatcccccatccacaatcgacaggttattcttttcttctttttcccccttattaaattgtatcataaccctcacgtgccttgtaggtttgatgaccatgctcatgttattccttttcaacttcctggataagtgccactccactcgtgatggaactggaggccataatgaagtgatacgacctgagagacacccattgctttctaacaaagatgatgatctttcaagttggggttcatcttatgaatctgtatcccaggatgaggaagatctggcagttggttccatagaggggaaatctattgaagatggggaaaatagtaataacactcggcgcctttgtgcaatatgctttgatgctcctagggactgctttttccttccgtgcgggcactgtgtggcttgttttgaatgtggaaccaggtatactctctaaattataattcatctgatgtgaaaattggcctcttcgtttgactagttaattttgatagaataattctagagtagaaatattctatcggctattttccaaaataaacaccagtaataaattctcaagtgatctttattctgaaaaacagtaacaatgttaaaatatcgagctttcgaaaggctcgtctttccgaattcctaatcttaaaaagattggtctctccacaaagagtctactcttatctaattctaagctattttaaatgaggttgctccctctctattggtcttaaaaagacttaggccacctaagattacaattggaccaatagagttaaaacactaagacaactctatgttcataagagactaagtattttatttaattattttgtgatacacaaaataagtcttaggcttatcaatagaataatcctagagtaaacaaagtgtattggggtttatcaaattcttaataatttccgctgtctgaatttgagaagaaaagctggttggatcaaccactactcaatgtacagtgtttgtagcaagaggaaccatgctatgagatacacagttttattgtagaaattttctttgctaataatttaaaattatggaataaggatagcctagaacattgagggttttgttttggtttctgtcaacttcgttgagaattttcacatggcactgactcctctcattgctggacctattaatgaatttagagtagtacactgacttcagcaaaatgaaagatagggaagtgaatgggagtttagtatcattctattctgctctcgtaaattagtaattattatagttatatattttaaaaaattattgttctgtttactttccttgattggataaatcataatcgattgattttcgtttgcaggatatcagaggcagaaggcacatgcccaatatgtcgccggaagatgaagaaggtgaggaagatttttactgtctaaagcattacaccgacaccgctatctttgaaggtgacgtgcttacatgtctagtactacttaccttcttttctgacaaattatgacatcattggaaggaattttagctgagttttgaagtagaactagaaagtgcattgagtattgcctttttgtttcttcaaaaaaggcttttcccattctttctcttggtatagatagaatcatcaaaattgactcatataaaattgtctataatttctcccactttggacttcagtgggtcttctaaatgaaaaggcctggcctagagaagtagtttttgttttgatattcatacatacttgaatctgtggtcaagatttggtttattcactttccaagttgaaactttagatcacttaccaaaaagcttctgcagtcaccaacacacctaaattgtttggtattatgaccaccaactttctcatgatagctataccatcatcaacagtaatttgtggacacttttaaatgtattttttttactctaaaatgaaacaaactttggagatctttttttggatagaattatagagatcttagattgtatctgcaatgcatttttcaaactaaacaaaaatgtcgcgcattccctttcatggaggtttattaagagtggacaaaatggagattaatatttattagtcccatgcatttgggttgatatacactcaaattacactttatagataattttaaatagtaatcgcatcactataaattttatacttaaaattaagtgttggagtttattattagaatttatggatgtttactaataagtaatgagaatcaatggtaaggtaatcattcacttacatttgtttacttacattattaaaattaggaaagggagaacttgattaaataaggaagaaaagaaaaggagaatttctcctaccaattttataaagaatgccattaagggtaatggattttaattatttttattttattttttaatattaaatatataatgaca

SEQ ID NO: 298131 - DNA, 2456 bp, Cannabis indica
tgcttcttgtgtatgcttctatatggtctttgtgatgcctgtttgttgcctttgttgggccattgcgtgccatttgtctatatgttttcttgtgggttgtgtgagattggtccttggggatgctatgtgtttacttgctcatgcttcttgtttgcactcaacatgtgcgagacatgtatcgtgcctaacctttgaacttatattcctgcaggcgcgtttaggctgacttgctagctcggtgtgccagcaagtgctacacgttccacctatttgggggtgtccaaataggcggcccatgacactgagcaaggggggtcttgcccttgtttccctactttagggacatagccaagttcttcaggcggtgtccgactcagattgctttgaaaggcatcaagtaccttttggcactctttgttatgtatgtagagtcaggtttgtcgcagccctcaccttacgaggtgagttactatttttagctaaaatctacccctaagcaaggtaggtatggatacatttaccttagccagctagggtatcattggcttggaggtaccaacgacaaggccatgtcaaggattgggaagtactataagagttacttcattgcttgggatgtcaaggacgtacaccattacttttgaaaggtcataacttaccttcgcccaattcctaccctcaagccgagggacagagctaaccatattctgtctctccctacaaaaaggtgcaacatctgcaagttttcctagaaggagaattttagaaagtatggtttgtatccttctagacaagatgccaagggcgttggaaaccctcctgaggattcagataacactcctgtgatgaaggaggttggaaaaaagaaaaatcaagtgcctgaacaagaaaaggccaagtctgatgatgacatccccttggccaagattgctcgaacgataaccagaagggagcaggccttttggcaacgcctagcatgggaaggcacaattgatgatgcccccatattgatcaagcctaaaagataagagtttgttagacctatctagccaacacctgcatctagagacaaaggcaaggctattatttctgacgactgttatgatgagtcctcttccaaggatgagaggtttccagatcccacttttgactcttgacagtagtaattttcttacttttacttgcatttgttatttataacttgtattctaactttgttattttcttttttgtagatatggcttctaggatgagagaccttgtgaaaaggtcctcgggtggctcttcttctggtcggcctcaggctaaggtggccagaacatgtgggtcttctaacatgacccagaccagcctgcctcctcctcctttaagtcccccaccggccaaccagtctatggttatggatcttccttcgaggatcactccttctccttagagatcatcaagcaaggcagcccaaaagcaaagtcaggcggcctacttgaccaagggtgagagggaaaaagaggtcccacagctataatggcaagtgcctgccaagcattgatgagcagctccaggagttggatgtcgacaccctagattaccaaatagctagcaccctttgagatgctacctctataagttgttattacacttgtcttactgatacttttcgtacaacttttttgtatagcttttttcactttgcttcttcttggtttcaggtactattgaagcttagccacacccatgctagggctaagggttttgcgatgactttcaggaaaaaaacttaagagcaaggatgttgaactcaaggtaaaagatgatgagcttgcagaggtgcgggttaatatgggcgtaacatcgacccgtctgagggaggtctaggaccagtatgatggcatagctcaactgctcggtattcgtaatcaagaggtgacaaactttacatctgataccaccaagctgaagaaggagttagagatggagcgtagcgagaagcaagtggcccttaaggagaagcaggaagctttggatgagtttgttgaattttccatggaggttctttatgaggtatttctccataaccccaacgtcgacctctcatacatggattcttctcttcgtgagagctggcttgctcgaggtaagtagttgtatgagagcagacctccagtggaccaagttggccaaggtgatgaggtgctagttggcaagatcccaaaggcacctaccgactagcttactggagtgctagctggccagcctgtggatgagataccatccgaccagccttttatggtcagactatagaacccactttagaggccccaactgcccaggctaacgtcgttgttcaggattcaaccaatttggattcgcctactctcttcattactcttgaggacgtttgaaggcttatgttcatttcatgcttttatttcacatactttattatttatttatttttt

SEQ ID NO: 298132 - DNA, 3026 bp, Cannabis indica
taatgagttatataatctgattatggtagaattttgtttatgctttctttctaaaactaagctctatgtctagccttacaatatttgaggactataaaactaaagcaatttactatatgttgagttcctattcttgggttttgtttatgcatgtttgaagctgtagaaagatttagtaaaagcatatcagatattcttataatcatgctcgaaaccatgaattgttattgcattttctagaatatacagtcagtctagtatccttggtagtgcagtgttattatacttctaccaataatctttacatgaacatgacccatgcctgaaatggtggaaccgggttcgatctctaacaactacttctctattatacaccttagataccaactttgccattccatgacaatccacacacattcttaggttcttcacaactcttattgtcacccctggcttagaagtaataaggccaaatgcaatagccaacttctcactatggcggtacactgcactctctttctcctcttctcccatatccagaaatacctctgatgtatcaggtgaatacccaacagattttaaatctgttgtaattttctccaagtgtgaatatatttcttcagattgaggatgtgacaggtctccagctacaaattcatgaaccgtaccattcatctctatcaaactgcatcccggggtcttcttgattcccctactactcatcatctctcttgtctcacgcaaacgctcccatttattacaagttgcgtaaatattgcacaagagattgtaaacagcactgttttcaggctccaattcgagaatctttttagctgctatttcagccagttttgcgtctttatgaactctacaagcaccaagaagagctccccagacaatcgaatttggcttcaccggcatgttaagtatggtctcatatgcttcttttagatgccctgctcggccaagaagatccaccatacatccataatgtgacacatttggttgaattccatgttgactgatcatactagcaaaaaactttcttcctttatctaccatgccggtatgagtacaggcgcagagaacaccaatgcaggtcacctcatctggtgtaattgaagctttcagcatctgagagaacatatcgagagcttcctcaccatgtccattaacagcaaggccaacaatcacagcagtccaggtaaatttgtctctttgaggcaattcattaaaaaccattagtgccttttccacattgccacacttaaagtacatgtctattagtgcatttccaacaaaggtatctttcttgatcttgttcttgtctatataagttttaatccattctcctaattcaaaagcacctagatgagcacaagccgttaggatgctaactacagtgaactcgtccggtcttatctttgaagtctgcatctcacgaaaaagctccaacgcctctttaaactggttcactcgtaagtatccatcaattatggctgtccaagagacataatctctttcagacatgccatcaaagtacttccgagctaaatcaatttgtcccgagttcgcaaaccctttgacaattgtagtccaagaaatcacatctctagtcttcatgctctcaaaaatctcaagtgaggtactcatttctccacaagctgcatacatatccatcaaagcattttccaaaactaaattaggtacaattccactctctttaagatatctatgaacctgttttccattatccaaatctttcaatttggagcaagctgaaagcaccaaagaaaaggtaacagaagtgggcaacactccttttcccaccatttcctcaaaaagcttcattgattcatcaaatcttctcactctattatacccagatatcattgcattccaagtaacagcatccctctcataacacatgtcaaaaaccccacgagccatatcaaccagaccactcgaagagtacatattcaccaaagcattttgaacataaagattcgaatcaagcccaaatttaagcacatgaccatgcaactctttcccacaagccaaggcaatatcacgagtaaatcccttaaacaaaaagggaaaagtataatggtcaggcttgcaattcctttccaacatagctacatacatgtacactccatctctaggacagtgcatcctcatcctagcattggaatagcctttgatcatggtgttccaaatgaagacacttggttcaggaattacatcgaacacttgacgtgcatataccatgttgtcgttttgttgagcacaagaggtggcaatgattttattctgtacaaagggaagtgatgtaatgcccagtttgattgtttgggcgtggatttgtctgagttgttcaatggatttgcaattctcgaataggtttataactggtactggtagattctctaaagaaggtaagtgggttaaagcttgggatgccatggaaatcattatactgattcccaaaaagagtggtgttttttttacttatttactttcttcagaatgagacgttgagaataaggttatgcaaatagcattaaaccacttatttatcccaaacatatattaaaacgacatgttgttcggttaaacgacttgtagtttatgttaacaaacgacaacaaatatttgaatgaaatcgaataatccaaaaatctttttaacttgctttttatctccatagtctcgaaaattcaccgaaaaaatatactttgctaatttatgagtatatatttgcaaatttatcaagtatgagagagaaattattagacatcagacaaataattacaattaacatacagtagaactcagaaacaaatttgtgaaaactgcaatcctttcaacatgaattagtttctaacttgtcaaaagtcatttaccattaaattatatgtcagatttgtgtataatcattacagataaaaataaaatgcacttgttattcatctcaaacaaataaaaacaatggttaactattttccttttatttcttttttttt

SEQ ID NO: 298133 - DNA, 2934 bp, Cannabis indica
tgtaaaaatttcttaaaaaaattgaagaaaaaaaatcatttctcaaacttatacttttgacaaattattatatatcttcaacaaacacaatgataacacacattgagaaacacaatcatagtttattttgtacgaatttaatttttttaaatagataccttaattttatatagtattatttctaaatgaatgaggagagttaagatataatgtttattattatgtgtgagagtgtgtatgccaataatatatatggaaataaacaattaattagaagtgactgaaaagaggaaaaacaattgtagccaatagaaccaccatttgacgaagcatacaaagttaatttccatctagtgaaagacaaccacgtgatgaagaagctatgcctactgcgccattgtaaacagtcattcttttacaatttgggtacagaacagaaattccatatgctactacagaaatctgatatatcagttagcgacaagtgtctaggtacaaggtttcagttgacaatgaatgagcaggtaggtatcattataaactaaatgtatacagctaagttctatgggtacctgatgagtgcgaccagtttctaatctccactcaaccaatgcagagccaccaccagctagtatttcaattactttatacctgcaaatgttcaatcagctctgaaaaatgtaacataacctgaaaatatttgacatccacaaatgacatctgagtagcacactttttttaatgaagtatgtggataacataaaatcttctgaaattgttaaatgaattcctgaatgaaaatacattcatttaatacatacaatacccactacccaggataaacaaacactttataatacaccaagaaaataatagaatgatggagaacataaatcacctactagcagcatgccgagcctgtttactattacttgctcctggtattgcagccattcgaattctgttatttgaatcacgaccaattggaacctcaatgcgtccagaaagttgggagggaactccagatgtaagactaatgtatactctctggatagtgtgtagcttgaattgatcagataaatgcgcatgagagtgttcgtcctgccatacaaagcataaagaataaaaagtaagtcacaaccgcaaaagttcatggcaggtttcacttaaaacaataggcatccatgacttggtttgctgaatcatcacctttgcaactacaagcaaaccactagtgcctttgtccaatctatgcacaattccaggacggaccgatgcttcagatgtggcgtgatccccagaggtgtttttaagctcatcatcatcatcagatagaaattcctggtttgaatattcaactattggaagcgagcaatgatgaagaattccattcactagtgtgcctgtaggattgcccggtgctggatgaacaacctaaaccataatgcagaaacgttattcaaaacttttattcacctaaaagtatatgagtttacgaaatttaatcaaatttgttagaaaaatgtaggttatgacaaaatcatttgattattttagctaattgaagcaaaccaaaattcagtttttgggtacatttttttaattctcaaatgatatattatatagagctatatcataacagaatttaaaacttctgtctccgagattaagaaaaggaaaatatagtacgaacttacaaaataaattttaaacccgcaaaaaattcttggcattttttttccctccaatcacacaaacctaggaattactatatgatctaaacattggatgagactgaacaaacttctaccatcatttatttttaaatccaaatatattgccatatttagtagtatatacgtaaatacacacacacatatatacatatcaaattatatatatataaagggaaatgcgtatattagaatgactgaaaactgaatactggcagaccataccatgtgtggaggtttgttaacaactagtacactatcgtcttcataaacaatatccagaggaatgttttcagcttcggccttcagaggtcgtaactcagaaatttcgcaattgatttcgtcgccagctttcacattgtaagaaacctaaaattactccggcgaacaaagaataagcgagagaaaaaaaaaaagaagtgaatctcaacaaaagagcggagttaccttatcgacgacctgtccattaaccctaacaagccccaaccggatactagactggacacgagctctacttattccgctaacgcgtgaagagatccaggaatcgagcctaactttaacagaatcgatcggcaccgtctcctccaatcgcacaccggagaaattagagagaactccggcaaaagcgtcgtcgctggcgtgggatagtgaaggagcggaaaagctggaaaggagcctgagggtgatcggaaacctagaagcagagagagaagaagaagaagggaatgtgggtttaggagtagggaagatagaaaggagagaaggagaaatgagaaaaggttttgcagaagaagtaaaagcagtgagccactgcattttaacagatttaatttaaagagggaagttatttatcaacaaatcattctctcttttatattcgaaggaagatcactgcttgtgtaaagcctcatccatcttctcataccattctttaaaatgttaaaatttaaaaatataatatttcattttatcacttttctacattagctcaaatttttgcacatgtaaactattaaatttaaaatatcatcccattaactcaccttaaacgattgatttatgtgtacactattatacacataacacgtttatattagtacacttaatattattattttaaaattattttcaaaattcatttgaaaattaaataaaataataaaataaaaataattataaattttaaaataatttatat

SEQ ID NO: 298134 - DNA, 1763 bp, Cannabis indica
aatattttttgcaattattcttttctcaaaggactaaattgataattaaagaataacacaagaccatttacagtaataaattaattatgagaaaaaataaaacaaacccaaaagaagaaaacagtaataacagctttcttctccacattataactaactcactttctctctctacaccactctctctctctctctctcttctgtatcaaaatgcagagaagattacggcaagtatgcacggccgtgaaagaacacagcgtagtcaactacgccaagatagccaccattggaggcttctccaacgtagacaatctcatagtaagagccacacacccaaacgatatgccctttacaagaaaaacacgttcaccaacttctcaaactcttctccatctccggtcattcctccattagagctttctctctcagcttcacccgtcgatttggccgtacccattgctggagagtggctttaaaatgtctcatccttctccaccgtctcctccgctctgttcctcacaacagtccctttcgatctgaactgttgtggatccgaaccaacggtttaatctcattatacccatgtcggttttcggatgattcttcgatttcttcgccggattattataccctttttgttagatcttatgcccatttgattgatgaagctttgaattgctctgattttgaattggaagaagataaaaaacagagctttattgacgaagaagaagaagaaatggggttagctgagaaaatgaaggaaatgggtagaaagcttgagattcttcctcaattacagagcttaatggatcgagtaatggagtgtcgtccgaatggttcggcggcgagaagcttcgttgttaaatcggcgatgaagtatataatcagagacagtttcttttgttacgatacttttagaaaagaaatcgttgtggttttggataatatgtttcgaatgccgtattcgagttgtacggaagcttttgggatttacaagaaagcttctcaacagtttgaggagctcggtgaattttacgagaggtgtaaggagttagggttttgtggatattatgagtaccctttgattgagagaataccatttttgcagattcaagctttggagagttttctcaacggaatgtggcagtttaccgatgattcttcgtcttatgggtcgtcgccgttgccggagacggaggtcgtttcgtctgagaaagatgagaatgagaatgagagtggaaaaggtggtgatgtgaagagaattattgtggatgatttggaaccgttgattaagtttgatgatgatgatgatgttgttgttgatgatggacacgtgtgttgggagaagttattggaggaatcggttgttttgtcatcaaataatgctaatcaaaatcttttattattagatgataataataataataataataattatatgatgatgatgatgaataataatattcaagtgtataatccaagaagaggtaatccttttgatcaacaacatctcatcatgcaagatcaacaacggggtttcaatttctcttcttcttttaataacttttcttcaacttcaaaataattgatgataataaaagaaagtgtatggtttgtgataaaaggaaataaaagagtgaaattaagtttgagaaatgttgctacaattcattgttgtaaagatttctttcttattttgttttgttgatttcttattttgatgatggtaatagtaatgtaataaaataagaattgtaata

SEQ ID NO: 298135 - DNA, 2085 bp, Cannabis indica
agaaaggaagaaacaagcaaagaaaagtgaacagagtgtcaaagtatgaaaattatgaagaccaaatccatcaatatgaatgcaatagccatacaataccacaaagggttcttggactagatttccagaatgacatacccatacaagtcaaagaaagtaattgattaagaagatgacttcataattagtaaattaatagcataaacaaagctagtggactcttttattttctgtatcattgaagagatcaactccaaaaaaatacatataactatatatacatgtatatgtaaataagcaagttgattccaaccatgaaaaacagtgctagtggcagttacacacccttaccaacgtatgcatcatctccttattacataggtttggatatttatatatgtatatatgcacaggaagttactcatttgagtattaaaacagacaagaaattgaacacacgaaattgcatagaaaaattcatgttccctaaatctaaactcaaagatataaaactgacccatatggtactccgatgtttaaaaaaaaaatcaataatacttctaaatccaaattgaagcagaaatctatttgaaaacagaatctagaaagacctgtgaattgaatattaattcagcaaaataaaccataccaagaagatgatgctcgaggtcttcagagtcaccaagagaaagcgcataaacccagccccaagatgcctgtgttgtggagcagtagagagataaacgaccccgccgggtcctctactgctgcaaactcgtcttcgcaccgcctcgttgcagtcgcgtggaagaaggagacgatgcagcttacgaaaaccaaagaaaaggaaggagctgggaaggtgagatggagagacaaacgatataggcttttggttctgagcttgggccccatttctttttcttcttaataaaacaatttctacttaactaaaaaaaaaaaaaaaaaaaaaaaaaaatatatggcaagttctcttaaaattttattttaaatgattgtaaaatacaaattaatatactaaaaaaaaaaatacaaattaataaaaataattgtgataaaaaaaaaccataataaaataatgtgtccagtgtgggttttttttttcctttaaaaaaaattatatataaaaaaattattttaatttgacttccgaaatgtttaatatgattccattttcaaaagaaaaaaaaaattaatatatttattttttgtttgaaataaataaaagtaattttaaaatagtttaataaagacaaggaaaattttcaagagaaaactatgctgtgagatcttttttaaaatttattttcatatatactgaatctaatttaattcggtaaaaatagcgatttttttttaattctttttgacacgtgtacacggtaattattttgagagtggtttgagtgttaaacacgatttcatttttctattatgctatcagtccatcacttccattttcttttattttttgtttatattcttattttagttttatttttttctcattttaattgttcagcaaatttttagagtttgaaatgctcttctagaattttctctgagtgtgcatttttagttcgtatatggtgcatacaaggagttaattgtctccatcaccggaggtctctggttcaaagaaaaaactagaaaaaatagaggagattgcttcgaaaaaagtgactggatctggtgtgaaggttgttgattctgataaggattagaaaaataagaaggcatgcatttctaataggagtggtgtatctgaggcttctcctaatgatcggtgctctaagaagttaaagagtgttgttgaagatgatgataattttaatttagaatgtgatgaagtccctattgtgttgccaaaaaattgaaggttagtatcttttgtttgtttatactgaatcatatatattttgtttgatttttgttaatctagttgaacatttatatatatatatatatatttatatttttacagagttgtttggtgtactaagttgtttgtatattattttttttatttattttcttagagatctatgtatagttttctagtga

SEQ ID NO: 298136 - DNA, 5734 bp, Cannabis indica
atatatattaaaaattattatataataaaaatattaaaacctaacctaataaaaattattatattataaatattattatataatacacaatatattatttaatttttttgttagttatttttttttctattagttgtaattttataactacttgtatttgttttgtattatttattatcacgattgtttttattcttattttattacttagaaattgttttaattatttaaataaattagctactattacaatggtaagaatagtatgtttatgaagtaattaaagtattaaaacttaaaaaaaaaaaaaaatacttaatttttacatatttttcttcatatttttaattaagttattattgaaatttaaatgtgtaattaaatatctaattaaaaaatcgatccaatctaattagtaattggattgaattttaaactctaattgaattgtatcggatgataattttccaaattcaattactaattaaattagatcggataaaaaaaaaattatattgtatcggatacccacccctaattctaaataggtttttctgtggcacaatacaagcgctaccttttttgaatctaaactggctatgtatttgatgacattcataatccatacaagatactctagaattttcatccaccagttggtgaaacaagaacaatggaattatcccagaaaataactttcaataattcattgggaatcgtaaattatttctcaaacattagacaatctaagattttaaatccaagttttactcaaacgagaatcagctaaatgaagactcaatcacgctcgcttatagctgtcaggtgttcgtcaatttcctctgtggacaacactctaaataccggattgtcctgcttcacaactccaacctacatttttaatcgtcacaatcaattcaaactttatttccatcaaaagtcaaaagcatagatcccgaatgttattttgaacccctcaaaaaaataaactcccaaaattgaattgccctcgcgaagatagattaacagtgtaaaacaacagtgttggacaccatgagaataaaaacacgaaaagcagacagaacatcgaagaaatgcaaacaaggactagaatttttcatgtcaaatatactaaccgcagtattgactattggaataacagaagacagtattatgaaaaaaggtgcaaaagttggttagtgattaaatattccaaggtaatctcagcaatgttcggaatttagactatattgccttgacgtcaagcttatacacagaagatttcaattatatatgagacttccaagttcatcactaccatatcaagccaatataaaatctaaatggaaattttgatgagaaaacattgaatgaaaaatcaaaagttgcaagcaatatttagtttcaacttagctgctgtaatccatcataatgcatttcaagttaccaatcccgtcacaataaaacaatgaaatatttagcaaaatgaactttactacctcaatctcggtggccttgaaatcctcctgaagaactgattgcagggcagaaattgcagtctacaaaatttcagtagttagaaacaatacaattctacaaaataataagaacaagctaaatttttcaacaaacttcataatcaaagttgcactgccctccattcaaaaacaaaaagttgctaaatgccctacagaaaacactacgtctaccatggactgagcagtttggaaaagaataaagaattcacaactttttataaccaacattgcgctatagtcctaaaattagaatctaaatatctccattgtgaaattttttaatagcaataatagctgaaatggtcagcatgtgttttgctcccacaaagtaaatgttaggccaagaattattatacacatgtagagttaggctaggaccaatgtttaaaattgcaaatttaagcctcaaggcgttttgcttttgttaggcgaggcgtaaggcttgaggcgtatacctcaattatttaataaaaataatattttagagtaactaaaaatatcaaagataaataatgtcttagtcatggctaggttggttctgttctaacatctaaccctataatagaaagagaaaattacactctacccacttttcatttcgtattttaatttttacctttattttgttattttttaatttatacccaattttataggtcatatccccgttatgtgcattacgaactctaattttgataagttatgcgaggttatattgatactttgattataagagagggtatttaacaattaaaattatttgagttataattgattaatgtgtaacaaaaaaaggtagttttcaacttatcccgaatagaaaagtgttgttttttccttttaaattatgcatgtttagctgggcttttttataaaattgtttgttcgagttttatgggataagttgaggaatacctcttttttatattcattaatcaaaaatacccttatattatattttattaaaatatacccacttttatgaatgagttacataatatacactcactctctacttaagtctagcatataatttacattaaactaagtgttctaatgggaaaatcatctataaaagtggatatatcttaaaaatgaaagtaaaaaattaaaacaagtaaaatgggtatacaatgtgattactacgagttttattgggtttgtttattttattttattgtgttttattgggccttttttaaaattaaatgttattgggcttttttttaagttgctgaatgaaaatgggcttaaaaaaaccctaaaatttggttttccatttgaggcctgtgcctcactgtttttaccgcctcacttccgaccgcctcggctgagacgtacgcctctcttctccatgctgaggcgcacgcaatagtgtgtattttttttcgcctcaaggcacacaataaaagcgcaattttaaaaattggctaggaccccaatgttagaaaagttaattatacacaaagtaataatttgaagccaaaacaatccataatgcaaagtccaaatcataattatcatataatatctacctgcacggtttcctcataggtaaatgcaggatcattcttcattttcttctccaagaagttgatagcctcttgttctttcaatccagaacttgtggcctaaagtacaaagtaatgaaattccaataataagaattataaatatttgacaacgcacacataaaaagggaatgacttaacaaaacagtgaaaggaacaagtgatgaaaacttatgacagtgtaccttgtgaccgaagaaatgaccagctgggtcacatttgtacagactaggtccaagttcatagtcaatacccaaaaccattgcaacttcccaaatcaagcagaaataaataaacaaaaaagataaaaaaaaatcagtcccaataacatatgtatcactaaatctaataaccatttactcttttcaatctattaaataataagaaatatttagtactaacttagatgacgaactaacctactccaaggggtctcatgtaagcatgctgagtatatacttgtgatttgtctgcaatcctgttcataaaaaaccatagaacacacaaggcaggaattataagctaaggtacaagcatacaacaagaacatctttaattcccctttcagatggcagttgaacaaagaattctagatcacaaatacactccagttaagataaataaataacatctagcaagccccttttggagtgtatcattctagatatcagctcaggggaagaaaaaaaactagtataatatcataccatagtagagtcgtaaaaaggaattaccatttggccaatacatcaaccggcatttcataaccatatctgaagcgaaattcagctgcttcatttcttgcttgtgacaccaaggttcttgcatcagctaaatcaaagtaacaaaagaaagtataccaaattaccatgtgcatttaggggaagaaatagcaacactattatcatgataaagcttaagaagatgccaccatttcgtataggaataacaaattttcaacaaaaaacacaacattcaaatccatcttttcagaaaggatagaagaagaaacctgtcatgccagttgctagtaagccaaggaactttgtaatagggaaaagatgtgtaacacttgtctgatccaaaagtttgtcctgcgggaaatttcaaaacatatataacacttgaaactcaagcttaagcttataataacttctgccctgccaccaccgcaaatacaaacaaccataacagcgagaatgcagcgcaatacttacagggaccttcttctgagtgacaacacaaactgaatccttgccgcagacacctattgacgtgattcccgcagccttaacagccttgaaagcatattctacaaatttattttgaaataagatgaacgttgtaaaggctactgcatatatgctagagtaattacgaacaaataattcattaacatcattaaaatcaccaagattcaccgaatacagtgtagatgtttcttatttaatcattctttttgcaaaagcaatgagaagaaatttaataattaattagtttcaaaacaataatctctagcttaggaaaaagatacgattgattccttaactccaaaataagaaaagaataaataagcgggtcctgtgaactgttgttaagcaaaatgacaaggatattcaagctggtaattttctctgtttcgaaatgacactaatacaagaagaacccaacaacaacactaagtcactgacctaatgactttgagggtagcattgacggaagaatataacccattcacctattagagactaaatattaaacttcggaatgcgatcttgtaaatcccttctctttaaacaggcaaaaataggtcaaacccctcgaatcttctgttaatctaagagttcttaggtaaaaacaaaaaatgcagcaagtgcatattgctaggtttcagaatcagtttctccgaaaattcccaaagaaaaagtatttaaaaaaccctacttctcagatacagtggtgattcaaagaacaaaaaatagaggtataaagaaatgaaatgaaagaagcacataccgacttgaaagagacgaccctcaggtgagaaaatcgtaatatgacggtcgtagccacctccgctgcctcgactcatgactgaaaggcctggatttcgtcttctcctgaatagtgagatgtgagatgtgagaaatgctctactaggtgttcttggctttgctattggaaaagtgcgatgtgtgagaagctaaaagagaagacagtacaattattcaattgaagaagcttttcttccaagaaaatacacaagatcttgtgtagaattcctcccaacacggcctgtataaatttatatgtcgtccagtccagtcaccagtgacagcccctatttcctatatacggcccaaaggcacattacaatcgtgtcaggcccgtctcgagaacattttactaaagggctaaaaacgtttttatatgattatttcaaaagtacccaaaaataaccaaaaaaattacggaatcatagagcttgtttggctgtgttttcagttttcagtttttaaaattgtgtttttaaaagtgagaatagaaaatagttttctgtcattttaaaaatttaatggtgtttggcacaaacttttaaaaactgtttttagattttttttctta

SEQ ID NO: 298137 - DNA, 4744 bp, Cannabis indica
gatatacgtatatatggtatttttgtttttttcggtaagtgtaagattaaaaatttggtatattagtaaaaattgccatttaataaatgatgttttaatgtgatcaaatctatatataaaacaagttagttagataggaaaagaaaagactaggtagtatttatttattgacgtgaaaattggggataggctatttttgggtgtggtgctatgctataattaaatcattttcagtcttgtataaacttatagtcactataaactaaaataaaagcattgttattattggtgcatatcacccaccaccaggagctttgcgaatgattagcatattactcttataattatttgaaagtgttcatctcctaatcactcttacaaaattgcttagtaatatagcttcattgagtttccattagtccttgcatctttttccaccattgcttctcgcgttgctacgacacgaaaaaacacattatagcgaagaagtttcgttgcaaaggagaaacaattcttattcttgataaagaattatctaaattaaagaagtactaaaaacaacaaacaaagttgcattataagaattattatcgtcgatttatgaagagtagggtgattatgtaataagcatgacattacattacataaacgacaatgaacgaaaacatttagttatagaactaattttaatgaagaacgactcataaatcatgtcaatttatgaagagtattagccgaacacgaaaatacatttcaaactcattataaagaatgactaaggtataagaagaactacataaaataacaaaccaaatctattatgatcaaaagtgcggtgacaattttttttcatatattacaaagagcgtttaagttcaactttagcgtcgtactaacataaatttcaatgtatgacatgacaagctaacgacaatgagttatctattataacattcgccgaacgacgacaattgttcattatgaccaacgctgtatgtagcaaatattttcattaatttgacaccattacggatgttttgcaaaataaatgaaaaaaacaaagtacatctcgattgaaataattagctcgattgatttggcttaattaacacaatatggctcttatgaattaaataatattttatggtttttctttcttttttttttaaaaaaaaaaaaaaaaacaacaacaacaacgacaaagtttttttagctcaatcgctttgatttttccttatcagtttttaactttcatcttccataaatttagtccgctatatagtagagattaaggccactcacatcaatatcaaaactctacattaaattttttacattagatcatccatcagtccttttataatttctttaactaaacaatatatttttattagttaaagtaaagcatatatgaagaataattaaaaagtagttagtggaagagagaaagtatgaagacattttatgttatacatgtctttgatgcatctgattgaatgtatctttttatgcctctcttaaggttttgatgcatcagatgggagtggcctaagatgagcaataaaaaaggggtttgggtacctaaatgtatattatgatacactgaagtaaccgttccgtaacaataaggaccctaagatcaaaatatttgtaaatatgactaaaatacttttaattataataagagttataccattttaaacactatacttttagtatataaccttacacaatttttgcaattctatgttgtaacaaagtatcatttaaatataaatttttaataattaattttttttgaatggaacatgtgatattattaaccaacaaaatctattttcaaacaatgtaacaactcagtaggaacacactctacagcgcaacaacaatcaaggaataatatagaagctcatgcaaaactctgagctaccacattagctgatcgatttacaaatagaacagaaatattttgcaactcaatagagagttgtttacaatgagaaataatttgaccaaacaatataattatttgaactgaactacgaagagcttaaatcacggttaagcagtcgatttcaatgaccacttcttgccaggcgtgttctttgggccagctcaaggcttcacggacactaatcgcttcagccagtttaggagttgtagccccaaaaagtaatcaattcggtcttctacaaaatatccatggtggtcttgtgctactaatccaataccataactgcttcaacctttaaatataccagcgtccacattgatcttgatactattttcatttggagtggaccattgctcaacaccatcactcatctgcaaatcagaccatgacgactcaataagagagttgttagcacttgtccattaatcaagataatcttttgctaatactacaatatcatccactcccaccaccttcttatgccaaacaaggtcgttcctggcactccaaattgcctagcagagtgtcgatagtaagagcttgttgtccgatctacaccaaaaaaaccagaatgcacccgtccaaaaaagaacaaccctctggaactgatgtgccaatatccacctgattccaaacttgtttaacacccggacatgtcactaaagcatgcataatggtctcttcttccaacctacaaacaaggcaaatagagctaacattgactctcttcgtttgcaagcgacataaagttggaagacaattacttcttgcatgccaaacagtgttcttaaccttgggaggtacatttaagtgccaaaataaagttcaaaatttagaagcatcaatttcaatatttttccatttgccatgaacattttggaatagtttgtaggtgctttttaccgagtataagcctgaagttgcataataccaagtcaaactatattcgggaaaagaaggaagctaaagtgtgcttctaataagctctatgtctctggctacaaacatatcctccaaaagctccacatcccaacccccaccatttattctcatcagattgtgtgcagtagcgctcatcaaatttgggtgcaaggaaatgataaatggattgttattacaaggcagccaagggtcatgaactactttaatatcacgaccattccccacataccagcgaatgctcttgcaaactagttgttgtgcttcccaaacgctgcgccacacaatactaggattgtttcttagtgaagagttgaggtaagaaacattgggaaagtaccttgccttaaaatacttttaccaccaaagagtcggtcgagaaatcaagcaccaaccttatttttctaataaagccaaattaaaattctaaaggtgacgaaaacccattccaccctttgttttatgaactcaaagtggatttcaagattgccagtgaattcctttctcagtattaccagaggattgccatcaaaacttagacatcaccctctccatatcacgagtaatgtctaaaggaagtaaaacaaacttatcgcataacttggaagggattgagagactatcttaatgagaacttccttccctactcgagagaaaaactacgattcccactcttgaatatgttttcaagctctttcctttagaaatcccagcactgccgacttgttcctagacatagtactcggcaagcctaagtacaaaatgttatctcccgcaattgtcatgccaagcaaattactgatgctgttacgagttgccaaggtcgtgttcgtactgaaaaaaatggaggacttagagagattaactttctgatcagaagctgcttcaaatttgcccaaatcttcttgaattcgtgtagcttccgataaggttaccttgcaacaaaggtagctatcatcagcaaatagcatgtaggatattcgaggagccccattagcgaacttacagccatgtaaaaggcctcatttttcaaaacgacaaattaaagcggaaaggccttttgtgcacaaaatgaagaggtacggggagaggggtccccttgtcttataccccgaaaaggtagaattggtcccatctcacgatctccatgaaccaccgtagaacgggtagaagacacatacttcaacagtaaatggatccaccagatctcaaatcctaacttacggagcatagcctctaagaaattctactttattctgttgtaagctttacacatgtctagctttaaagttataaaaccctcttttccttccctcttcctcttcaagtaatgaagcaattcaaaagaaatgagaacattatcgaagatgaggagttcatacggttcaccaaaactttcattattactttgtacaataaaagttttatttttgttaagtcattcattcaactataaattgaaaagtagttttgttatatttgaaaatattttgatcaaaaatggatttttgttcctaattttaacttcttcttgttcttcttattttctttttttgaaaaataaagtgaggtccaaaataaaattttaaaaagggcgaagatgcaaaatgaccttaaatctaacaataaagttaatgaatgtccatttttaaaaaaaattaacaaaatgtccattctgttaaaagtttgataatgaaattacaataataaccttgaataattaagtatttggtatagttattttgcacaataggatatcgtttttatgtgcaataatatattaaaaaaaaactagaaaggtagtatatatatatatatatttttgaaataactgaaaggtagtatattagt

SEQ ID NO: 298138 - DNA, 2894 bp, Cannabis indica
gttcatgaagtcttctttgcacctccattttgcatcctgttacatatatatcaaccatttaaaaaaaaaaaaaataatcaattaaaggaaattaataaattttttacacacgtactcattcatactgcggcttatcatggcagaagaagatgcggtatttctctgaagttcaagagctgaagctgtgtaaaagaaagaagaagattatatttaatattatgaaattaattagttaattagtagagatcttaattaatatacaaataaactttcattgattttaagaaccctagaaaagaagagtcacctctcataccatccttaatcgaatgatcattgaattccttgtgaggctgctttccaagcctgaatttctatatatatattcaggttgaacaatacaacacaataaatcaattacaaattggaaaaaaaacaacagcatataatttaataattagtgcaactactatatctataaatatatatatatataaagataaattatataattgaaacctgaaggtggctcttgagatggtaaagagtaagacccttaacacccataactctcatgatcgtctttggtgttgcctctgaaaatattaattaaaaatattgttatatatatgtaaatataattatagtgaaaatggaaatgaattagtgtggtagtaatagtagtatagtactatctggtcctccaagctgagtaacggcatcgacgaagcgttcatgaagctcaacagtccaacgaagacgaggcttggggtctgttgttaggacaagaccagagtcaccttgaacacacataggtctttcatggctatgagcatgggcattcatagttgatggcttcttgtgttgttggaacataataatatttattctctctctctttcttctctttgggggagagaggaatacgtaccaacagattcaagaacaaatgcgatatgcaaataggaaagaatagggtgcgttttttaagagagagaacacctatagcggtgttaatcagctttagctcctttccgggatagaataatagaattaggtaccagtggtgcctagcaccttctagacatattgtgttgtaattcgctagccatatggcccgtatatcctaaaagctattatattaaactatatggaaatcgatacttaattaaatcaataacgatattgacacataaaagggtgttagacaatactgatactctttagcatttctctatttttaacctctcctcattacacaataaagacaattatatttctttaattttattttagttaaaaaaaaaaagaaaatttataaagaattatatactaccctattctaatgtgtatggagacccttcctttgcataaagatactctctctctctcttaatataatatatatatacacatgtatctatacattatgagagagaggatcttataaggttgtatatataaagagtatattatacggttagagtagtgtatatatattttgctataaggaaaagaagaggacatatatctttatagaaacagtagttttattcttctagcatgtgaagcttttggcattacacaaggatatgagtgagaccctcccttaagcaatgatgatgggtaatactttatcttctttttttgaaccacaaataaatatgcatagaagattattaaaagatagctgcttagcatttttttaatctcgtactgttgttagtataattaagagtgttggctctcatataatttaaaaactataatttttaagcaatatcgctaactaattattagacgctacctatatgaaaagtgttagacctctagtgtccaattataataatactcacatatgcatatgctatgtatactcctaaatagtcattacaaatattatatatataatttatgttatttattgtttatgctaacaagatccattataaaaatatatgttgtatatattttggtccctcgttagtttcgtagtacgactctctttttagtgtaattattatgagacctaaccaatcaaccatcatgttttagaaaacaaagacacacaccctttatatcattaccaacaaaaaggttcaaatgatttatatgtattaatatttatatttatatataggtgacaaacaaattatttctataattaaaggtttgctatctaggcaaatatatataggacaatataaatatatatttatattgtgttgcattggcacgtatatttttatttataattaattcagatgcttcaatatgttgtagggaaaaattatctttctacctatactaataactcaaaatatccaatgttaattttgacattttatcctcacccaagagaaacaaacaacaaaacaccaaaataaaatgacactgcgttttaggtcacatatacacaaaacatagaactctcgagaaaaccctcagaatcggaatcaaacacccaaacttagatctaggaaaatctaaaccctagcaaaccaagttctaactcgaactcctctgatctaccctagatctaagtacatagatcacaaacacacaccaaaaatcaaaatcaatggaaagactaaagaataaatacaaacagaggaaattgacacattgattgatctgatctcggagttcaccccaattaagggttacatcttcgtcaagctcgccttaaagaaagcttgattctccactataaacattggtgaaaacatccagttatattcgaatgtttccagtcacaaagatttgatttggtaaatatctcaatctccctctcttattctgtgttatttcttttcttctgtacaacacagtcgatcctgcaatttcatttaaaaaaaaaaaagtaggtacgaaataactaacaaaaatatcaa

SEQ ID NO: 298139 - DNA, 1292 bp, Cannabis indica
taaaataatttccaacagattcgtggcctcataccctcttttcactgtgtacaaaccatctgcaccacctttccacaccagaatatccacttcagaatttggaagccttgcaatacttttaattctaccccccaaactctccccaaaaacttgagagagaatatctgagttccaagtcccatcttcatttgagatgtcaacaaccgacttaagatgaggaaaccttcgtctcgcttgcttagatatcgctaagaagtcattgtactcgagccatggaatccatggttgtctccatatatctatagagtctcctctacccacaatcgacatcccattttgacacaaagtatctcttgattttaaaacacctttccaaaaggccgagtcgctaccttttgcattaatgctccaaaaggactggtttttgcaatattttttcgagagacatttaacccaaggtctatctaacttaccagccatctgccaagcgagctttgccaagagtgccttgttcatctcttctatcttcctaaaacccaatccccctgacaacataggagaacacagccgatcccaccctatcaaagccaagaaccgatccttgtctgagcctcgggtccaccaaaacttgcgaataatactatctagctcacggcaagtggaagatggtatcttgttggttgacaaagcatacaacggcatagataacgccactgattttaccaaagtcgtacgtcctgcaaaggacaggagttttgtcttccaaccttcgatccgcttaagcaccttctcttttaagaattgatattcttccctcttccttcttttgaacacaaacgggttacctaggtgtttctcatgactgttacactcctttacactcaggattctaagaatatcgcacttaagattgctgggcatatttctcgaaaagagaacacttgacttcaggagactacacttttgtccagaccaggtttcatactttttgatgcattcaagtatagtcgttgccatcttcgaattagcccgagtaaacaatattgtatcatcagcgaacattagatgactgacctccggagcaactctagagatagaaattgttggaaattattttaccaggatctagatttactaacaagtatgtttgattaacaacctaatatgaattctaaaacaatgaaaataagttgatagtataaggtaaataaaaaacaacagacacagtcaaaatctttctcacatataaagttagaaaaccttacagtgggtgcagcgaaatattatgactc

SEQ ID NO: 298140 - DNA, 4947 bp, Cannabis indica
ttgaacttaaattataaatcttatgctataaatttggcataagtggaattatattttgccttttaatattttaaatgtaaaatttttgcttaacataatttttggcacgtctgatgggacccattctccttttcattttcaactatgatgattattctttacctttaaattttgggtgctaattgtatttatcattttcaggaaaaatagtcccacaaaacacagtttactttcacaaactaccaatgacatcttttagccaaggaggaaaaaaaattgcttcctggcgacaatctctattgatcgggcacccatttcatccatggtacccaaactggtagagaatgtgaagaaacctactccagctaaaaaggctggaagaggaaaatgtgtgaaggacgtccctaagactgcgcaagccttgagaggcaaggctacaaaaggcttcaaaaagagacaagccaaagcaagggaaaggtccactacaacggttgttaaggaaagaagggagccaacaacgaatggttataccataactacctagaagggatggggccaagagtgtaccctgattggttccatcccaattttttcacctactgttgctttagtgatggttattttcacaaaggaaacggaggcagcactaacttctcaaactctgagaggtaggaaggcaacaaaagacaagaaggggaaaaaaatatcactctcactgaagtctcttgaaatgagggaatcagtaagagatgtgccaatcagacctacaattataatcattgtcaaccgtcaaggccaatagggggcatctgttgagaacaacgaataccctttattacatctaagattaggtgagggctgtaggatgccttttgccttctcaaagaaggctagaagtgacaatgtaagggttcccaaagcaaaccctaaatcgttcccaaaataacatggtgactggatgtttctctagggagatcgatcaacaagggtacttcaaatgttaatcctacatcctatacgggacttgtaacttgattaagagctcatgcaatgcgtacaatttttgttcaggaatcagggaacctctttgttcaaaaaagttcaggcagggagttgcatatctgaacattctctagaatacactccttttgctgtcagctgatctcattactcagctctaagcactaactattggcaataataaaattatgctagtattagtaactaaagcaattagtaataaagagaagatccaggaactttaaagattattggccgagagggatgaagaagtagctgactctcaacacaattatcttctcaagctaacatgagataaaaggagatagagattaggcaacattcctcgtcctcaacaccacccttaggcaatatacaactgttaacatagattttcgctaacaatatctagccttttacttaataagtgcactacagaatttaataataaagataataaacactagatattttacgtagttttgtagttgaaatttacatactccacgagtccgtattattaggcatatgtatttgaatacagagtataaatctcagtataataaacaatacaatttcctctctgtttttttctatccctttccccacggattttgccccttatatgtatataggttggcagttatttttattgggactgattcatttacaactactgatgagacatggacattccaaacatttcacttattaaaacatgggataatatctaataactacccaactatctcttgccttatcctttaaacagttatgttgactaagaaggttgcatcttgtcgaatatgagttagcatccttatccgtcttaataggaaaaaatgataactatagacatgtttcatctcgcagtactctcttatttatagtgatgatgagatatgactactacatcgtgtagaatgcgagacggttgagtgtggttatttcaccatgctcatgtacgtcagtccacaatttgtaagaccttggatatcttgccttgtctatttttactactttatttatctcaaggcgaacgtatgtctcgtcaattagttaaatagttattattcttatcttgcataagatagtgagtttaaatatttctatcgaacttaattaattgaaatgagttatttaaattgcattaaatgatgcactgtcattattatattccctgagtttgttcatattccttctgtaggacatgtgttaacttctaataaatagttgaattttaggtataacaattgcccaataaaaagtgctttttaattaaaaagatttttttaaatgatcttagaggtataatcgtatttaacccttttgagttttggtggttcagaacttcgaggcatatcattgaacatttaatgctctgactgttcccattttgcacagttcccctccgttagatcaaatattctttgatcaaacggtgatcgtttattgagtataaatttgaaactaagcatcttattttgccatttttatttttcaaaccattgagcttccttgccaaaaacttctattgttccttttcaaacttgcatgccctcgttatctcttacatatttcctatgcattttagttgatttcatttcttgctccagaggccattgaaacctagttttacaaccttcaaagcttcaatcgccaagtttccatctgtccagaagtttccatcaaaacagtaagtgattactctctttcctttatagatttatctttatgtcttcataatttcttttccttagttggtttttccttatctgtattgttttgatgtttgggtaatttttattttgttcatcagaataacttctagggctagaaaattttaggttttacaattcataaatttatgggtttcacttatgctctgttattctagaaattgggatattattaatcataattatgtcctaatttttcccaaaaatcacaatctcaagattcttagaatcagtttatcctcaaatttctgccataaagtttagacctagaattaacatacctaaaatcatttttaggtaaatgatgagaaaattaaggatcaccttgtaaaaactaactaagataaaacttctagtcgctataggaaatttttgcaagagaaaatagagggtaagcatcactatttgcgagaagcagcttggcatgaaccttctaatttaactaatattcccttagtgagaccactattttttacctccaatcaaagactcctcaagatcctactgttgcatacgaacaaggatgctgagttgggtttgttgccaagggagagttcagttgcttttctcctgaaaaagtggttttagaagaaggttgtagcactagcgagccatctcaaataggtgcttggggccttgaacatataagaggcagagcagtacttcctctcaaggactatttcaaggaattttgtaactaccttggaattgctccattccagctggtatcaaattcgtacagaatattggccagtttaaaagttttatatcacattctgaagtgggagtgtatgaccccacttgaaattctttactttcattccgtgaaggcctgtcccgaaaggcagtgaggagatggaggtttttattatctcaggacccacaccaatgatcaaaggattattgtaaggctagccaacaagaatgaattcaaggatgaattctcttagacatcaggtctcggctcttattaacacaattgcatcccaaatcatacataagtattgccttttctcaaaaacttggttttgagcgttaattttgacaaatatttcttgtgttgtattgatagcggttatgaggagacctattccaactctggaaatggaaaagaggcacaggattgtccttggtctcccctttgggctgcaagccactaacttcttgtttcatgaggaaaacttgaaggcatgtgctcttctcgacagcaaacagtcttcttgagacttcaaaaatcctgaaatattcagactggcaacaagttccagttcctgccaacaaagaagacagggattacgtggctcgtaaccactatttaaagaaaataacccctcaagaggccgaagatgatgcctcccgaggtaataaatttggtacttgtggatggtctcccaccgtacttagggccgagcgtacttccttagttaaatttaaggatagtcaatacaatttttacatttgaaattgtgtagatcgcatcgctcaaaggtttgatagttggtaccccaagcatcatgttcaattaagctttaatagttcttacctcagaatcgccaaacaatatggcactaactttgataagacgagccctccagattgggacatgtctcctctaaacacctttgatctttacatgattaccaattctaaggagtttagtaattattttagttcttcatccttgtttgacgactatggtaattttcttaagtgggaaattatctctccacatttttttgtttattttgcacaagtgctgacactttatattttgtctcgcagatatggattttggaaacctcctatccacctcgggttccaaaaagggaaagaagcgaggcgttgtgtcagaaacctctttggggatgaacccaaaactgttgaagagatctagaaaaataacagccagcaaaaaacgcgcctcgacccagatggttatcgagccagaggcacctcaagtaacctcctcagtcccaactgctgcgagcactgattaataggctttaaggtatgttcatcaggttagattctcgggttcacaacctgagatggtgttctcggagccttcttaccccctgcctagttctgcaggcattaaggacttgcaagttttctcgcagtatgccacctcctgttcgtgtcattacaaatgtaacaccctaactaacttaggcgtattacgtgattt

SEQ ID NO: 298141 - DNA, 2769 bp, Cannabis indica
ttatattaatacccataatacccataatgtcttttcttttctcttttcttttaactttattatccatacttctcattcatatccacactgatagtggtctaatggaagtccgatggtagctcggtgctacttattttttatatttttgtacataaaaaaatagtaactttaggccaccattagaccaccatcaagccatattctacaattatatatgttaagctctattcattaagcctgtgagaaaagcatcgtgccaccatcaaactatcatcggactaccatcaaatcatatcctacatttataggtagcatcgagccaccattagaccaccatcggactaccactagaccttcttcttcttcaacctttaccctttttaacaataggaagacatcggaccaccatcgggcctagcaaaaaaactagttttctgctcaaaactcatatttgacaatttttcgactctaaatttaacatcaactcacatataacaaacattaatcatacaaattattcctaaaccaataaacctataaatcaaatcatacattccatcaaccctaaatcacacaaaaacacaataaaatgaaatgaaaaacttacattcattttgcggtggtcgtgattcagagatcttaggtctttggttggtagtcatcggtgggttggtggtcttcggtttgaggcacggtggttggtagtcgtgggttgctagggtcttcgtgtgggtgagaagaatagggggagagagacaaagagaatagaggactagagagagagagaagaggtgagttatgagaggggtatttttggattcaatgaaaaagttgcctatctaactaattttaatatacttaggtttagtgtaccaattttgctcaaatgcataaaattaattcaaattttgcccaaatgaaaaagctctgtgtcaaacatacccttgctcatcatgaaattactaatattcttactaaggctctcttaaactagattcgccttattacgagacaaactgaacataacagtttgagaggggtgttaggctttgtttgtatatctgttagttcagataagttagttatatattttcggttcataacactattgtgtactgttcacctataactaattctgctagcttcttgtcctacttacctaactaaactttgtatgtatagagccttggtgctcatagttcactaatgaatatacaattgaatactttctctctctcgttttccacttctcaacaggttactactttagacaacagtgttatcaaaaattcaaacacttgcaactattcaaagttgccaaaaatttctccacctcaataagtacatacaaagtcacaaaattcaacttaataataaatataaatataaacaaactatcccattatgtaaaatcagtttattattgaatgaaagtttctgaagagtttctttccttagtcaaattctcaaattaaacatgggtacacataaacattttatttataatagagaaaatcatccatcactacaagagaaagtgatggaaaattctaatatcttttagtgcacattctcttgatgatgagttgaatctcgagcaatacgagcagacctcaaatcatgaaacaaagcattaaagtctaacatggatgatcctgcttctttgatagcactcctccccatttcagcaagactcttcactcttcttctcatttcctctgcttcttctccttccataattctactcactgcgtttctaatgcgttccctcttcacaaaatcacccaccattctcacccatttccttgctccaacctccactccaatattcagtacttgactcaccaatttctcattaaaaaactgttcggcggctacaggccacgtaaccattggcaccccagcgcagacgctttccagtattgaattccacccacaatgtgttacaaatcctccaactgcttcgtgttcgagaatcggaacttgtggtgcccatcctcttactatcaaccctctttctttcattctttcctcaaatccttctggaagccactcttcttcaaccccttctaccttttctttcttcacaacccaaatgaattgctgcccagaagcctcaagccctgttgcaatctccatcagttgttcatcgttgaaattagccacgcttccaaaactcacatagataaccgaacttggtttctttgtgtcgagccacttcatgcactcgagttggttatttgaattagacatattataatcagacaagaaaagtgggccaatttgccaagtcttaataccgctaacctttttgtaaagatcagcataagctggttcgagctcataaaagctgttgactataatcccataattcctacgctcaacctctcttatagctatatacagcttccctagttcagtactctcatcatggtgtttcataaaataaggaagtttacttgctgttaactcgatttggtctggtaaatcaggaataagaaagtgttctgaatcagaagataccttcttatatggctcatgcaaaaataaacttgcaacaacgcacatagcaaaattacaagttccattgaaaagaagtgtgggaatcccatgttagactttttatttgggcttacattaagttttattggttttattaaaacttgggttgattggatagttctttgctgtgttagcccatgttgttggtgatcaattgttaatgggcttagcatctgtgtgtaaagtctaggtgaagcagaagtgtgg

SEQ ID NO: 298142 - DNA, 4053 bp, Cannabis indica
aatatttatttattagttatcgaaaaatgtgtttaaaaaataaacaaaattgtaattaaatgtagacttatgtataaacaccatgtttatattattattgataatgtttattaattattaatctaatatatttgttatgataatatttgtgatgatatattatttttaaccaagtatgtgatgatatgttgatataatgtatttattaaaattcaaatacaaatttataaataaaacatgtatgtttattatttatttttactatatatagtttgtacataaaaattaaaaatatatttcccataattaataaaatatataataaattataaataatttttaatgcacatataatgtaattaagtactataatgtacataaattataaattctcaacacattataaatattgattccgattattattcatatattttattatatttctctattaatttattttgattttgaatcctgtgcaataaacttaccataatatttatataactaaaacacaaatggtaagactactcattttatataatcaatagagtattgttgtgattggttagcacccttacactaatagtaatataatacagagggtgttaaatacagtaccttttaacaattctaattaatattaataaataattcccccaaagatgaacataatgaagcagttaattaaaatgaattaattgattaaatggtgaaattacgaacctgccattctctaaggccctgagagctatctgggttggacttcttgacagccacagctatgccgacaccgaccttagagggtgcataggtcttttcatctagccaacctttgaaaactcttccaaagccaccttctcccaaaacggtgtcgggtcgaaagtctctagtggccttcttcagctcagccaacgtgaagagcttcaagtttggtgttatcacttttccaattgccataccttttgtcgttgtcgtttcgatattaatctcgtcgttttcatacttattactactactactacttccacccttattatttcccaatccatttttctgatcaggtgggtttaatttctttgtttctgcaacacaacacatttaaaaatcaatgaaagaaacttatatatatatatatatatatatgtatataatgataatttagcaatttatactaattaaagaacataccatgagaatttattatatgcttggtagtgcctggggtatcatgattattgacaggagtagtcccaaaacaatttcccatgatgatatattgagtattaatattaaccaactatgttatatgctatataactatatttatatatagctatatatgttctaatctggtgaagttcctggaaacaaccaagaaaaatcctaatattgagaggggtgggacttcattttattcttcttcttcttaggatatgtatatatatatatatattatatgatgatcgaagtaatattattattaattaatatagaagaaaggtcttagttatatataaataaattacaccaactactaatagccacgtatctttatttatgtgaaagggtccacacgtggagacaaattctactatatggttttgacaaattcaattcaactcactcaacttagataaagggtcaaattaaatttattcagaaaattttaaaaagataacaaggaaagaaagagagagaataattttaccttcttactttgtttactaggaagaagaaaatggtaatactaacttagtgtagtaaggaacgtgtgttagtcttgatatatatgttgtttatatttaattatttatatatatatatatgtaaaaaatgtttttttttttgtttgaggaaaattaaatattaagagcaacaagtactctaaaatgggtgaagttgaagatttatttaaagatagcatctgctattaacagattttggatacaattagacttttctggccaccaaatcatgctactttttgtagttaatgtaggtttggtcaaggcatgaacaacactattataagatctctaacaaaactaacaactttgagcatataatacaaagaccaaaaatattatccaatagtacacccaaagaagtaataacagatatattattttaattttcaacacaacacttaaacaattagattcaataataatatttattaaagtttgtctcattgtttctgcaagttgttatcaactatttctgttttgacagttattttcagttaggagttattagctgtagttatttatgtttgttgcattggttgtttgtaacggttgttaactaactcccttgtactcctttaagcttgagcacaatataaggctcactcttcttctgtcatcaattaaggaattttgtttcattctcttcttcttcctttctctgttttttcattttctttggttttttattttttgtaatatggtatcagagccacgatttgcgtgagctcttcttcgtctactgcttcctctttatagttcttgtggttcatggctcgtggtgctaatgctcggagtttgaaaaatcaaggaggccaatctcaggaagccaataaagtctctgttatggaacctaacgatcgaccaccgggggaggatcctcgaagtccttacttcatttctaatggagatcagtcagctatcaatcttgttcccaagatattgactggctgagagaattacagttcatggagaagatccatgattgtagcccttatagctagaaacaaaatcaaatttgttgatagtcgactgcctgaaccaaatgtcgatgatgagctttatgatgtttggtttcgatgtaacagtcttgttatatcatagattttacatgccatttccagtgagatagctgatagtgtgatgtatatcttgacaatgctgccaagatctggactgagctgcaagaacgataatatcagaaaaatgctccaagggtttttgaagctaaaaggtctatgcaggcactggttcaaggatcaaattctgtcaccacctactttactcgtttgaaatctttctgggatttaattcaggaattcagaccacagtcggtctatacttgtggagctatgaaggccattcaagaatatcaagatgatgatgatcgtgttcttgaatttttgattggcttaaatgagtcctatgcctatgcaagatctcagattttgatgcaagatcccttcccaaaaatcaataaagcttttgcctcagttgtccaagaagaaagaccaagaggaattgttacaaatcacagtgagggtgacaagactgctcttccaacatcctccaattcaagccaatttgcagggagtgttcagcctcataaacctaaaacaatttgtcataattgtggtgttcaagggcatatcatggctaagtgttatcgattgcatgggtatccaccagggcacaagttgcatggtaaattccccaacaaaaatgcacttgggacaaataaggctcctactacaaatttctctgatgttcagaaaaatggtgaaaacagtggaggtggcgagagtattgaacaagattttgtggccacttttgctcagtgtcagagattgatgagcttgttatctcagaaagggcaagagcaacaagggaatgaacaagcaaatcagcctactgtgtcacaacttctggtatgaacattaccaaaaattcttttacttggattcttgacactagtgctactcaccatgtgtgtcacaacttgtctcttttccaaaatacctattctaattctaggatttcatgtgttaatctaccttatggaaatactgtgagattttttttttcttggaaccattgtcctttcctctgatttaattctcaaagatgttctatatgtgcctgatttccatcttaacttgctgtctattacttctctacttgaatctagagattgtatctttactttttaccctaatcattgtgttattcaggatactttgaagacacaatagattgggatggcgaagggacatggaaaattgttctatcttgagcaacctgctaa

SEQ ID NO: 298143 - DNA, 1611 bp, Cannabis indica
aatattatatatattaatttattttctcttttggagagagcctagctgagtattattagccataaattgcggtttcatgcaggtgggtttaattttttttttcttcacaatttaattttaaactattgctttttcatgccctagtaataaataaataataatataatataattttttttgacatattttgcatattagtgagtgttgtaataggtttgttttgttgctataaataaactatatattgtgccaatattagatccatcacttgtaatttattaattacttgatatatatactacatataagaatcaatttatattattagtgttagaattgttaggagatgtattgaaaagtttaaaattaattaaatcattaattagaatattaaagctgagaatatgtttgtgtgtaaattgttgaaaatatttagttaggatgaatggaagattttatggaaattttgttgggaagaaacaaggagatctaatgtctccactattgtttgttcttattatggagtatttgactagacgacttaagatggagacttaagaaaaaactttcaaataccattttatgtacaagagccctaatcatactagtctctgttgttttgcagatgacttaattctcttttgtaaagatactacacgagtttccaacgcctaaaaatgtacttgaagagttcagtacgctacaagacttgttgcaaataaggccgaattccaaatatttttttggaggaaattcttgaaaaattaaatattttcagaatatttaatttgaggaggggagttttactttaaagtatttgggaattccattgagaccaactaataggcgtatggatcagctatcattagaaaagtaagcttagacttctcactcgggatacaagaaatttgtcttttacagagagagtgtagttcatccattctgtatagcttgatcataggaattattggatgaatatattcatcttacctcagaatgtaattaataaagaagttgagaaattatgttgagggttcttatggggacatagtggtatcatgagcagttgcttcttgggagaaattagtttgcttaccaaaggcttatggaggattaggttttaaaaatagtttttattggaatcgtgctattcttgccaagtatgtttgggctttagtggagaagcatgacatgctttgagttaaatgggtcaactctgtatatttgaagagcatgggaaaattacaactgatgtacagaattaaatcaactaaaacttaatcaataaataattagcaatgacaagattaacaaatagcacaacaataatcaaagattgaatagagatgaatagagtatctaaaccagaaatgattaaagcaataaaatcaacatcaagatatattctagttcaagtcctatagatcgatgaaatttatggctctactccagttctggaacaccactaaaatcctctttattgattgagcaagaacaagctacattgcagtcgagatcgattctctattgggttctctcaaagtgtttactctcacactcttacccaagaatcttcttcatttacaaaagattcttcatacaaatcccaaa

SEQ ID NO: 298144 - DNA, 3647 bp, Cannabis indica
ttccaattctcctcattctctcgtcctgaaaactacaacgccgccatggaacgtgtcagatggaatatcagctatttcaggatcaattacgccttggccgttcttataatcgtcttcctcggcctactgtggcaccctgtttccatgatcgtcttcttgatagtcttcgttgggtggttcttcctctatttcttcaacgacggtccggttgtggtgtacggttatacgatcaatgacaaaactgtgttggcacttctgagcttggtgacgattcttgctcttgtgttcactcacgtgggtttcaacttattaatgtcgttgattattggggctgtcttagttggtttacatgctgcgtttcgagtcacggaggacttgtatctcgctgatgaaagcgccgccgaaggtgggttgttatcggtcgtcggaagccaaccattgcgatcgagttatgctccaatttgaatcacttttatcggttcttatgctttcagaagtcagagtgtagaagatgataattcaatccaaattccaaaaccccatcagtgaatgaaactaaatcttgtgtattgacacttcaagcttggtgatcatatttgatttgatgtattatatgatatttgttctttccagattatttcaatcaattgttgagacaggcagtgtttgaatctttgttcataacggtttgctgttcatttaagattttcgattcaatcatttgaattccattctcattctttattttctatgattgtagttgataaaatcgtacacagaaaaaatgttaagagaacgaggaaacgagactagtttagtgaatcatagatactaacacgagttgattctataatgtaaaaataaagttaatgaaattgatttcaagagctagaatgctcatccaacaccagaaagaaagaaagaaaaatgtgctaacactgaagtatgaagttaattcaactatcgatattcaatcaaaatcatggccactgtatgccaatcaaattcatatttcagaatctctttttcaaaacattacaaaaagggtaccaaatatgagaaattttactcctcctctagattgattgaatccttgaatttcccatatagaattttcttcagctcggccatctgagcaattatagattccttctcttcttcaagcttctccaaattttggctagtggcctctttcatctgctctatcctggtctccacctcgtcttttggcacatgagcaaaaacttcccctatttggaatcgaacaacatcttcatctgtaagaatcaactcattgcctgcatcctccaaattatcatttgattcctgcaaatgaacacaccattttgtaacacctcttttgaagtttgggatttttaaatatcattagaagaaacacaagtatcaggttcaactatgtcaacataacagggacatcagccagtctttttagaaatcacgcacattattcttaattaaactagatgtagatgggctagagaaaccaagactgctgcgtctggtttgctaagggaagtggccccctgttgtggtcactaggtgtgtttttgttttctaataaaaggttctacttatcaaaaaaaaaaactagatgtagatgagtttgaaaacgtttgggtatctatcaatctatgttaaagagaagtgttgttagcctgatatatattccttaattatgtgcttaggctagagctttgtttattgggagttggtgagaggagagagagcaagagatacgtgaggattgttggtatttggctgaataaataaacttatacacctgtatttggtagttaacatgttgaggaaagtgatcacaataatatacacacacacataatttttttttttagtttgctggacgctgctgtgcagagctacggattaacacatgaatgtgcagaccgcagcaccgcagtgccaagccacaggttagtaagttcagcagtgaaaattccttctcactaatgtcaccgtaacactgaggtatgggttggtgctaattttacaatcaaaacttggcgttgcaacaagactcatgctcaccacagtgccaactctgaaacattcttttttgataacaaactctgaaacattcaactcttcacaaagagagcaatatcagaaaaattgcaatcaaaggtcttcaaatttatttgcttgagaattctagagttacaatcaacacaagaactgcaactccgtctagttaaaacactcttgctaacccaacttcatgcttgtatctactaataagtttcaccagtaccgtagcttggtataaaatggtaaaggctctggctctgacatatcccaaaaactttttcattcaaacacacaagcatatgagatggtggaaatatcactttttagaaagcatttccaaacatgtttcaagccattagtgttctttgttctccataatctttcaggctaagagttagaaaagatataagaatcgacaggacttactagtgagaaatgagaatatagattcatataaaatatacctacagtcatagttgctgagccacctatttttgttttcgcttagtttaggaattggaattctcattatggactcaaattatagagataggatggctcaactgatacctagttccagtatttgcttagtgagtatacttgcgaacgagaaagattcagtaaggacgtatatatagactgtgaatcagttttcgacctaaaactttcccccaaaatagtctctccaacaactacattctttcagtacacttagtataatatgccaatctttaatttcaataaaataaaataaaataaataataataataaaaaaaaaaaataccaccagcatcgaatatactctgagccaattctacattaactctataagctgtaaaagactcaaaactacttacataggttcaaaatcttagtactaaaatatttctaatgtttaaatctctgtacttccaattccctcgaagtgtgtaacctaatcgctacaaaggcataaactttaaaatatataaagcaaaaagagaggcacccataaggctgaagatggaatcaaagacgaatatgaaacccatttcaaagaaatgcaaaatcagaaggagaaacacccacatatcataaaactcgtagcagtaatagtaccttggcgattttgatctcgtcttcaagctcgtgaagacgattattcaatcttccaaatttgttaatgttttgctggtcctcccatgttacctccatttcagatcctccactctgaccctatattttaaattataataatcataagaacatccccaaatcaaatcaaaatatttagggttttttgattttgatgtacctgttgctgttgctgctgcatattttgatccacccaatccaacccccagaactaacactcaacactcactttaactcttaaacgcaaatcaagtttcaatatttatataccataccagctcctccacccagtcggatccgggtcggttctttgtaatattaccataacaacctcggtcaactgtacttgaaagaaaaagaaaaccaaaaaccgttaactttcgctttagtataacgggcttttggggtaggtaagagcttttaaacttaaatacaggtactatac

SEQ ID NO: 298145 - DNA, 4663 bp, Cannabis indica
tccaattgtctctcttttaatttgaatgtcttttggttggtgggatctttctatttgttgcttttctttattggtttagccattaaagagttagatttgaaatgtttgttttcttctgtgaaagaaaacatgtggtgaatagaaatgtcaggattatgtgttaactgaccttgcatcttctaccctttggtgagtgccattatctaattgttaatatttggagtgaatcaataatttctggatttgattagtttttctgagttataccatgaagtttaaaagccatatatcatctatggggaaggttggattatgtttccctttccgaaacttgttaagcatttttgtggtgtattatctcctttttggctttgagtaatttcctgaaatcagttcagcatgcgaaaaagttcttcacaattgtatcttattccccctaaaatgcttattatcctttggcaggtggactcagttgagctggatcacaatggtaattgcattagggaaacatccattgagagtttaatttctccatgctctcatgatacaagcaatatatttggagatcaagtactgaatcctcgagttggtgaagattaccaagtcaatgttcctcacatgataacaaaatctgagtgtcttaagctgttggctaaccctattgatttagaaacttccaatatttcctattcttttctagtgggtttacctgtcccacttacatggttccataatgaaggtgaagggttaggatctataacaaactctgataacacagttgatgcaaacaagcctcttgaaactaaaaatggcaaaaatgaccgggcttgtgtaaggaagaaaagttcagaactcaatgttgaatcctcgggaaatggattggaacatagagaagcaaaaccagaaaaattggaccgtgtgctgaatggaaacaacagctgctatccaattccaagtttaccaactgattcttggagtaattctgaagtggatagttttatcctcggtttatatatatttggaaagaatttttttcagattaaaagattcatgggcaacaaagacatgggggaaattctttcattttactatgggaggttttataggtctgatgcatatcggagatggtcagatagccggaagattaaaagaaaaaaatgtgtaactggacgaaaaatatttactggatggaggcaacaggagttgttatctcgattgtctccgcatgtcccaggggattctcaaaattccttacttgaggtacttcataattcgtttccttttctgttttaatttctagaatgcaaatttttgttttggtaatgaaaccaagtgtgtatgtagtgataagacatttgtttccactactgatttatgcatgcattataatattttctcatgtaagtttgttttatggcctaagttgcatcacgtaatcgtgtttatgccttgtaaattattgtcgtttttctgatatattttgcagaaatttgctgtatctagcttcttattcttatgatctgtttgtagggctacaagtcatttgctgaggggagaatttcattagaagaatatgtctcctctttaaagtctagtgtcagcattcccgtacttgtggaagcagtgagaattggtaaaggtaaagaagatctcactggctttgcaatggatcctggaaagagcaatcatgatgttttagtttgtcccctcttaccaactggtcaggcttgttcatctctcacatccgatgacatagtgaattttttgactggaggttttcggctgagcaaagctcgttgcaatgatatcttttgggaagctgtttggcctcgtttgctagcaaaaggatggcactctgagcaaaccaaaaatcagggctatcttagctctaaacactatctggttttttctaatgccaggcatacagaaattctcaagaaggagacttgtgaaaggagaacactactttgactctgttagtgatgtcctgaataaagtagcatctgaaccaaaacttcttgagctagaagctgaagaatctcctgttggaggccaaaacgaccaagatgcatcagaccaggatgacccttctgattctcaacgacattgctaccttaaacccagagtttctgcttgtacctcaatccaaatgaagtttactgttgtggataccagcttgatttatggaggaaagtcatcaaatataagagaacttagacatttacctgccgaatttgaaagagccgcaaaagagactcattattcaatggaaaatgaaagggattctgagggcgatttggatgattttgagactgttgaaaagcactcccatagtgaaaacgccaaacagaacaagggtagatctgacagtgatggtccaaattgtatgaagttcactgttgttgatacgagtctcctacatggagggaaatcatcaaaagtaagagaactgagatactctccaatgttagttaaaagtacttctgagttgactgatcttttgagaaaatctgcaaccgttgaggattcatcaggcaaacaagaaaaagatgtatctgacaactcttcaaaaggtaaaacgaaaatacaaaaaaccaatctccaaaagaacttacatggtagcaaaaatcaagtgtcaaccaaaaatcactcagatactacaaataaaacggggacacaagtggatcagaactctagcatatctggtgagaagcatctgaagaagactgttttgcatcaatttaaacggagatcaaaatctggtcattcagattatgcagttcctctcatcaaaagacgaagattgactgcctgtgcaaaggcaaaggcacccgaccactctcaaaatggctccctaggcttagggccaaaacaaattgaacttcaaaggacaacaaagtcacctgaaactatcaagaatatcacttttcatgtccgccctcctcgagaaaaggaatcctctgttacctatcttgctgaaagtaatccacttgaagatgttaagtcaaaagttctgagagagaactgttttgacaagcacagctctgaaggaataagcaagaaacatctagctgaagaatcaatgaacatacacccacctcatggtggtgcgctggactccagaaaccacagtatgttaaatgaggagaatgacgaaaccaagagagtgaatacgaatggtaatttctttccttctaaagtaaaggagcttgttcctgagacagtgaaaattactaatgttagtacatctgaggagaaccctgccatgaacagaaggcagagcaagaggaatcggccattgactgctagagcattggaggctcttgccaacgggttcttaaatgttcagaggaggccaaaaagtacagacattctctcaggagaaaatcctttttcaagtccttgccgcagggcacgtagcaaagtcaaagctacttcaagtcatggtgatcctcttgctgggattgtggtgtcaggaaatgacaaaaaagtggatggagcttgtgatgagaagaaacataaacttatgattagcaaaccacttgttcaagttgaagaagaagagaagcggctccttacccattgaggattgtttgcagagaatttttcgatcatcttgaagttttgtttttgacagaattatctggtgaagtgctgaagtttcctccttgtgcctgaaattttgaatatgctgaggcaaacttgtaaaaggcatttagtgtcaagtcctttaattatgcttgatttttgacacttggaagttggagcaaaaagctagttcccaaaatgggaacagaagcaggctgtttatattaagagaataggggcatttagttatccagaaaggctaatcaatgaaaagcatagctatggaagcactgaagaatccattttttctaaggtacgggagatttgtttcaaaagtttatgctctgatcaggtttcaactgtataattatcagtggctttctgtaattaaagtgttcttatatgatgaaagtctttcctgttctcatcattccttttgtattgagtcacatttttaaagtttgtgtgatattctaatagcttttggagtaactaaaaacactatcaaagactccttccatttcatgttccatacaacataatttagcttctatttcttggctattcagccatattaaatgttttttttttgctattattatttactttgaatttgatatcttgtggagtaagtttatttgaatttatttttctctttccagagtttggcaagagaaaagaaatatagtttctacttttagaaaatatcaattttttaattctttattcatatacatgtgctatagtaatggcaagttaacttctatttacagctagtacaaactgaagaggaaaatcactgtttattctagtttctaaaaatgtcatctttaagatagaaaaattcatgtgttgcataacttaccaaaacaagaatgccattatatactcatattcttatattcttatgtataaagtttgactatgtaacaaaaatttaatttgatttaacagtttttatttttatttttcaattaacggttaaacctatcattgtaactaaaaactcaaattacaaatatatttatatatttatagggatataattttgtcccgtgatgtactttcacggaat

SEQ ID NO: 298146 - DNA, 2911 bp, Cannabis indica
atcgatagggtcacgcccgagcaggaagctcccaagaacaagaagaaaaggaaggctgcccaaggtgaccaagtatctattgagcgacctattaagatatgagatgatcctaaagaagttgctcgtccttccatccaggtggaaggaaagggaaaggatgttgtggttgaggaagaggaaaggactcttctgatgataatgctccttcattgcttgttcgcgagggtgctctcgttcacgtccaggatagacttattttatttttttacttggccatgttttccttgcttgattatgtttcctaacaaacattctttctttttatgcagatatgtcgtagagggtattacgtactcttaagaagaggtcgggttatgcctccagccaaaagtctctaaccaaatgtttgaagatggatgatactttgccaaagagcattgttctgagcaccaaagctccccaagttaccactgagaggaatcttgttgttgcccccttggacgccccaaaggtggtggtccttgacctcgttgcctttgctgagaagaatgccaagtcttaggcttctaatgctatgaccaaaggctgtaaagaggtgagcacagaagggccttggctgccaaagccattggccactccactcgtagtgcatctggagagtaagaaaggaaaggagatgctcaccttttaccaggatcaagtgctgcctgaggtaaatgatcaattggctagggcggaggacatgtctgtggagctgctaatgggtagaatgctgaaggagaccactcgagtaagtacttttctttttgtttttctatataggcttgatgccatgcatgttttaatcttgtttcattgtgcagcttaatctgaagatggcgtacacttactcccatgtgaagtttgctgctctaaaagtcaaaacaaccaccaacacattgaagatatcactagatgatgccaagaaggaggtggaagagaatacttttcaattgggcgaagcaaataaaaagattgtttcctcggagaagcttgttaaggaccttaaagaatagatcgaggatatgatgtccacagctaagctcgaggaggatttggaggcagtgagcaaagaggtatactctttgaaggaagaacgcaaaaacctccgtactctcattccaaattaagatgtcaaggtcaatgagctgactgaggagaagaagccaatgtagtagactttcaatgctgaatgggagacacttcaaaaggaagtggagagctttgacttagctgtgttggatatcttctatgtgttttagaaggcaaacctagaggccaactttgaccatctccaagacaataaggatgcttatcttgacttttatgaggcacaaaaagcctaggcagaagctaagatggatgagaacaactcttttaccttataagagaatgaaaatcttatcgctgaagactcatccaatccgtataaagatcctgggactcatgctgtttaacattttaaaacccctttttttacatgttctgtctacgagcctatttttaagtaaaatatgcctgcccaagcggcttttaaactcggaaaatattttcgttttgtttaagacaagtggctggctgggtagctttaattccttggcttatcctgctttgttatcttaatatgaatattttctcttaagtctaatttttttttcattttttcttcgagcttgttgtttaccaatgcttgtacgtgtgtatagttttccctcaagtgaccgagcagactttggactcttgggcacttgtattttacaagttttattttgtctattcatctattacgtttaggcaaatccgttgtacgcatttttaggtaattaaataagttgttatactttgcgaaaaagatataaatctgacacaattttgaatgataattaatatctttattgatttattggtcgatatgtgttattaatttattgaattataaaagttattatatgatctagctgatctttagctaattcttccgcgacagatagcttgtgccacatcagtcccgatatgttgcatagtctagcttcagtggcatacatctccagcatatcgtatgaacagaagtaattttcctttgttccattttccgaatggagtccttgaatgcatgagcgagaggcgaagtcttggccttcccttttcctttggattttttcgttaccctagacaaatagcctccgggatattctctcgagtaggccctattgaggtcctccaccaagaacctctgcctgagtttccttagtcaccatttcctctgcaggagtaacttcagggttttcttcaatttccaccactttgagatggaattcctcgtttaaatctatcactagaaaaatgacaattaaagagaagaaaggccaagtaattagacacgcaatatcaaaatgacaaaatggacattaaggaagggctctactaaaattgctcggagaggtgcctgccaaacccatcacttccaaaagcttgtctttgccaagaaactcaaagtgatagattaggaaccaagggaaaatttaccagaatgaaataaaaagtgaattctagaaattaagtccattctgagttctaagaactccgaattgacgcacaaaagatgggcagacctagtatttacccaaaatttggtcatgcctggtttaaaccctatttccaaaatcctaaacacatgtaaattctacggagtctagacagccataccttaactacccatatagtatcaacactctcatggcacaaaaaatttccacataatactatcctagaagtataattctacttgcaaagtttaccattaaaacataccagatatctcagacctagcttgaactaagtatttgttcgaaatattttaccaggatctaga

SEQ ID NO: 298147 - DNA, 3313 bp, Cannabis indica
tttaaaatatcatcatatattatatatctatgaccgtacatttataactcttccagagtatgtgtgatcttctaaattatgaacgaggcgttcctaaaatatcaatatttatctaatttatcgaatcatccatgtatgtgtatatacaacattgttcatacctgttgacccaaaaaattgatcaactaacggcggggtcgtatagatctaatgtttgccacgtgttacacaattagaacaagaaagtgaagaacatgtagaattattatagaggtttggcccctttgatagcgggtaatgacctacttcccttttacttgtattgataccaagggttaatattatccagatcactatatataggtgggatctgatatatcacccttaaggctacaaagtagaaattgaggttggcaaatctcaagtgttgagaatgctatgggcgtgtgagagagtgaggaatagagttatcagacttaggcttagaacatggagggttagatacttagttaaggcttagattctcacttaggttctctagagggctgaacccatcaaatgccattctcccaggatttttgcatcgttttgatgatctaagctttccacattcttcctcagcagtttcttgtagtgggtaagctttctattcctacgatttcacttcatttggttaattttgccatgaatgcatgaacattattatttgctttgaatatccatcgattcctacgttagattgttgtccttttagtattttgatctacttgatagccttaggatatgtaatgtgtgatttctcacattcgattttggaactttttcttattagtttgtctatccaaaagcaacactatttttggtttgtgccactccaaagctggagaaacttgtttgtgccattggttgtctggaagcaccttatttgtatattgttggagttgtgagcatgctttttggaggataaatctgcagttggtggttggtgatggaagtacatcataagcttcagcataagcatcttccaaattaataaatccttagactctagataagaagtcaaaaaagaatctactcttttccgttgatgttcttcccttagtaaagatcctacagttattcctaatgttagagccaccatctttatatcatcggtaacctttgtctttgcagcaacatccaatcatacgttgaatgtacttcttaaggctttaacttggcttttgcttgatatttgctgaagaactaacctctaggtcgaagtcgtttgttgttataaattattttttaaacattatctgcagatccttctaattacgacagataagggagataatcttttccaccagtcttccacagacttggacagagttaaagaaaaacaaaggcatttcacgtcattactttcctttgccactagcatcattcttgtgtatttggataaatggccccaaggtccgttcttccttcataaaactccattttcggcattttgaagtgcttcaacagctgtacttctatgattattttcacacatggtccgtgtcttcatctttcgagtcagacatagctccatttttcttctaggagatgcgctctgtgattttagttagctctttaatcttacatacgagatgatgggtagctgtgtcttgagactctcttccacgtattcagtcattgatgtgatttctcgagccatctccacgaggtctgcctttctcgtttctagctttttcccacttagcattcagtcatgctcggagatcgtttgttgagagacgtccactttcattatctgatattggatgaacttcttccacatcatcactctggatagtagaattcttaggataatttctatctttcttgatggaagagttttgtgcttgtgcatgagacttttccttatgcgtagttctgcctctagaatcaatctagagaccctgccctgaagcattggttgctttctttttcttatgaggttgattggcggggtttgctctcttatgccgatcactaggaggaaattttttggaggtttctcctattttttctttccctttatccttaggaggattacaggagtcaggatctttaggatttattttcccaacagtattcccttgaggatcggtataatcaggtatacttccatcaggattctgattttttcctccaaatatcccttccaacattacaaatttctccaacatcatttgagaaaattcttcttgtgctaccttatttttgttcagtttcttctagttttttggccatcctaacaactttaagatctgactcagggtgctcatctccctcattgacatcattgtcttctagatctataggatctgagtccttaaacttgtcttcttcttctccttcatcgataggatcatcatgaaggtgtttctcatcacgctaatctttccctttttggcgactggtcacctcagtgggatctttgtcgagcctagttttggtatttagataagcatcatcttggtaatgaagaccaaattttattcgagtgagtaccataattactaaacataatcttagaccactgctttttctcggctctcaatgaaagcgccaaaatatttatcgagttttttgaagaactaattattaaatatgaatgttaaagaatataatttagagagaaatatatgaagaaaacactcagagtttttacgtagttggggcattaacgagccttagtccatgagtcaatattattaagtattttgctagaaaagtttaagggattatagtaagtatgagcactttattctttccctgagcaagtatctacgaattttcaatcctttgtgtgaaggattcaatgggtatttatagtgttatagaggtcatactagttacccttttcccttaataagaagtttacaaataatacattaactttgggcttctctagtgaagcgcaatccagtcatcattctatgggtgtaagggtgccctaatggaggctcaaagtgggaaattataaaatagtatcaaacccttaactcagccgcaagtgtagtcgacgaggacgtcaaacccccaaagggggatgattgtaatagtcagagactcgtgatccgaaagggaaagaccaggagctgtacaatcccacgtcgtttagggaaggtcatatgtgataagtctgagattgtgtaggtatgggactatatagttaaataaggtttaaatggattgattggtactacctatattaacaaggtacatcttattttttggtagcctatcacgaaagaactccacggttaagcgtgcttggcct

SEQ ID NO: 298148 - DNA, 2485 bp, Cannabis indica
gttatgctgatgaaaggagagaatgtttacgttatgaatgtgggtgatagccgagctgtattggctcagaaatctgagcctgattatggcttggaagattcgacagacttggaaaggattaacgaggaaacgttacatgatcttgaatcatcagacggtgatagaccctgttcgattcccactttgactgctgttcagctctctaaggatcactccaccagtgcggatgaggtataaaagcaagacaattactatttattttgctccttttcagataatttgagaactttggttgatgttttattgggtgcattttcacaggaagttcaaagaataaaagatgaacatccagacgatccttgtgctctactgaatgaccgtgtcaaaggttcattaaaggtcactcgagcttttggtgctggtttcctcaaacaggtgcttttaactatgctctcttgttctgggacttactttctttgcgaaatctctatctatctaatcaggaaaagttgtagccattcataccaagtaattatccaattatagtttaaacacaatggttaatttagtaacactgtcatagcagcatatacacctcctcctcaatttgtgttgcaccattccattactgtaatttcgttgattttagtgcataaaagtcaagatgacgacagaatgaatacaaagaagaatgttagtatagtaacagaagtctagtcaccatagcttacatccattttgctttagcacatggaaaagttatatgtcatctgttttaaatagtttcccctacaaatttattttgtctaattgtaaatttcaactctctacagcccaagtggaacaatgcactgttagagatgttcagaatcgattacgttgggaattcgccatacatcacttgtttcccatttctctaccaccacagattaggcccaaaggacaggtttttgatattatcatctgatgggttatatcagtacttcacaaatgaagaagctgtttcagaagttgagctttttatcacattacaacctgaaggagatccagcacaacacttggttgaagaagtgttgttccgggctgcaaagaaagcaggtattaatcactatataaaaacttataattttactttacaaattattgttcattgcaggaaactaattcagtgccaaatttctgttaatctcaggtatggattttcatgaattactcgaaatacctcaaggggaccgaaggcggtaccatgatgatgtttcaataattgttatctctttagaaggaaggatatggagatcatgtgtataaacaagagacaaatcaaatcacagttactagaaatattatagaggcatccaatctaaaatagaaaaaaaaaaaatatcaggcaattggtcttcctttctttggtttttttggcctcagttttcgttttcctggtcaccattttgtaacataccaaattatgaccttcagggagagaaagcagtgcctgtgaggaacttggttgtgtgcagagttactagggatggtaaggatgacttgtatagatgtaaaagctggttcatgttgaatatataaattgtcatagaaaaaactgtaaatcttccaataaatgacaattctccttgtgaaattacaaagagaagagaaacaaaaaaaaaaaaaaaaaaaaaaagggttttagtgtatttgtataattcggcattatcactaccatcactttctatacaattcttttattcacaactatatgcggatgtcaacaacactagtcaatctcaaagcatcttccatctttactaaccttttttctttgtacaaaacaattccatattccgtttatgtgaaaaatactatgtttaggtttattcattcgcatagtaactatttcctttttcggtataaagctaggctcattgtgtggcttcacaaaaagaataactttttggccaaccacaattttctttgcaatttttattcatggtttctcttctatttgatttcccattaccctaaaacaacatcacatattgctattatgatttattataagtttttaaatgaattccgtcacattctagaatgttagcatttctcatttatttgttgagctaaaatattcaagaaatagaaggtagtgttattcaaaagattcaaatcaaacatgctgaaataaagaactatagtattaaatgagttatgagttagaatagtcacaaacttcaagcagctgtgttacttattaaatgttattataattgtgtggaattgaattacctttacgtctccattatggcattcagtatcactgtaactgaatgacgataacagatgatgaacagtgactagtggagggttcattcatgttgtgaacactgttcatgaaaatgaagccttgggaagctaaaaaaaatcagtgtagagcatggatttcaattcactgttatttatttatttatttatatttactcaactcattatt

SEQ ID NO: 298149 - DNA, 4519 bp, Cannabis indica
gtagtttagccgccaaaatttgagttttggtggttaactgtcacaaacccaaaagtttggggggtttagccgccaatatccctattcttctagcaaaaaaaatatgctatatattcttctagcaaaaaaaatatattatatatgctatatataaattgtcatgtggataccatatctaatggtgggcccgcaaagttcctcaccaccgtccatctcaaacctaaaaggacccatggacacgtgtaacccgttataaaatgccacgtgttgagagttattttgaagttactctattttaatattattataaaaataataacataaaaacaacgaaacataacgttttttaagattggccattttttgctttaacaaaaacagcgccaacgaatttggatcgaattccattcttatattaatcaccatcactgcctctttatcctcatctcttgcattcatcacctctgcgtttcaaatttcaggtattttaatttttgttttaaagaaaatcatattgattaacttaatgggtttgtggaagattctgtatttgtgtgaaagttttgaattttactgtgaaagattttcagggtttttcggtattgagattttggttaccaatgattcttccattgttgggtgcttgtttattgaatcacttgggatgggaatgtgtgtctctttatgagattttgttgtttgtttagttaattgtttggttggtgagaaactgggagaaatgaagattttggatatttaaatttgacagttgagatttcggaaagaaaaaagaagaattaaagttcattaattctattgatttcaacaacttttcgtcttaatctgtcagtaaaccttagtattattgttagtattttcataaattaagcgtctttgctttttttacttcatagccaaatattttggattgggttttactaaattatgatgttctaatagttgtgaacaaacttatgttaataacacacaccaacttaagcatcatcttcaagaattattgttatacattgggcactatgaatgttgccataatcttagttagttaaaatatattttcagattccagttggaagtaggataatcatggatcggcttcaaacatctgcccgtctcatgatagtttcagatcttgatcatacaatggtaggttgcacaagagtttgcttcaccactgtctgtttaattaagttggtgtgtttattaagtgagctatggttttattgcaggttgatcatcatgatccggagaatctttctctgcttaggtttaatgccttgtgggaagcatattatcgtcacgattcattgctagttttctcgacgggaaggtcaccaacactgtacaaacagttgaggaaggagaaacccatgataacgccagatataactataatgtctgttggaactgagataacctatggtaactcaatggtcccagatgatggctgggttgaatatctgaatcagaagtgggataagaacatagttagggaggaaacaagaaagtttcctgaacttactcttcaggtagtaattgtgtatcgttgatgataattgttctatgaatgtttggacatgttgaagtcctgggtagaatcttttagaaagaaatataatgtttattaggttaaaaaagggtcagggtataatatctcctgaatgattagatttcatgatgaatgcaggcagagacagagcaacgggcacataaggtcagtttttatgtagaaaaagataaagctcaggctgtgacgaaggctcttgcggaggctttggagaagcgtggggtaatatgtcattttaacctcaatttcgtcaaatcctcttaatgatttttacttgagcatgttaaattttcgtttggtgacgaagtatgttgatatttggtttgttatctttgaaatgttgcttcaatttttccagttggatgtcaaaataatctacagtggaggaattgatttggatatattacctcaaggtgctggcaaaggacaagctcttgcctatttacacaagaaatttacagctgaaggaaaattgcccactaatacacttgtttgtggtgattctggaaatgatgctgagctctttagcatcccagatgtacacggagtcatggtaagtacctatagtttgtttaccttgtcaaaataaacctagatttggaaatttacttatctttttttaacattaatttctcgtgcaggttaagaacgctcaagaagaattactgcactggcacgctgaaaatgctaaagacaatcctaaaattattcatgcaacaaaggaatgtgctgctggaatcattgaagctattggttattttaatctaggaccaaatgtgtctccaagagatattgctgacactttggagtgtaaaatggactgcatgaaccctggtcttgaaacagtcaaatatttcttgttctatgagagatggttgcgtgcagaaatcgatcaatctgacttgtctattgcaagtctgaaggcaaattgtgtacgtgcaagtcttcttttattttcagtgtataattttataacaggtaccacttgattgtttctggcagttctacccagtttgcttgaggcatacattgtttttctcatcacatgtctgtctttgacttgtttttcactgactggttctgcgttcttacttcatatgtaatgatttgttcactgataggcgtcatttggtttgtttttggtacttaattatgctttccttcctttcagcatccaactggtgtcttcatgcacccatctggtgttgaaattcttcttaccgacagcctaagtgaattgagcaaacactatggtgacaaacaggaaaagaaatttcgtgtttgggtggatagagtatcgactttacaactcgattcagacacatggctagtgaagtacaacaagtgggaatcactaggtagattttctctacttaatgtttgttaagccaactaagtcaagttgtctatgccctttatatggctttccaaaaacaaatcatttttttcaattgtatatagtttaatgatctcatgctgctgttatatcaaattttgacccttttgtaggtgaagaacgaaaaggttgtatggcaactgccatagtaagttcaaaggtaagatactaacataagaaatgaatatggcttagtttcttttcttgccatggttttgctttgtgattttgaaagagaatttgtgatttcttttcagggtggcaatgggtcaacattgattcatgctcatcagacatggttggaaggttcagaagggaaggatggtccatcttcttggattctctaaatgccataaatattttatcctattcaaaataactattggatcatgtgattttgtatgtccaattgtaattcatacatgtttgtctctgatgggtggtttagccattgtcaatactctttaataatatatatagcagagatccaaattctgggctttattctataaatatatatatgtttatatatatatatatattttgcacagcctctccttattatgacttattactcagtttgactttttgttctagttgcatgtcatttacatttctttaccctgtcacagttttgtttcttcctttggtttggtgtgatgctgtcagtaatcgtcgttttgtgtttttcctgtcgtttaggggaattatattagttcctcgcctctgctttcaatgattattgtcgcatatccatgctggtgtcgtttataattttttgtggcttaaccttttgccatatgaagagcccaattcctattcttggaaaaacaacaattatcctttttttttaataagtaacaattattttgtcattgttaaggtagtgtagggtaattttttattttaaatttttaaacataataataaaagtaaaatttttaattgtaattttttttttcaaaaacaaaaatgtgttttataattatttttgttttttaatattgaaaacaaaaaacaaaaatctattctgtaaattttatttgttaattttatttaagttaagtttgtatttggggtcagggttcgggtccagattcgaggttgagattggggccaagtttgaggtcgagactaaggtcgagtttggggtcgaggttgggattggcatttgggtttgaggtagggctcggggtctgcgtccagggtcttaggccaagtttgggtttggggtccgaattagggtctggggtcaaggtgagggttcgagtccgtgtttggggtctaggtccgagtcgggtccagcattcgaggtctggggtacaagttggggttcgggatctaggttggatcccaggtctaggattggggttacgtttcggggtctaagtctgggtctgggttcaggtttgagtctggggtcgaggtccgggttggggtcgtggtctgggttcgggttttaaggtttaggtcgaggttggggtcggggtccgagtttcaaggtctaggttggggtcagagtcctaaatatatattaa

SEQ ID NO: 298150 - DNA, 4138 bp, Cannabis indica
ttttttcattgtggaaattatctggttatgttttctgtctgattcatgtgttcttcattgctttttcatggacccttatttatttaggtgcatctgaagaaaatataagggaccttttcttgaaagcacagaggacagccccctcgattgtatttattgatgaaattgatgctattgcttcaaaaagagaaaatttacaacgagagatggagcgtcgaattgtgacacaattgatgacttgtatggatgaatctcacaggcttgtaaagccgactgatgatagtgcagactcacaatctcatggttttgttcttgttattggagctactaatagacctgacgctgttgattctgcactaaggagacctgggcgttttgatcgggaaattgccttgggtgtgcccgatgaaaatgcaagagctgagattctttctgtccttgctaaagacctaagggttgaaggttcgcttgatctatttaaaatagcaagggctaccccaggttttgttggagctgatttgtatgcgctggctaacaaggcgggtaaccttgcaatgaaaagatttctagatgaaagaaagtctaaattaacaagaaattgtatagatgaggagtataatgaagggtggtggaaggaaccttggcttcccgaagaaatggaaaggcttaacatcactatggcagattttgaggtaaatacttgtgtaaattttatgttattctatccatccctgcacttgagatgtgattagttttagatgagtttttaccaaaacatagactaaaaagtaactaaaatgctctcgtagaatgatagtaacctgagatacttaccaaatggtcaaaactatctttcccagttcccaaatattgtagggttaggcgggaatcccaggttttttatttataaattgtttatgtaatttaatgttttccgttgtctgatacagtatacttatcaaactttcgttggatttccttttattacaagttcagtttcatataaaaggatttatatatacatgtttctgctactcataagacgagtgctgttatctttaaaatattatttcaggaatctgttaaacttgttcaaccttcttcaataagagaaggcttctctgctattcccaaggtaaaatgggaagatgttggcgggctagatcttttgaggcaagaattcgatcgatatatagttaggcgtattaaacatcctgaggattatgaggtaatttttctctttattattattataattatgcttgatatgcttatgattatatttgtggcacggagagtcagattgtaaagtagttcaaacgaggttatggttagagtctaacactattacttgtgtctaagaaatataatgtacaacctgaaataaattttattgatatttattatttttattttaatttagaaattattttttctttgtttttgacgaatgaacattgtttagcatttgaattgtcaatcgtaattagtggagacctgatgcgaccaggcattgaactgttaattgtggtttcaatttgttggtttaattgtaacttagtttttttttttcatactctgtatagggtttcggagtagatttagagacaggatttttgctgtatggtcctcccggatgtggtaagacattgatagcgaaagctgttgctaatgaagcgggagcaaacttcattcacattaaggtcagtcctcctacccacttttctttatagtgttatgcttttgtattgtaacattgtgtatgtattcgtataattctgtgccttctgctaacttgtagggtcctgaacttttgaataaatacgttggagaaagtgaactgggtgttcggacattgtttagacgtgcgaggacatgtgcgccatgcatacttttctttgatgaggttggttgttctctctccttcactgttcttcatttccggttgtaaactaacgacacactaatcattatgcattattctgcaatataaatttgtattgaattttagcaaagcttgatttgatgataaattgccaaagtcttgaaaagttttgcatagcttgtttctgattctggcgttccctatggtttttgcttaacgaatgttggcataatttttctcatgcttacactcttggcctcgacctctgttttatatcattgtaggtggatgccttgacaaccaagcgtgggagagaagggggatgggttgttgagcggctactgaaccaggttaaataatctgcgattttaatctcgatgtttgtacttgtcacagaaaataacatcttttttattattattgttgcagctacttgtagagttagatggcgcagagcagcggcgaggcgtatttgtaatcggtgccacaaatcggtaaagctcattgcctctcagaattatttgaatgttaagtacaagttctctaatatcttgtgccctttttattcagacctgaagttatggacaatgcccttctccggcctggaagattcggtaagcttctctatgtacctctgccgagccccgatgaacgcggttcaattttgaaagctttagcaaggaagaagccagtagatgctagtgtggatttgagtgccattggacggatggaagcgtgtgacaatttcagtggcgccgacctatcttcactggtttgtctaaacattcttaaattagaaagaaacaaataaacaaacaaacataatctttcttaaatgtaaagtaaaaaccttaaacattattatattattatgcgcaggtaaatgaagcagctatggctgctcttgatgagaaacaaactaccacagaagccaaattggatggagcttctgtactacgtaccatcaaaacacctcactttgagctcgccatgtctaaattatctgcgtcggtaaaagccaaggtatcgcttattctcatatttcgttgctccctctttttttcttgttaattatgctaaacacatttccaattcttctcattccattctcatttttgtattttgcagcaaaaacagtactacaaaatactatcagagagcttacaatcttgatttcatttcgtttggtaagaggtattttgttaatgttcataagggagcaaagggagaaatacctcacaaattttgattattttatttactaacaaagttgtctttactataattttgtgtcttccaattttgtttgttacattttgggttgattaataaggtggtgtaagaaatttttttcttttttagttccttgttgcatatcaaggttttgtcagaaaaaaaagtgtatccaaaattaaaaattaaagaaaacttgatcaagttatttggctatatatttcaaaaaagtgtttatttaatcttccacactattttgtgtatagtacatctgatcttaggattttcatattttgaatttaatctaatttattcatccaatagatcaaatttaatccgatccttcatgaaaatattaattatatttataattttttaaacaacatatatacatgaatgtggattagatttacatatgaatgaaacatctaatttgcaatttagattttccaattaaatctgcattttctagattgagtattttatgaatatttataatttagtgtataaatattatgagtgaaattgaaaggaaatttgattttttatgcttgatttaagggttaattggttacgaaaatttaaactatagctaattgttagaataagtccactttaccgaaatctcaaaactactcttctcaaaatcccacacctattctctctccttctctttattctctctgtttgcccaacttaaacacagccgtcccaaccccaaattgtcccaaacgccggttacacccacatggaggagaccaaccggcccacgatgctcccccaccgacccatggcgcaccaccaccgaagcaccatcactgttttttatttttttattgatttttttgtgattttagtgttgatagattttgttagatttagggatagatataggttttagaatctcaaatgtgtgattttgggcaaggtctaataaggttcgatgtaggtccgatagggtcaaatgaaactgtgagtttgcgaggtagaagacataggtccgataggtccgatataggg

SEQ ID NO: 298151 - DNA, 4021 bp, Cannabis indica
aaaattttgagcatactttgagtaacaagaggaccaacaatatcccagtgttgttgaaaaaacattgcagacattccatcaatacctggagacttgtcaggggccattgatttaagggcttcttcaatatccgaggcagtgaaaggcattaacaaatgctgattaatctctaatgtgatagacgttgggatagcagaaagaacataatcaagagcttcctcatcaacaccatttgaagtaaataaatgtgaaaaataattaacaatttcaacacttatttcctcctcagtatggacaacaccaccagtcccagcatgtagctttttaatcttattgttcttgtttctggttttagcacgagaatggaagaatttgatatttgaatccccactttgaagccagtcgacccttgcacgctactgccagtaaagttcctttttttccaataattcatccagtattttatcagcattttccacttgttgaagatgggcagccgagttgttatagctattgtggagatgtgctgattttttgtgagcttcagatatatctcttcccatttgtccatatttcctaagatgccaatcttgaagagcagccgaactagctacaatattatgcagcagcaaagtggtaggattttttgaagccacgtgatgccaagactcctgaatgatgtttcggcaatcaacatcctttagccaaaattgttcaaaacgaaaccgagtatgcctctgatgagattgagcattagacaccgattgtgatacactttaagctaacgctcgatgatccgagtggtaaaaatcgagatgggatatatgatcttcaatgaaaaattcagaccatatgtgattgataaaacctcaatcaagcctttctctgacaatattcccatggtggtttttgttggtccaggtatatacatcacccttacatggaatagcactaagttgacaatgattaatggtcttcctgaaattatccataagtaagtcatctctagggggcccccatctttatcttcattggacagtagctcattaaaatctccaagaaccaaccaaggagagttagaatcattggacacaagactactaagaagattccaagtgtttattcttaaatgagtttccggagcaccataaaaaccagtaaaatgaaattgatgacagcaatccgacgaaacgaaaacatcaaagtgattcattgaaaaggaattgagagttacatcaagactatccattcagaaaagtaacaaaccacccttcaaacccaccctaggtacttcaagaccatgattaaatttaagagaaacccgaaaacgatcaattgaattacattttaatttagtctccataataaaaagtaaatcgagacgctgctctttaactagcagcttcaaatgcctgaatgccgaaggattccctagtcctctagcattccaacttataagtttcatggctgggggcggggctgctgtggagcaacctccgctgaatgagaagactgtccttcaactgaatccggagacaaaccagaaacttgctgagcagacatgtcttcaatgcgagaattatctttggcattacttcggcatctcttaagaacacttctaaaatttttcagggtccacttgccttttgaagacttattatgatcagtatattcactacagttttcagcaaacatagcttttcctttgctgttagcacccatagccgactcacgaaaatcagatacaggaggctctttggaggtagtttttagggatggagttacaatattagtagcttgtgattgagtcgatatggaggaaatgtcgtggtgagggaaagttggtatgtaggaagggaaagggagaggcaattcagggtgcttatcgggtgtattgacagggattacaggtgtggaggattcggctatagtgagagatttaggctgaggctatgctcccaatgctagatttctgtgggtattgattgcagggatggtattagcaattgttttcctggttaaacgagtgaggaaaggataaacattggctctagaaaagtcacttcgatatcgatcatagccaacaacagggagtttatctccaatcatttcaggaccatataacagatcggggtcaccaccagtatccaccatttccataaaagatacacatttgtcaaaaggatgtcccaatttgccacaatagaaacagaacacaggcaaattttcatagcgaaattccaaccaatgttcatcattcaccttaggcagagtaaccattttaccacgcataagtggttggttaatgtcaatccggactctagtgcgcataaaaaaaccccatccttcattaagagaatcctcataaatctcaataaattctccaatccattcaccaattttcttagcaagggcgcgcgatttccttaagaatggaagacggtgagtttgaacccagaactgagcatagtagagatcagcctttgtgacattctggagagatgatggtaagtgcaacaagattaagtgattaaaaaagtgccatggttccccagaaaggattcgatgttgataacctgcacaagccaaagttaaaaggaaaagatcaaagtgcatttcagagacaataacttcaaacctacatttattactccagaattcccccatctttttgataaaagtattaggattaatcgaaggagcaaggcatctagccaccagaaaacatttaggagtttggctaggatcaaatagatcagattccgatagagagtgaacaactctctccttctcagaaaggcataagttagcattcatattttgcaatatttattccatatgaggtaaagaagaagaaaaggtaaataggagatgcaggtacagagcgtataatctgctggggtatttatatattgggcatgctttgatgaaattggggatcatagattcaggaagaacatggggttgaggccgaagaagaataagatgtgggtggttatcggcaggcatggccatggtggaggaagggtaagaccaggtaaccgtcgtaactgcaacagaggaaataattccactcgggcacacaataactgtggacttgtttgatgtttaaatttaattttaaagtattaatgtttaaagtatataagctctttagcaacactttgtatttaagagtgtccaaaaaaaaaataaatgaactagcaacacatctttatcaagtgttattaaataagtgttgctagatatgaatgttttaaacatataaattttctagcaacactttatatttaagtatgtctaataataaaaattaatgaattagcaacacttatttaccaagtgttattgaataagtattgctaaacatcttatttgtagtagtggtgccacgtgtgcaagagtatgcacataagtagtgcatggtggtagttaatcggatgataccttaaatttgctactggttcagtaatttagagggtttaactaccaaatttgagtttggaaagttaaatgtaagtaaaataataattgagaggttttagccgtcaaaaactcttttatcaatatagttgcttaaataaaaccacaaccatgcaccctttttttttccttttagaaaaagttatctttccaccaaaaaaaatcattaatttaatattttatgtgggactagtgtagtcaatttttagagttcttaactattaaagtattttttgtagaaaaatgtattaaatcttatttggatgagaaaaaaaataaaaagtaatattttgagataatatgtgtatttttgtcaattataaatgttacatgttagagtatgctaaaagtaatattttgagatcatatatatgtgtaattagatgtttcatttattattttaaggtgaatagataaatataagagaaattaccccatatattattttttaactttttttttccaaatttacgatttgggttttatggtagtttttctagtagtttcagccctaaataaaattctatttcaatgtaat

SEQ ID NO: 298152 - DNA, 4476 bp, Cannabis indica
gttagcatttaatttatttctgctctaaattactgctctaatgccacaacacttttttattataatttcttaaatgtaatactcattgatcataggaattgaaatgtgccatttttcattggcctgccatgttgagtattgaaaacaagaacaataggtcctttaaacaaaaccaacatcaaattggcctgccctagtgttagctaatttctataaaaaaaaagtatgtccaaacattaattatctgcctaaattcttcaaaactacgtatacttgattgcacttcctccttatgataggttataaatacaggataaatcagaaagagattaggagaattgtgaaatggtgtgtaaattgcaagaatgagcatgctgacctgtgtatagagattgcaattctaatttgttgtctatgtttcagtggttttctaatcactctcctattcttgtattttcccgttattaaagaaaaaaaaaatgaaagcatgtattacatggacacgaggagagacttggtaacttgatggattttataaccaataatctttcgaataacttagacttgtggaaagagtactaaggccctttttggactttttattagtatttagatgtttatgagattttatattaatccacttggctgtcataataatccttggatcgtttgttttgtactctaggaactccccgaaggcagttggtattgcccgaactgcacttgttggatatgtgactctttggtggatgacaaaaatgcttcaagtgcttctgatgcattaaaatgttcacagtgcgagcacaaatgtaattattctttctaaatgaaatttatgaacctttctgtgaagctggcagattggtgtcttgttaaatatatggaagttaaaaggaaaataagtttttaaggaaagaagttggcttgattataaaatgatattgtgagctgtaatcctatgctcacttactaaatgcaaatattaatttgactcattaacatatttgctaacttcctataaattgatttacattaagtaagtacattatgaaagaatgtgatagtctgaattgtgatttgctagcataaatgttaagctttgtatcttctgatttttccttctctcttgttattgaaaacctgtaaatagataatataaatgctgttaaggactggaagagaagagtacattttcatttgtgtttctttacctggacaagtgggtggtttacaataactttccttgttaacagatcacgatgcttgccttaaagaaaaggatagaggccgacaagtaatatcagattcctcattttgtggtacgagctgtcaggaggtatggtattttaatattttattgaaccgaaaaatttgataattcttttctcacatgtcgtctctctacaattttgtttcttctaattttgtcttaatgaataaatttctgtggactagaaatacttttgagattattgcttttctcggtgccaaactcttactattgggtgcaatgggtgtgtgtgtgcaggtttactctgggcttcaatcgcgtgttggcctcattaatcatattactgatggctttacatggacacttctgaaatgcattcatgatgaccaaaaggttcattctgcccaacggtttgctttaaaagcagaatgtaattcaagattagcggttgcccttacaattatggaggaatgctttctatcaatggttgatccaagaacaggcatcaacatgatacctcaagtcttatacaattgggggtcagctcatctatttttctttaaaattattttatcgctatattcttttaccggtaatatcatcctatcaaaacgtctctctcaacatacttggtgtgtgtgagatttcttactgctccattctaacaactgacataataaataatgaatctcccacagatgcatttttcttgtatactttgtcgaagtatgtttgggaaactatacaccaactgcccatgttgttgatcagtttgtctttgcttttttttgccatcaggtcggaattcgcacgtttgaatttccaaggattttatactgtggtccttgagaaagatgatgtgctaatatctgtagcatccgtcaggtagccaatcattaatacttagtccttatattgtagttcgtttgatattagtatcgctactataattgattaggattatagaggccaagattgtatatttctatgtctttgatatcaataaagtatttcggtaataggtagcgattttgcatgaaccgatattttagttccctgttaacttaacaaaacttgcatgaaacttttgggacaatataaaatctggtaattagttttcttcctatcagtctcttgcttgttgtggtcccttcgaacagcggttatatggacgttgtgttattagacaaatggagaaagtgagcttgttttttactgtgtttcttaactttgttgatctaaagtctgagctttttgcagggttcatggaacaacagttgcagagatgcccctcattgcaacatgcagtaactatcgtcgacaaggaatgtgtcgaagacttgtatctgcaattgaagaggtataaatctattgttaaaatattttcattttcttaaaggttggtagtttctttctccccaatcaaaatgcatctgatctgactcggttctatacttttctttttttctttttcttttcagacatttgtagtagttctaattcctatttcgaaatgaggaagaaaaaatgtagtagacagctccatctaactgactaaattgtatatatgcattgtgtttgtgtttatactctcctcttttcatcgtggctgtagatgcttatttcttttaaggtcgaaaaaatcgtggtagctgccattccagatttgatagagacatggaccgagggtttcggctttgaacttgttgaagacagtgaaaaaaagagtctaaacaagatcaacatgatggtttttcccggtacagttttgctaaagaagaccctttatggcaatggagcgaaacatggacaatccggtgagtatcttttcctcgtttaatctctatttgttgtcccttctgcaattttattgtaaatacttaattgccaatgatgttgaacaggtgatgcgtttcggttgagagaaaatgaatcaacgaatatcattgtggaacgtaagaaagtacccaaatccatatcgaaggatgaaaaacccttcacgagttctgaagtttgcaccgaaactgatgagactgctgttcagaaaccgaatgtggattgtaattcaggcagaactgttgctaaaaccgaaagtaaagccatggtgaggaaaggaaaggatttggagtcaattgaagttaacggtggtaaaccgaaaagaggccgcaaaaagaaggatttggagtcacttgaagctaacaatgatggtaaaccgaaaaaagttcgcagaaagacgaagaagatgagtaccgaatcagtagaaacgagactcggggacgactatacgcaatgtaatggaaggtgttgttgttgtagagaagcagaaatgagaagtatggaaagaagtaataagaaagtgttaagtgaagaggaattaagaattttgcaggagcaattttcaaagctgtcctgtgaagaagaagacccaacaacttctcaattaggtgataaaaattctactaaaatgctttgtaatattaaatctatggctatgtctcagtctcatgatgaaacacagcctcagattgcctatgacaagaattgtaatgttgaattgaaataaaagtttttaggaaagaaaaaaaaaggggaagcttttgttgcatttagattttagtgagaaattatatctaaaatgaggtatttcaagacacatatttttagtatattttgtagatgattaatttgcggtataaatatttaataattttttattgtaaataaataattaggtttaatttttggtgtaataatatttaaattataattttggaattttgttaatgttaagtaattttaacgtgttattttttattggtataattaaattaaatttaaaaaaaaaattaatgacctagatcgataagagattatcatgtggtaattttacttaatacttaataactagatatttacagatattttaggattataatttaagtattattactgtaaaaaattaagtttaagtatttaattgtaattaagaattaaacttaaatatttataccgctaattttttttttttattatagaattacaaaagaagttgtaaaagtcaaaatgatttttttttagtaaaggtgtatagaaggtaaataagatggtgataatttaatgttcacattttagtaagatgtaaataaagaattttagtgttgtcaaagaaataatatgtccatatcaaatatcaaataagagtaatttgcgatatatttactcttagttgcagataaatatttaag

SEQ ID NO: 298153 - DNA, 3911 bp, Cannabis indica
  modified_base (3894)..(3894): a, c, t, g, unknown or other
gattatatgaaatgagtttatatagggcataaacccaacaggactatgaccaggggcagcatcaaggatagaagtattagggaaataacgagctttaagaattaggctaagtagagaattcgaatgtaaggactctccaagcttgcttagcaagcattgattggttaaaatggactaagaatctgaagccaaggccaccaacaaacttggattgacaaacagatctccaatttttccaatggacttttcgaaactctagagaggaaccccaccaaaatctagatataagagattcgagttccttacaaatcttggtcggtatacggaaacaagacattgcataagagggaatggcttaaaggacatctttaataagagtctctttgccttccttagagaaccatttgtgatgccaagaatgaataatggatgaaattctatctttgagaaaagtaaaagattgatatttggcacgagagagacattgtggcaaaccaaggtacttagtgataaaaggcttattctcaagttggaatgtttgaaagaaaagctccttgattacatcttgagtgttaggtgagaataaaatggaggacttagcaaaattaatgacctgcccagaggccttagaatatagtgaaagaacctgttgcaaagcatgataggaagcttgatcagcagagcagaacaggatgccgtcatcagcaaacatgagatgagaaatggaatgagcatttcgagaaacagtgatgccacgaaggaagcccctatcctgataatttctaaggatagttaaaagcccctcaacacaaaggatgaacaaataaggggatagaggatcaccttacctaagccctctagttgccttaaattaccatgatcctgaccattaatagaaaaagagatggatgcagtagaaaggtacttaagaatgagagagacaaaacgaatagggaagttaacgaaacgtcatactattaagaaagttccactcaaccctgtcaaaggctttagccatatcaagcttcaaagcagcccaacctttctttccaactttcctattattgatgacatgaacaagttcattggcaataataatattatcaaaaataacatgacccgaaataaaagcactctaaaaaggagagataatcctatcaagaatcattttgagcctataagcaaggatcttggagataactttataaaaagtagtacaatgactaattggtctgaaatcccctaacctcctagcatgctgtttttttgggttgagaacaattaaggtagagttaacatcgaaattttattcctttgttaaggcaatctaaaactgcattagtaaagtatctacccaaagtggaccagttttttttgataaaaatatgcattaaacccatccaaaccgtcagccttatccctagacaattaaaaaatagcccacttgagctcatcagcagtaaaatcttgggcaagaatcctaacataagagtcctctagaccaaggcccaaagaagcaaaaattgaagctgcagcatcaatatcactacccccaggaagtaaaaagatcagaaaaataagaggtgattagattaacaataccatcctcattgctaaccacatttccatcatcatccttgaggtacttaatggcattagttttcttcctacgggtagcatgtttatggaagaattcagtgtttttatccccagccttaagccatttgaccctagccctctgcttctaataaatttcctctttatacaacaaaacatcaagcatcgattgtaatttgttaagatagagcctatcagcctcactaagattaactttattttgaatactatcaatgtcatgagtaagttgctgaattctagtcttgaaaaaattattattcttattccaatgcttcaaagaagtgatacaattagctttcttagaaagaaagctatggtaataattactaggtgggcttggaataggacagtcatttcagttattagtaacaagattataaaaattagggtcttcaagccagctatttttaaatcgaaatcgcttattaacaaaattgataggattagaactagtgttagcaaggagaagctttaaggcttgatgatttgacccatagaaacctaagtgatgaagactattatcaggaaaaagatcacaccaagactcagaagcaacaacccaatctaaatgttcactaatagttttattcgtccaagtgtatttgttacctacataaggaaggggacacatagtaaacctactaagaaaatcagagaagaaagacatatgagcctcatcaggtgcttgaccaccgatcttgtcactactaaagagatagctattgaaatcccccataattgaccaaggcagattataagcattgtaaaagatattgtgcaataattttccaggttaaatgcttttgattactaataggagaaccataaaaataggtaaaatgtcgtaattcattaatattaaacccaccaaaagcaaacccccaccaaaatactgcctagggacctctaagccaaaatcaaaacctaacaaggtcttaaacctatcaatagagcaaggcttaagcctggtttccataaaaaaaaaaaaaaaaaaagaatctggcttgtgagtcttaaccaggaggaaaagttgattgaatgctcgagggttccccaaacctcgagcattccaacatgaaaggctcatttttctaggcgggtgtgctcagcatcacccgcctgttcaaagacttcaactgaggagggaacttcaaagtctatttctctagccctagcccacttaagcatggaacgcatagaacctccaacattagcttgatacatttgaaaagatagtctcttgactccagaggcacatgccagccttttacccttaacttgaggatcaggcaagggagcctccatcgtagagacagggagatcagtagtattctgacccaaaaactagagatgggagggcttcagcaagagaatgagcagcagtaacaagctcaggattagttaaagttgggctatcattaacaataatcgagtccgtggacatcgaggcagatggtggtatgtttgaaatagagttaaaagtattgcaattgatggcaggggacatgcattccatagagttgttaggattaataggagtggggatcataatactgtgagagtttcgcggagcacttaaacaagaaacagatgccacattggagttaagtagaggtgcaaaactaaaaggttgggtcaagaaagggttcatcatttgactaccatgaggaaagttagtgaggtccatattagttatggtgatggctgggggatgagggtattgaaacgaaagaggtttttcagcaggtttctccttccctcgaaaaagaaggtcattaggacaagggggtggggtaatggactcatcacacttctgaaagtaagaatgacagtactttctggtatgatccaattttccacagtagaagcagaatcaaagagttgttcatatttgaaatcaaaccatttagtaaattccctacccattttaaggaaacggatgtggatacctcgcctgataggtttattaacatcaataaggaatcgaaccctcagataaggtctagtcccttccccaacagtggtgttatctacctaaattaactcacccacacctgaagcaataagcttagccaaatcataagatttgcaacgacaggaaataccatagatttgaacccataatgggacatagtgcagatgattaggggtgatgggaaaagagttgtcagggatagcaaagatggtaaaggacgtctggggtaaaagtgccaaagggctgtccgatcaaggattcgttctcttattgttgcgtanatttttgcacacgcaag

SEQ ID NO: 298154 - DNA, 6231 bp, Cannabis indica
ataatatttttattgatttttttacaactttctgttaaaataaaatttatttaaatcttagtatattgtaaaattttggctaaatattatattgactcattttctgaatcaaatgtatcacaaaatttacacttaaagatggtcagaccccctaatgtaaaacttgtgctatatttaacacaaaaaaaaactttataatatatttgcattaatttttaacattgtactctaatatataattgcaaaacttgatacaaaatttaatgttaaattaatattttattaaaatataaaaatataataatttatcattaattttatcattttttattacataaaacaataaaaaaaataaatgtaaaaaatttataattcaatgaaagaactataaattgaatagtaattaagataaactataaatttattcattcaaaaatatcataaaaatagtatatttatattgtaatacaaattttacttcattaaatttagataaacttttagcactctattaacacactttttacagatcgatgagcaatactttaaccacagatcactaacaatggaaatgctctaacgttagatgttaattatttatagcaatagtggtctatattgtctaataatacttataatataaattttaaaattttttaacaattttaaataataattataatatgatagtgatgttggacagtgccctttttttttttttttttaaaaaaaaaaaaattgggacatagtgccttttaagtatatctatcatcacatttaaaaaagaaattaaaattttcctccaatgcacctttacctattactacctattagtattacttattaattcactaattagtcattaaactcagtttcttttccttttaatgaacatacatccatcatggtcatcttcttcttcttttatttttgtacatttatatatatttaaaaataaatttgtcccaacatgaattatcattaacaaccaaaattatttgtatatattttattcttttatttattcaaatataaattctaatatacaacataaataaatctccactctcttagctgtaattagaaattaaatatggtatttggattgtatgggctgaaaataaataaataattagtgattacaaaaggtggggatggaatgggattaaaaaaacccacaaaatttatgatatatattgtgtcgacggtcataattgtttggtgtataattactattctaaccttgtaggacccaaccaaacaaatacgatcacgagggtcacgcttgggatataaaaaaagtatatttataagaacattatatcaattttatttattgtatgtaaagaacatgatcacgagaatcatacaccattgccggttcataggttttggcattaaaagccaccagcctttaatttctctactcatttttataaattggacattgctcaaaaaaaaaatttcaaaataaaacttaataataattcgatctagagatgttatgataaatctaattacatattctatatatattcgtgttagaaattgtaaaaaattgagttcagaattctatttatacaattttaaaaaatataaaattattgtatcatttacttttttaattaataacttttgtaaaaacacatagtcaaaatggtatttatttttttcatatcatttcatattagtggcattaaatgtaaatctccactaacattaggggtaattatgtcaacttaaccaaatttacagccattacattttgttattattaggtgtccaacatatttaaaaaaaagtcttcagctgtgtaatttatttattatttattattttttttttaaaaaaaattaataattgaaattggaaagcaatattaataaaattaagaaggctaacaatgaagttataattagtgggtcccatctatcctttgaagatgacgcggcaatattttgttgtgaagaaaagaaaagtagaaaccgtagcataaagactggaggagagagaaaggttggttaagacttaatagagagaaaaagaaagagaaagagagagagaaagagttttagtttgggtttcacacacttttctaatctaaaaaaaatatgctaaaagatatatagtatgaagagaaagaactatagctaaaaaagaaggctacctcagattcattcatactttccgaccaaattccatacccgattatgttctccgattctcaccgttaatctcactccttctcggcttcttaagccggaaccaataacgctgtaaaggaggccttaattcttcttcttcttggatcagaatcggaatcggaatcgaaatatgagaagtattaacaatagcgttgaaactattaacgccgctgctactgctattgtctcggccgagagtcgaactcaacctacttccgttcctgtaactctctttctcttttacctctgagttttgtttgtgttatgtgtatgcgtaaatctatatgtatgtataaatatatatgtgtgtatgagtatgtgcctgtagcttatacgtatgcgtatgtattggatttctatatggattttgcgttctgtttttactgaattaaaagtaggatcttcacttttgtgttcttcgttaacttgcatcacttgaagagttatttttttcgatcgtttctgggatttttcgggtggggaattgagttctaaaagcatatatattgttctggggaatatgttaatttttttaaaaaaaatgtttttgtactgggttttgttgcttggaatcagaggagaaacaattttattaaggcttgaaaatttgattagtaattcaacgaggctctatttttggatccttagttttcaattaagattttcatacgtatagcaatagcatacaagatttaacattttcccactcaattctaattagtttaattgagatttctttttgcaaccgaacacaaaattcctatttaacaaattgtcaaattgactcatttctgaggccaatttcctattattttttttttctgatttgtcttcaccggagtatcacttaaagtaattgtcttagagttgatctaaattttattcgaattctgcttgtgtctacctagagataaattttaaatagttcgtgtgagactaaatttgggtgcagttacacctaagcatatgggttttggggtggtctattctacattatttagatgtggagaggaacttgtttatgacaaatttggaacttgggttgaaggtaattaaatgtgttggcataatttaagaagctaattggtcacatgatatgttgttctcctaatcccccagccttatcttgtccttggggaccttagtcaaatagggtatgctctgcacctggtggtccttttcggatggggtaacatgataaatccagcctacaaacatttttaggattattcactttcacttccgataaccattaactttcagcaaaattttcacatgtcatgttcaagaagcagggtgcatatgatataaatccctttgttatattgacccaaaacaattatgatgcttggaattagctttatggtacagtgacctacctccatgtcaattgccatatattcacgtggaaacatgacatttatatccagtgcaaacttgatttgttttcgtaacttattaatcttcataatattctgacttattttctcctaagaactttatggttaaatctcttttcttttttgttcaagacatttatttgttttatttttgttgcactgcttctaaaattatctgcaaacacttgagatataatttctctaaactctcttttctctggtaagggctacgtgaaggtggcaataacttgaccaattggtatagcctgtactcaaaaatttgattataaagttatcttgggttgctgtttgtataagtaatttataaagcgattaacatggtgattgtttttaattcttgcttgccaaagtaatgcacctgatatcttctattgccttctatagaatgcttgcaatgttcccaacaatgtataagaaccagattttcgctataggttctcatgaatggcgttcttttttcattgtttggctgcagaaaagaagatggggaagttgctggagtctatattggtgttttggatcacataaaaacagcaagcgaattggtcatgctgttcttgttcccgaaccagtgttaccaggtgctgcagtccctgcagctgagcaccaccaagcctcctcatcagccattattctaccctttattgctcctccttcttctccggcatctttcctccaatcggatcctccttctgctacacaatccccagctggattgttgtccctcacttcactatccatgaattcgtactctcctggtggccctgcatccatctttgccataggtccatatgcctatgagactcagttagtctcaccacctgtattctcgacctttcctactgaaccatctactgctccgtacactcctccacctgagtctgttcaactgaccaccccttcatcccctgaagtgccatttgctcaacttttgacatcttcacttgaccgaagccgaagaaacaatggcacaaatcagaaattttcactatctcattgtgagtttcagccttatcaacagtatccaggaagcccaggtggccatctcatttccccaggctcagcggtctcaaattctggaacatcatctcctttccctgatagacaccctatgcttggattccgtacaggggaagctccaaggatcctgggctatgaacattttaccacccggaagtggggttcaaggttgggttcagggtctttaacgccagatggtgtggggctgggttcaaggctgggatccgggtgtttgaccccagatggcaatggtctaggttccaggcttggctctgggtccatgaccccaaatggtgctgggcttgactcaagaatgggctctggatgtcagacacctgatgggactttgatggctgttgtgctgataattttgttctggagaaccagatatctgaagtggcatccctggccaactcagataacgggtgtcagaccgacgggtgtgtagttgaccatagggtgtcgtttgagttaactggtgaagatgttgcacgttgccttgcaaataagtctgcatcattgaatagcagaactgcatcagagtctttggttgatatattaccagcagaatgccccaccaacaaagatggtgtgtcgatagataccgataacaataatatttcatatgaatcatgtgttaaggaaacttccaatgaaagctctgaacatgattgtcgagaaggagaagatcaaagctatcagaagcatcgatcaatcactctcgggtcaataaaagaattcaactttgacaacacaaaagcagatgcctcagttaaaccaaccattggctctgagtggtgggctaatgagaaagttgctggtaaggaaccaaagcctggcaacagttggagtttctttccaattctgcaacctggggtcagttgacactaacttttactgttgcatttatatcttcccatactcctctgctaagactctccaaatggttttcctacaatggaaaatctactaacccttctgtttaaatctagaattacatttttgaggattaaggttgataaaaagaaaaagaaaacttgggatacattcttgatgaatagatggaccttagtggtgaaagagaacagtttatgaatgtttcatgaccccaagacacaatgcagaaaggggatattagtttgtagaattgctagtgtgagtagtagtgttcttaagattctagagattaacgcattctttatatattgttatacaagagatagtgtttcaagtatagtgttttcatgtgtattagctttcttgtaatgtgtacaaatttttaaataaaaaagaaaaaaaattcatagttttctcataaattagactcttactatgatataagtataaatataagcattgctatgactaattgttcttagttatgaatggcgcccaaaaccactattgtactctttatcagttttttataataattgttcaacttaagttgaaaaatactccttttattaatcaattaatcaaatttacttctaattttatatttatttgaaacatatctctttttatatgtattgtatcgaaaataccctgacataagagagtcacatggagagtatcttgaagtg

SEQ ID NO: 298155 - DNA, 6006 bp, Cannabis indica
ccaaccttaaagttttttggatggttttttgcacgtgaattacttccgggcaacaaacattgcatgtgaattcctttcacgcgcaacatagtgcatgtgaattccttctgcgcgcaacaaactttgcatgtgaattccttccacgcacaacaaacagtgcatgtgaattccttcagcgcgcaacaaacattgcatgtgaattcctttcgtggaccgcggcgacctggcctttcttcttcaacttcctatgaaatccatgctgaggttaagttatgatatcttgaatccaaatgatgaagcaccgtacttcggattataatacttaatagttaatacgatgctttgtttgctttgggtaaatgggatgattattgagcgatgttcaatggattttatgagtatcttctctttttaacactaaatatagatataacttcatgagtttgtttatcaagtccatatataagtgacaggaatatgttcaatattttttaattggtggttgtcgattagttcaaaagtggtaaatgtttaggtgaggctgcagtttccctgacttttaatccacattgccttaacatggcttttgagtaggttgacacaatgcacctaagacacagatgatggttacttaccattccacaatcctccctccttgaacctagttttctctaatttaaggacgttttctctttcaacacttgaaacaaaactataataagtatcaaccacgctagttcccaactgagcagtgacatacatttgtttcatatattaaatatgtacatacacacaaaaccaagataaagaaaagcatacaaggaaaatagagaaagagagaaatcccagctgtgcatatagactatttacatatcataacattttcttaccacgctagaaagcatgacaccaaatctcacatgtcttgtgctccattagtgctacaccaagagacaagactgttcacatgagttaggcaggaagcagagaaagggacacgtccgtttaacatttcaaccttagtcatctctttgagttggaagttataaacataaaatgagccatcttcatctctcttgaaaaccatttcgcctttgattcttaagctgaaaaggggaaccatgtctaaaatgcaacccacagttatactatgttgctttatccacacatcaccgtataagcctttcaagatccacacatctatttgattaacttcatcatgagttacaaaacctaagaggccactcacctcgacaatacgatcataagttctgcaactttttggtagagttatctggcgaaacttttcctcctccaattccaaggacactatgtagtcattatgatcgatttgaggaatccaatgtagagctccaattgcagatacaggcaatagccaaaccaacgaatgagtccaaaagaaggaccatcaacctctctccatgatttctttccaatgatcagaatctcacaattgatgtatcccaggttatctataaacaagtgcacaactttgtagttaccagtaacactgcttaaggcaaaaccataagattcattatgttgaggaaaaagagtgccaagaggaagaggcaccaactttctagtcactggattcatgagtatcagtcctcccttcttcattttattatcaagcaaaattagaccattgcaggaagctctaatcttgcctaaacaacttatattgtattctcttatcagactcttcccatctttaaattctatgaactgaacagaaaactttgaagatgcactaaccaatggttgctccaaaaaaaaggcagagttagactgattaagtcttgcttctactgaaacaacattaggcttctctggaagtatgggaaccatggttgtttctgttcgaggtgaggaaacgaaaatcaaaacagattcagctcggcgaagatgggcagcaatgaatttggcattatgaattatattaaaccaagccttacagacaaaccttgacctttgaatagagtcaagaggaagacgtacaaggatatttgacacacaatcatcatgaaggtaaggaactaggtcagtctcttgttgctttcgttttccttcttctatctttttaatgtatgctcttttctccactaatcttagtaaccttgccatgtcctctaagttttaagtgttttaaacctatagaaaaaacaacggctcagcaattcctctgatagatgtatattattggaaaaacaaacaaacaaacaaaaaagtggggaagttggagcaaagaaacaaaacattcaatcaaaccatttgaagattgcagaaaattgaaataaatggagtatgaaaacttttgaacgattagacagagagaaacggccagtgccacaagttcatatatattctactctggaaaatgttgactgctaaattctttgacccaacaatagagagcgagacctatttacttgaagggaaaaaaaatgtcagcgaaactgacaaaccagtatcattcaggccatactagttcttgtgtcttccattttagctctgtcaaatgatccaaaatccactcagattgagtatatgtacatatgtatcatttggatataaatagaacacacaagcttgacaattggccaagttgtgatgcttaacacacgattcacagtctcagactacataactcatgtcacaacaatccatcagaagaaaggatatgtaacaaaatcaccatagaatcccataacaatttatcaagcatgtcagatggacgctaaagtgccatggattaaattgttgtaaaaaaatgcatggaaaaagccctaatgataaatcacaagacaaaagacattgtcaaattatctggttactactttcattactgctaggctagcaaaacctctagagtaactcaacagtagtaaaagaaaaaaaaacacgtaattatgcaagatgattaataaataaagatttaagaacttaacttattaattccataacaaaatcttgaataaatcatacactaacaatctctacaatttgtgtacgtgtattgtgaactgtaatggaagaagcacaaatttataagtagagatgaccagtttcctgaaacagtcatttacatacctcccatggaaacttacacattctcaatatttgattgataaataataatattctaaatctttatattatcaaattaaataattcttttttaatttgataaatatcattttaataatataaagtggccacaacattaaaaattcccacacgcccaaacatacatgaacagaattacagaacataatattatagcaggaagaatcgaaattcgagatctttcattaagaatagaaaattataatatacccagtaagttacagatgcctgttttttcccttaaaaaataaataaaaacttaagaaaaaataaaaagcaaaggcggaaaaacaaatacaaagaatcaaacaaaataaagatctcaatgacagaagcaatctatatttcttcaaagaatcaactattctctcataactcgtatttccacttgatctatagatgtactttacaataagctgagcattttacataaacaaaaactaaaaaaaaaatatgaaaagcagagtcgaactaatataattcccatcaacgaattcatgactcaaatcaacattaataacacaatacccttaccaaactggattggtaaaagtgagaaatcccaaataagcagtgaaacgtttctcagtaaatatatgatcaaaatacaaatattaataaagtgagtagttcaagagcattaggaaaagtgaaaacttactttgagagaagagtgtagattgtggattagaatggttaattgatgggaatcattgagtttacagacctgcctggcttccaatcaaagtttgtgtgctctaaaaattgaagacaaaagctccatacattgttttggttttggactggctcgctctattcgtatgggtttttctccgcagtagattgacgttgacttgacaattttgaccctggtaactttggcgtagaaatctaataaatatgctcccataatagagatagagatcctcgtatacgtatatgtccactaattaccgttacctattataatttttttttctcaaccttcacgttgtaaatatatgttttgtacgtgtttttgtaaaaaaaatttaattagatttttattttattaaataaaaaaatacacttttaaaatagtaaaaaaaaattatgagcttaatttttaatgattttattttttaatataattaactttaagataatttttaatacagatacagaaaatgtaaccagttttgtcataacatctctatatcgaattattattaagttttattttgacaaaaaatcagttcagggtcctatttatataattttaaaaaatataaagttcattttgtcatttaacaaaatagagagtctaattggtaacttttgtaaaacacatggtccaaaataatatttatccaaataattatgatatcgaaaccaggtttgaagtttttgaataagaatggtaaactggaatattatgaactttattttcgatactgtaactattcaaagttttttaaaaatttacatggatgatactgtaacactattacacaaaaaaaaaacaattaaaaaaatattctggcatgtatttcgaacaaaaatattaagaaagaagtcatcataggggattgtaattagcactcatctttatttctatgcaaaaaaaaaattataattttctctaacaaaaagaaattatggttgaatttatataatacattccaaaaaagttgttcgagtacactatttcgtaagagttttatatttttattttttacgttgtagctatttaagctcactgataaatttttaaattttttaataatttatagtatcaaaaataaaataacaattttatctgttgactctgaaaattgtcaatgatgcctagtcaaaagtacgataatattgtttatgagataataaagagctgagaacttcaagtaaacaacaccaaaaattatagaggttgggtcgcagtatttaataataacctactcccttattagttgtatttcacttagaacactcaaaatcaaatgaaacttgacctgttgagtttcttaagaattctcccacgattacaataatatttcatcaaagtttttgcttttactgactgaatttgaatcccatttctcgacttataggttcatatatttataagtaaaatatacaaatattattaatgaaagaatattaattaattttgaatattctcctaaatcctgaggcccaagggagcaataaagagctggtcatacaaaattataatcagattctgtggatctacaacagacctccttatctggtctgcataaaggagcatccatcactctaagccactcctcggtagcagaagacctgttttgcctggtcaatcctttgcttgattcgtgtcaacaacattcttctaatttttggttcatccatcctcttatgtaccgcctaggttgcttttgtgtcacgcgtcactcagatcaatgccacgtcactcgtgtaaatttttagaataacattatctatgtacaagtaaaattaatataatagaaaaaatattgtattgttacgaaaatttgagcttcttatgaattgttgtctattttattgaggaattatttcatttaatgaaggtgaatttatttcaaaacatatgaagtgaaaaacataattacaaaataacatacattcttttttgacatagtgattagaatcactcatgaatttacaaaacatatatacgcaatcagcgcatgaccctcctcaaactaggatagtgttaggatttctaccctgaaaatccaaatattttctcattatcaaataaagaattaaacatttaaaatatgtatgaatgttaagttattaaaatttattattgaataatttatattaaatatcaaaaaaatctttatt

SEQ ID NO: 298156 - DNA, 3509 bp, Cannabis indica
acaaatacacaatatcctgaagtggatcatctgtctaccttggagcctgcccaatctgcattaaacaaacacgcaatccaggtatgtctatgatctttgtaaactatatctcgtcctggtgctcctttcaagtaacataaaatttgctctactgccgcccaatgatgaattgctggagaagacataaactgactaatgacactaactgggaatgcaatatctggacaagtcacagttagataattcaactttccaaccaatctgcgatattttgggaagaagatttctagttcgcacggatcaaaagagtttgaaatatttaccggggcaatgtttagtttcgatggaacatctgaaatggctcactaaaattctggggtatgactttgaaattcaatataagtcgggcttggaaaatagagatgttgatgctcttttgcgtgttcatggtgaggtctctcttgctgccatctttgtcccaagtgtgttgtctatccctgacttgcaagctcgtaatgcagcgaatccaacgctctctaaagtcctgaaagaactcgcaaataaccatgatggtggggggttttcgctagtgcaaggatgtctcaagtttcgtggtaggctggtgttacctgctgtgtcaccttttattcccttgctcttaagggaatattacagcaacaatattgggggacattcaggggtttttaagacatttcatcggctggttgcagagttttattgcgcagaatgtacaagaacgttcagaagttcgtagttgagtgctccatttgtcaacaaaacaaatatttggctcaatctcctgccagccttttacaagcgctgcctattaatatttggtgttaccaaatagcaagtttgtcatcactcatctttcggcatgacaacatttcgttctttgtacaatcgtaatcccccccccctacttcgaattgaacaagctagcaccaaggcattcgctgtagaacaagcgctccaggaccgtgatactattttgagtttgttgaaacaaaatttgttctgagctcaacaacaaatgaagacatggtttatgtcaagctccggccttaccgcaagcgtcgtgatgttcaatattaagttggggacatggtttatgttaagctccagccttaccgccagcatactgttgctaaacgtcctaatgagaagttgtctccccgaaattgtggtctgtttcaggtgctagctcacattagaacaatcgcatattggcttcagttgccttccgaagcaaccatccatctcgtgttccatgtttccttactgcgtactgctttaggtccaaaccaacaagcctcccctctgcctccggggcttacagctaacctggagtggatgttggaacctgagactgtgcttggaatatgcagtagaactcacaagaccagcccccaagctttgatcaaatggcagaatttactggagttagaggcaacttgggaagatttctctgtcatataccttcctttcaccttgaggataagttaaaacttcaagtcgagcggtagtgatagaccttcattgacttatgtctatgctaggaagactaggaagtataatggtggggatgaataattctgctgtgtagtaattcttttataggggttttgtttgggtagagctgagcagtaggcctcttcaggtttagctataaataaggattgttattttttgtaagtttttgtctagcattttatgagggttgtaactttttgagataagaccatctcgaatgaaaaatgtaaaaatagtgttatatttgacacaaatagttttgtggtagatttacattaaattttagtattaatacactaaaatttaatatttaattaatgtttaaaaaaaaaaataaaaattaataactttatatcaattttattattattttaatatgtaaaacaataaaaaaataatataaacatttcataatttagtgatttagttaaaaatattaataaaataatgcaaatggcataaatataaataaaaaaatagtgtactaattgtgatgtaaattttacattatagcaaatgttgtgtcaaatttgacacaaaatttactatgtgtcaaatttacatcactttttgacacactattaaagcacatttttttataaatgagctatattttaatttttcaacacttatttgatggagatgttgtaaagatgttgaaagggactcgaatatggattgcattttcatcttctattgctcctttatttctcttgctgctgaatattaattttgacaggaaaattcctatcactatgcttttgtttctttcccagattattgcccctgaacattagaatttcacattatattgtcttagaatttgcttttctttggcgccagattcttaaaccctacaactttcattagagtagtgagtttcaatataattatttgttaaagtgagacaaaaagatagttcgatacagatttttctttctttttttctaacaaagttcgatacagaattaactacggattgtagcaaataaaaaaagaaataaaacagagaaattaagaatagtaccctactaagaatgagaggtgaaattccagaatcggctagccaaaacgcaagaaactccaccatgggtgtcttcccattacctccccatgtcaaattcccaacactaattaacggaactgccaaccttgaaatcgaaagaaaaacaaaacagtcaggaccaaagttaaaataataatactaataggaaagaaagaaagaaaaatgcattaaggattcttctaaatcgaacgaaaaattaagctacatccaacaaacattagagcacaatgtttagcgaaagcatataacattccaaacttttctttataaagctaaaattagagcatactgcttagtgcgtacggaagaagtgttcggtatgtaataagagttaacacgacactccaagttttctttctcttctcttttgttttctgaggatccaaacaaaaagaaaggggagtggaaaggatcgtaccgattgcgatgaatgaggccagactggtagagagagcagcgaagagaaagagcaacgctgtagagagcggatgcgaatgagaggacagggaccaacgtacgatgtagaggagaaagcttagtgaggtccttacagtacgcgatctcgttcactgccttcctcagtttctccattgacgatgaatgaacgagatgagacggaggacgaaagggcagtacaattttcttttattttttttctcatcaatatttatggggacttacttatacctaaaccttttatttatgttgtatattttaagttaaatttagtctaaaagataaattatatttagtcttttattggtgctctaatataaaaagtgtaaattaattataaaagctaataatatattatttatttatttattttttttttttgaataaaagtaaacttttattaactcggcaaaatcaaccagtacaatattac

SEQ ID NO: 298157 - DNA, 3289 bp, Cannabis indica
ttttttttttttaattttcaagtttctaattcatttatatatttttaaggtttgaaaagcagttatagttagactgtaaaaatgaaagggacgacgattgttgtgttagtactagtggtgctgattgggtcgagctcgggtatgaatgtgaaaacttggggtctgggaacggagatgatgaaggaagattttcgaaaactgggagaagtcgttaaaagtattgatgacaaagttgaagttgggtacccaggaagtagtgtcaataaccatcactacattcctaggcaagatttcaataaccatggtggtgatgatggtggtaaaaaataaatatatagatatatatagatcataattcataaatatatattgaatcccttatagttatatatatatagttatgtatacataaagtttgttcctctctggctaggtgaaaaagaatattgttgttcataatgaactagagtgtttgttaatctatattatatcatataggaatattgagtgtatgaattaataataaaatttacatgttgtattgtcttgtattcatgtggatgatcttatattgttaaatttatataattataaaatattagaaatttatgtagtgaatttggaaagttattttagggtactttctatttgttttgatattcattttattttatttatgattatatatgttgtagctatttaagatttaaataattacttactatacgtataaaaaaaatattccagttgtgtgtgcaacaaaatatatgtaaatcttattttttgcattataaattatttgaaattttttaaaaatttacaagtgattctaaataagtatataacgtacatgactatgaatataaattagaggttctttcattttcacacttcaaactagtttttttttttttgtttttttttttttttttttgtatttttacgaaattttacatagaaacccctattgaaactagcgttccaacctaaattgcaacaaaaaatcgtatagaaactcatattgcaactaacactgcaaccagtttagaaacccaaactgtaaatttgaaaaaaaaaagttaaaaaaatagtatataaggtaattccccaataaattaaactaaaaagctcttatatatgttgaaaaagataagggccgagtctaccgaaacactcttttaagggcaatgctaaaatttagaggaggctcgatactgccacatgatttttcatttcttgtgttcctacaatataaaaaaaaaattacataatcagttaaataaaaaaatacaattgaaaaaactaacaaaaaaatagttacagaaaaattatacatactttttttgttcattaatcgatccatgcaatgtactcttggtactcagtggagttaatactaataatctctttcacaaaatgaaatgattttcctatgatcaacttctacattaattgtcattttaattcaccttcttttgtttatcttttggttatgaagaaccaaaatcattaatatgtagctgagaaagattatcatttattaaaaccaacatcatttttcatccatttttgaacattcatgggtaacatatataccttcataattattgttgtcaatcatattcaaaaagatcattgatcaacatcaatattatcatatgaaaacttgtatacccctcttgtttatctttgaaaactccagccaaaaaccttttgaaacaaaaaaaaaacaataataaatactagactacaaaataacgagatataatactaataacaaaaataataaatcactttctctttaggcaaaacagacaattgcaactcacttgacccatcatcaaaatcaaatactacattattatgcaagacctaaacaaaaaacaaacataataagatttgatacaaaaacagcataagcatataactattaataagacacataatcataaacaaaaaaaaaaacaactacaaattagatataaggaaaaaaaaaataaaaaaaccattaaatattcggtttctaaataataaccacacctaaaaatataataataataataataataaaaaagtttaatcgattataaactaaataagtaaaatcataacaaaacagaaatatatcttcgatgaagatgagtccggagaataaccaacattctcatcaaaagagtcaacaacctttttaatcacagcatcgatcactgtggatccacgtcccttgctctttaacaactcaatcatttcatcaaacatacacatagaatgacggacccatgatttaaatagttacttaccataagtattgtcagtcctattacttaggctagaaagaatctaatacaaccatataaagaaagtaaaaagataatcttggaatttataagaataaactttatctttttactttttcaatcttgtaaaagatgtttcaccatccataaatgccaagttaatataatggaatattctatcccacaaaagtttgccaaaagctatatttctcaattcagataattccccatcaataaatccaaacaactcactatctacctatttctcattttctcaaccatacaaataatgttaacaaataatctatatagccatcttagcaacatctacatcatcgttaaaatcacctaaaaaaaaatcttcccctaatctcatcttattctaccttaatatttaaattagagaacattttcctgaatgaaatttgttgcttgaattcatccaaattagagctaccgtccgaactcaatccagttattaagacaaactcctacagtccaaaattacgaatcaaaccctattattttttaccaagttgtgttaaatagggaatagaattccaacatcttttttagtagcatgcatggatattatataataggtaccacgtccgtactatcttgagaagaacttgctttgctagggtttcgagggtttgatttctgtgtttgagtgtgttgtatttgattcttagggtttctagatttttcttgaaaggtctctttggctgtgggttaaagacacaagatttgtggtcgtattggtcaaagtggtgccgttttggtctaaattcacttggactgagaaaaggtcgaaattgaccttgcaaactaataattgttgttttgttggtgtagggttaaagaagtaaaattcctacaattttattattattttcttaaaaaaaagaaggaaataatgaaaaagataattggtatttgagatgttatttacaaaactatagcataaaaaagctcataaaaatgtaagc

SEQ ID NO: 298158 - DNA, 1274 bp, Cannabis indica
actattatctaacaccatataattaaatgtgataatcacttaaaaatatccatgataaaaatttaatacatagtggataattgatgtattagagataaaaatatccatgagtgtaagtataactactcattgatttattctagataaaacgagcaaggtatagtctctcactcattcctattagtgacattaatactaatgaaggaggaacctcttcaaccaataagcagaatacttgaggtatcttttcaaattgtctttgtagtcaatataagttatgccaaaacggactgtatagccagcatcccattcaaagtcgtcccaaaatgtccaaacatagtatcctttcacccttacaccttccctgcaacataataattttttagactccctttggggatatttatcacaaaattaattccatatactgtgtcatttagtgcactacataataattttggccgcaaaatatatagtaaactatgttatattcatacaaaaaaaaaaaaaaaaacttgactgcaaaaatactatatttttagatattttttaagtacttttaacttaattaaatttaattcttaaaatataaaataccacacttctaaattttaattactttaactctttaattatgagctttttataaggagaggtttgatattattaaactaggtccatataactagagatttaaattatttttacatattagatattatctcacatggactaaataatatggactagcttaaatttttgatggaattcaataattcttgttagactgtcataaccatattttattcaataaataaataaaatgtacacaaaataattaattttgtggtaattaacctatatttgtacaataccaattgaaaaaaaaaaactgaccttatagcttgagcaagatatgagaggtggccatgaaggtatcttatccttaagctatccttgatagcttctttaacaggcaaagtgtcgtttcttgcgtcagcaagtcctaataagatatcagtgagatgttaatttcttgagcaaacaatataagttatttaatattttaaaaatgtttagcagatcacatttattagctagggagagatcgtgctgacatgaaatgtacacactgacagatctcaattataagatttcatatcttttttgaaattgcaactttcaaaagattttatatcgtttgttttaatgtatatatattatatagaaaaaaaatgtatatataatattatgtaaataaaaaaaatgttttg

SEQ ID NO: 298159 - DNA, 2268 bp, Cannabis indica
tattatttctatgttgtgattaagaaattcgtcgctaacaatattagtcacaaaaatcacaatttgttgtgactaaatatatttttagtcacaataaataaaagtaaattagtgacaatttgtatctaaatactatgttttagtcacaagtagctttttgttgtgactaaaaattacatttaatcacaaaaaatttatgttgtgactgaaaggttgtcactaaaggtagctattttttataatagtagaaaccaacgtagtttcattgtcaataagaaaataaaatctcgatttggaaagacttttggtcaaacaatatgcaaattgatcatgagatggtacatgttggatgctaagagttttggccaaaactttgtctttaacaaagtaaatatccaactctctatgttttgtttctattagctcccatattatcacaccatgtaattaaacctcttgaagaggaaattgtaactcttgaagcaaggattgaatccaagcaagttcaacaaccacttccaatgtatttcgacttagtagatcgagacaccacaacttatttatttgaagaccaagaaacaaaagcattgccaaaatagacacaataacttgtcattgattttctatcatctgggccatgagcccagtctgcattgctacctctgacaataatgtcatctacttaacacaaacatgacttctcttgttgtcttgtagaagaaaaatgaagaatcacctttagagtttacaaatttcaagctcattagagcctgttttagtttatcaaaccaagcactaggagcttgtttcaatccatacaggcttttagtaagcttgcatacataatctggatgatttttgtcttcaaaactaacatgctaatttatataaacattatgtcaagatgtcttaccccccaatacttagcaacaacaatgatttgatggtacaagcttttacaattgaacaaaaagtctcaccacaatagattcctgatctctaattgaaatctttatttcatctgaattccatttaactttgaacacccacatgttgtgagcaatgttcaagttaggtaacttgcaccaagatccaagttttgttcttaactagagcttatttttcttcatccatggaatttctccaacctgcatgagcaagagattctgtgactgagctaggttctgcaaacttttcaacaatcttagctttcctagtttatgctttaggtttaaaaattctagccttagctctagtcattgttaggttattattttcagattgtttttaaagcgtttttaaatagttttatttgtactgtttggtgcagtttcacatttttggtagaaattggtaattaagaataaaattatattatgctatctaagatatatacaattgaaatcagtaatcctaaattttgatcattgataatttttattctaagtttaattatttttattgtttcaatttttattctctcttaaaaattttgtgatttccaaatagtattagaagtttaatttgttagtacttaactacaattcttgtggtttcgacctcactcatgtgagtatatacttgcattcgatacgtacacttgcatattaaaatacacaacaatcaccataggatgatcaagagctaacaattttgcaggctgctcttaacctagtggctgaggctgcaggtcatcagtagcgtaatcattctcagttctcaattttttcaaattctcactatcaacatcatcatctatttgatcaaaattatacactgtactttgatcaagtgcttgagttgtagatgtagaaggtgagggtgctccaaggacacttggagtatgaactttattagttttaggaacattattttgaagaggttgagtgttagagacaacaagtggaacatttatgaatgctaaacaggatgggacttgaacattgacactgttcaaattggtgtgtgtttagaaaatcagatttaaaaggaaattccatctcattaaatattacatttcttgagatgtagattttgcatgtactgcttgaacacttgtaacgtttgaaactctcacctggcctaggttgaaacatttggtgtaattatattgaaatttgtaagtttgtaggctcttaaataagaataacaggctaacccaaaagttttaagaaaggaatttttacaccacatactgaaattttcaacttttttatttttttactgtagggaagattttttttttaaaatactgtataagttttatac

SEQ ID NO: 298160 - DNA, 3734 bp, Cannabis indica
cgaaggaatcgactatatatgaatacaacataagttgtgtacattttcatcttttctccttttaattggtccaaatgagtccctgtagcatgaggaagaatctaccctttacattagagttgccgtatagtatattaattatatatattttggcgctaaataattctgtttaagttcttcttctatcatcttcatctgcaaaatcaggctcaactggctttttcaacgagctgagaatatcaaactcagcccctaacctcttactcccgcttctaacgcttccacctagctttcccttatatgcaacccccaaccccattccagtgcttcccgagccggaactctcctccgatctggatctgtcctccgacgaaggcgacgacgatgatgctgaaatgaaactctccatcctcttcagctccaaagcttccttccttctcttgtaacgaaaccacgccgcttgtacgaagcaagccgcccatgttcgccactgaggggagtggaacctgaacgtttgccgtatctgtttgctgtgaagtcgccggaattgagccgccacgaatttcagatcctcggagatcagagcaaaggcctcgacttgcgcaatggctttgaccgtacgtgtagacgacgggagcaccacaccgggacgaggatcaagcgcccaagttagtagctcctccccgcagaactggccgggaccgatccggcacgagttgaagaacccggtacggccaccgtttgtggtgcacgaatccaaatgtcctcggataatgaagagcattgcgttgacaggatcgccttctcggaccaggcaagttccggcggtactaagtgagggtttaagcctttcacagatcgcgtcaagcgtcttctcgtccatttgatcgaaaagcggaacctgaagggcagaagattgaagattcagatcaatttaggctatttacgatgaacttgacaggaattgggagagacttacttgtcgaactagatcgagacagaggtggcgcttgatatctcgccggagatcgacgggaaggtctttgagaatggcttcttcgtcaactcccctggttgcgatccaccggtactgatcgtatctccgaacattctgctttagctcgtgtggtagctgcctgtgacgcatccattgctctgtatcggttctcctgatcctccactcttccagtctcacggttgtcgattgaaggtatgtctatgaataaaggaaagtaaaattgattgaattgcacatcaagtttagatatcagataattttaagtttgattttttacgtactacaaatgaatttatgattcttttagcttgatttagtatgaactgcaaatgaatctatgactagtatgctttgattttatatggactgttattaaatttatagcctgtgaagtttgattttatattgtgattatagtttaaaaggtttggatttgtaagaatcaaatatccaagtactcagacttacttgcatattccctatgagcaatgagaagagaaccaatcctagaatggctacgataatggcaaaagtaatttcttcaacaatagtgcttgtaagaagattctggcctagagagctgcaatattttagatagacaaaattgttaaaaaatgaacaacatatagtaagccaaaatgaattattcatcaatggttttggtaccttagatttttcagtccccaccaaaggcaatagaaatacttgctgaagaagtctaatgacaaaactctaaattttaaagcttcgccatagataccaaattcaaataattgactacctgagccacaatgccttgagatattgcttgccttgaaccattcaactctttcattgtgattcgctatgcggcaatcaaaataccaattgcggcaaattggatactcaagattacaaacacgagtccaacaatgttcttggcgctctaatgctaagagataccaacaggaccccaaaacctgttgaaacatagaacatcagcacactgaaagttgaaagtcgaaacctgtttgtggctgtggaatattggcacatgagatcagataggaagaaatattgatgctttacttacatggcttgccatcatgtagagcataagattatatgctgctccagcccatgctgtttctgtcacaaggccggtggccttgacaatttcagatgaaagtggaaaaataagataaaggcgcaggagatactgtaaaatgatggtgagcctaagaatatttctcgaattaatcattcttgaacctctcagatatggtagtgctgcccaaattatcacctgatatgagtaaaagaatgaagttatagtatttcgaaagtgattctacatttctctactagttaatgctcagacgttaagttgaagtaattggctatttccttatcactactacactaaattcaccttatttttctctttattgttattactctgttttagattgctataagaaaacaggtggtaaaagtctattggagagaaagtgaatacctgtggaacgggcagtgcagccacaagatcgagccaaaaatgtttgcgaagataccttgaagcaatctttctagtgtcaataacaagctctcctctaccaaatactctagaggaaggagcaacataagctgttctaaaccgaatggaaatctgaacgatgtagaatgcatccactagtgacctaatgactgtgagagaagcttcaaggggtaaggatataccaatgcaataatttttcctaacagttggcaggtaaaagaacaaaggatcaacaaacagagagaccaaacatgctactaagaaaattttgttccatttgctcacaaccgggcctcgtggatccaataccaacttctccactacctcataatcctcagaaaatactcttgaaagttcttttactcgcaaagttcttcctgttttgttgctttcaggcttcttggatctgagcttgggtgcaattttcctatccatcatggaggtaagcttgaatatataaccttctttgtcttgtttgaactttggcaattcaagatcatcaagaaatctgaaattgtagcaatctcaatgaaaataaatgcagataacaattggaatatgagaaatagaatacaactttcagagtttgaatttactaactatagtggatacgctacaacttataaaattagataaatcaaagaagaaaaataagatatctagatggccaaaccttacatattttgatgtacaagaagccatagcgttcagacaaaaggaaatgctatggtttcagtccccagcttatatctgcaattagatgaaagagagcacatgattcaagcaatcaaattatgtggctatctaaaccataagaagtcatgtggggaaagaagggaaccggggaaggaagaaaaaagaaaggtgagggttgaaagctttaaagaggatcgtttcttttaggtgaaaggaatagtaaaacctgtgaatttcagttgcatattaaattgttggaagagcaaactcaatttttctaaatgacttagtcacagacagcataaaagttaaaatccatggtttcacacatcattatcagggcaacctttaaagataaacaaaatcttaagtatccttaaaaagctcttacaatagggcatgcatgttgcagatgatattaaaccaaaaactcaatttttaccgtatcttagtttttggtcaaaaagaaaataaataaaaaaa

SEQ ID NO: 298161 - DNA, 7417 bp, Cannabis indica
aaaatcaataatttgtaatttcttaaaaaaaataccgaaaataaagtcttcgctggcgcttccacgtgtcgagagactttcccgctccaaatcttatctgtctatgtgaccgtctagtgactttatctttctctctacatttctttctcaggtttcttgtcagtcatcttttctgtgatttgggtttcgggagtttgttgagccaaacgtggagtggaacctcaccctaatcctcccctttaagcaattctactgttagggtttccttagattccccactaatcttagattccaatcaattcgtctccaattttcatcgatctttacccgcctacgcctcctgatctactacgtccgatcaaaccccttccggctaatatgctggaaattgctcgaagaaatttcagtttctctattctgtggtccaatttgttcccgattatttgttctaggtatcactttctgcaaattttaggttttctttattgatcgtgtgatttgtcaataattaaggcacagatagtattagggttgttgtagctgatttttgtcgtttgtatgtaaatattggggaaattataatttttttccctgatttttaatttggttcgaagttgagaatatgtatattgaagaattgaagggaggaggggaagtagaaagtagggaggaggagaatttttctggtgattatggaagccggaggattgatattgctgataccaaaagggttttggtcggggcaggggctcgtgctctattttacccaactctgctttacaatgttgttaggaataagttccaggccgaatttcgctggtgggacagggttgatgaggtataatttttcttagatttcttttactagtttttgcatttattctaacatggtatcttttttagatttttctcatatgcgtttcatttgcttataattgaagatcatcactaatggaaagttaccgttgatctatgcatgcagtttattattttgattttgagcgtgattgataatcgtaccctttgttattttgttaggcattgaaagtaacgaatcatggttttgcatgtccagtccattgttcagagtactttgttattatttctttttcctggttctgttagttgatctatgctaaggaactcatgcttttatttttattatctcttatctatgtgttagtggaataagtcattataaattaggtctgaagaactgatacgatattgtttttcaaaaaataaaaatgaaaaattgcagcttcacgagatttttgtggttaatcacttgtgcttatttggtttttattttcagtttatattgttaggtgccgttccatttcctactcatgttccctgcctgaagaagcttggagttcatggagttgttacgcttaatgaaccatatgagaccttggttcccacttccctatatcatgtgagtatttttctagccacattggagtttaatgtgacaaaaaagtcatgattttcttggttttttgttcgggttatgtgttgctaaactctatttctgatctgctatgtagcttcacggcattgaccatttggttattccaacaagagactactgtttcgcaccatcactaagtgatatataccatgctgtaaactttattcacggtcagtagttatttattttggcttctcagcatgcaaccacattgcgctactttggataaaaagtccatgcttcatcagtttttgttttgttatatcccctcccccaatgacaagaagtctaaaatggtagtaagaactaacattcatgccatctggttttaatatattttgttagtggtcgtaggctgttggtactacattcctaagattgaatcccctcccccaattaccaaaaaaaaaaaaaaattgtcagcaagaagtctaaaatggtagcgctagtaagaactaacattcatttggtttgtgacaatttgtatgagtacttgtctgttaattaacgatttgagttggatttgacttaaaataactgaagaaaaggatcagtttcagggaaatgaacaattgtttgcattccaagtttattagtgtagcctacttatatcttttttcatatacagagatatccggtcatgttttgttgaatattttattcattctgtctactatgactttatgtaattgctttttagtcttatgtgtagtacattagtgccgggccattggttttttatgtcttgatatgtctcgaagccaagttctgttgctttattatagatcaaacttttctagtaaacattatttactgttgatctgatttcatttacttgaaaagaaaatgcattacatgggcgcactacatatgttcactgtaaggctggtcggggacgcagcacgactgtcgttatttgttatctggtaagtgctgtgccacactctgcttatgattaatcggaccaacatattctccagtttttctgagcttattgtttatccagattcaacacaggcagatgacacctgactctgcctatgcttatatcaagtcgattcggcctagggtgcttttagccccttctcaaagaaaggtatacaaactgtcagtaatttatttatttcttagtcctttatatttcaatttattctatgtgaggctctgttcaaccacaaaaaaattacacattatatgtattgtccttagctttagattgtagccgtgtcactgtatgtctaagtattcattattagaatataatatgatgtttgtttgttgtaatccaggctgttcaggaatactattatttgaggatgaaaagtgctgttatctacaactacagccccatgaccaatcttataaagaaagctcccaagtctgcaacctctcaggacttggttgcatttgatgatggttctgtggtagtgataacaaaatcagatcttgatggctatgactcaagcattgatctcaaatcaacttctgtgggaaatgagatatgggcagatttcaatgtggtttgccgtgttcgagttgctgggcaggcagctctggcgagaatctcatgcctatggcttcgttgccatgcctatcagaataacacaagcgagaagcttcacacagagagaagctgctcaataaggactgaccatcttggaggtatcagtgtggacatccatgtatactgagaaaagctccctgtagtttgcatacatactgtcaagttttctgtcttttgcatgttttttcgtcgcacagaaaattgcatgtaatgatgtttcattaagggacaaccaaaagatgttgtttccatccctgtaaatgagttgttacattgagtctctggtatatatttgagcattatggttcgaccatgggaagggttctagttaaacgttttcggtacataaataaagtcttgaactcttgacatggtgttcaatgaatgtattttgtttttgtttctttacaatctcacaaatataaataataatggatttcctagtttacgtggttatagtttctaaatacaactaaaaaccattaggggcttcggctgaatcctctgtgaaccctagaagttcactgatgaagctctgtatcgatgggggccaattgtaagaagatgatccatctagggatgaaagactatccaccaattcttctggttctacttgctttctctcctcattgtttgtactatctataaggtaaggcacaatatgtattttcatatcgttgttggagattccaagatgacctcctgaaacgtttacatactttaccctcccagcttcatccaaagtcttcaaaccaatccagtcttccgtataaagctttgtctgcccagaaacaagtgtaacggttatgtttgttcatcgtattagaaactggccaaagaatatggtaacaatgggttaatacctgttgtggaggtaaaactggtttgaaggcaccttctgggtaatatccaaaccaggaagtctctctcggtatcaaaaccttgtcattctcaaactgttgatctcccaacaaaaattaaataaataaaaataaagaagaaactgtagcattaattgaaccttaaaatcaaaagtaagaagattccatttggcattttatgattagtaaatatggataacttaccatgataagcaccaagttttgcaagctactaaaacgtttcttgtaggtggaatttctatgtccaggaagttcattgttaagctttggaagatacttacaatgctctaaatattctggaatagcctgaaggttaatatgtttatttagattgatagatgttaaaaaaaatgttttgttgggaattaataaagccttttttgttttctttccagttcagtgttatgaaaggaaaacaactcacgtttggtaatttaagatagccactgggagccaaatgatcctgcatttgaacaaccaaaccttaaaatatcagtttgttataaacatcagaacaattgagagtgaacccaactgaaacaataaaggtatttgatagtcagaaacatacttgaacgtagtcgctgtagatctctgacttgatgagcgagtctgcaataatgcataaaacaccagactgaaaaggcacacacagtaattcaggtatgtcaactggtttagttttatttttaaacatgcaactctgacaaggtttactcaccgttcaagaagctaaactgagatcacttatagataagagtagaatgataatgtaaatatgtgttacatcataatacaaatgagcttaattggattattatagataaaaatagatagtgtggtcttaagagaaatataaattgcattacctccaactcattttaaagatcatgctctaaacttaaacgtattttattgctaaaagttgtatcaccatgaacccttaacaacactaataaacttaggaagagaggcaaaaaatgtgagcatgtaaggagcaaatgtaggaaagcaaaatgacacttacaccacaaagaggaacagaagctgtacccgcatggggtcctgctaaagagatgaaattctttacctgttacaagttgaaatagaagaacttaggaaagaccaactattaaaaaacaatttaagtgttaaatgtactgagataggtatacaatgatttgcagtaaagttattaatgataaccaataatagtattacttatgtaggaaaatattaaatttaatggatcttaccggcggtcctccatcgcaaaattccaaaacacctcgaccaatcagattaccctattgagcaaaacaaattttaatgaataattaagaactaattttagtttacaaggttaactggtgctcaagtttttaaaggttctcttgaaaacagtataggagttgtaataaatgtacaatgagaaactggatattagagtcaagaaacaatactataaaacaaaattagaaatatgataacaaaattagtgtcaaaatatgatcatgcatcttattgcaagacataacaactgaagtatgctctgctatatatttgtgtgaaactatagccttatagctcacctgtgagagaccaactatgttataaccctttctcagttcttgcatttccttaacctgtgcttatatttgccaacatgttagatttaagagaacttaaaagtcaatctaacaatttgatgaaagcaattcaagaagcttcaaccttcttgcacacgacttcggtctgcaaaacacattaagaaaaccctccaattacatgtggaaaagataaagtttgtaaggtttactacaagatagtcctagctttcgctctaacctgttcttcaagaggcagaaaccaagaatcccatgttccacttccaacttctctgtgagaaggaaaatgtataaagtagtgtcatgaaatgtatactgacataattaaaataaccagaactggaacatgtatgactcttttaagtttcttacttgattttttcacaaatcaattaaaggtatattatgttagtataatgagttattatatgacatcatgaacacaacatgtagccaaataaagagtaactgtaactgacataccaaaggtataaaatgcaaagttctcaaaaaaaaaaaaaatatgataataatggtttgaatacagcattgtcatgttgtaatttattagcgtacatgcagaatcctttaacaccggagaattgaacaagttggtcggtgaattgtttaacacctcgattcgagcactgatctccaatgcctgcaaaggagaaatataagaaaaggtactttgatatatcaagtgtcaactggcagtctgtcatagaaacatttcttagagaacacataaaacgtaggtaaaatggtatcagattacttctttgattgaaatttagaaaaatggagaataaggtatcagaatcaatagagtttgagtgagataaatatagaaatttttccagccatttcatctcatatacattctagatttatctattttccaaagaaagagtaacaagttatgtaaagcacacaacacaatccttatgaagtcttaatttagcaaagaattttagagctcgaaaaaatgaaccagaaaaaaaaatcacactgaacccacttcatatttggctgccatagttgcatagataaagatcataaatgcatgacaaccgatttggaaatataattaaattaaggagattaaatgtgctccaataatataggggagagcaacagttacaaaacactaaaacatattttaacacaaaattcaaatacccaaaagcagaaactaaaatcccatatacaaaaacgtatgaaccattaaaaaaatgagattttttttcactgaaaagggcagataaaaacaaagccaaatagaagagaggaaaattaccatgaagtactataaagggcaacgaatgtgatattggagaaactataaaagccaagacgaagatgaaggtatgagatggccaagtaaaccccatgattctaacttaatttttttaggttccaagaagttttgaagggattaaatatatgatattcgaagtagcagattttgtgtggtagttgttgataggtgaagagagtgcattgaagacggagacaggtggtatgtatgtgataaatcaacacagtattgattatttgtcagctctgtatttgtctatcggtgaaatcaaaatcgtttctcgaagtcaccaatgaattgcagtgccagaattgttggaggcttggattctctgtgctgaagtttttgtttgttaaggtatggactacctttcactttttttttctttatggaaaataagttcaactacctttacttaggagctggtcctcaatatgggagaattttgtatgttgtggttgtttaagttatttgtaaaattttaaaaaatttaaaaaatttgggtgctgtttggtaacacttttgttt

SEQ ID NO: 298162 - DNA, 1190 bp, Cannabis indica
ttattatgcatgaagtagagaaaaaaagtttgtagagtatatctaactgattgattatcggcatgatgaggttatataagaatgttcgacggtccagatcttctgcaatggaaggcatcattttgggctctccagctgaagtccctgaactgaaaatgtcaacagagttttgagaaacaaaaattataacgtaaaaaaacaggacagaacagaacagaacagagtgatgacctgcataacatctctgttattgggtgaccagtaaggagagatgagtcttcaccatttgcaattctttggatgaatggtcgaatgtccttataagtgattacagggacacgtttcttgaacattgaaacatcatctttcgttcctttatccatgtacttactcagatactcagtttcacagttgcttctcaagatttctctcaagatattttcctgaactatatcaggctccgttgtcagcctttctatctccttcaaggcctcctcacctttgtactcaagtttcttcccatccataattttgataacaaagcacagaagagaagagaagagagtttgggacttagataatattattattatgtgtgcttattatatgtagaacagattttggaaacaagggaggggtcttatatataatgagtttggctaggaagctatagctatatgttgacacatgatgatcatgcatgattttactattattttatttttctctttttatatataataataatcaaaataaaataattagagaaaaaggtagaagaagaggaagaatggtttgtactttaccatatgtataaataaataaataatgcatccgaagaggaagcaagtatttagtggttatgccataaaaaaaaaaaaaacgaaaaaaaaacctaaaaacctaaaccaactagtaagtaaaggtacggaaacgaaaacggaccgtaaacttaaactttcgttcgaaaccaaaactaactaacctaaaaacctaaaaaacgaaaaaaaaagtaaaaaaaaaactaaaactagtaaagtaaagtagtagttggtacgaacactattagtcacgaggggctaagttggtggaggtccaaagcggtccatataagctttctattacgccatctcctcttgagtatcggtaaacccatgctccatgtcactcctcatagtgaccatgtaacc

SEQ ID NO: 298163 - DNA, 2708 bp, Cannabis indica
ttttttttttaaaaaaaaaaggattttgatagtaaaagaataatatttttggggtttatagtttatttctttcctacttctaatttagtttgtatacttatactaatttattggtaattatattgatcgaaaacattttgtcggcacaaatcacttttcagattgtaaaacatgttaatgtgtaaagtttaagggtaacatatcttttattatagccaaagctacataaatcatttacttgtattcatgattttgttattttagaatatttagtctctacctataaattcttccactcagaatctgaatttgctattaattaaactattatttagctttaaaaaatactaaaaaaaaacaaagaaaaacatcaaagaccatgacaaagaatcatgttacaaattttttcaaaaaatattttagactcaactagtaactattgaatgtggtaataatttgaagtgggcattttatgattagaacatgggattcagtctgacctctgacctcgacagtgatagtgaataatatgatatggtagataaataaaggtaattgaatgaaatctcaacggtcacatttcagaactcagagagagagagagagagagaataactcccaacggtcacatttcagaccccttttcatctccattgacaaaactttctaaaccagtcttcatttcgagatcaaaaaggtacccactcacactcacctccaaggctctactaagctcaactcacactcagattgcggctgctttaatcatggtctgctttctagcttgcttcactacttctaatcgcccaaaacatcaacactcagataacgcaactcactccaaataccaagtaagctcaccaatacagtttacttttttaatttatttattttacttgggcactttttattgaaatttaggtatcttatctgagatattttaggcccttaagactactgaatcgcctcaactcattgaaccaccaaagcaagaacaggctggacaactcacagaattcataagagaatcaaagtaagcagtttcttaagatgggatttatctgggttttgtgttattttagtgggcattgttttattaatcttttatatctttgtttatgtgtttgaataactcagagatgaggttgaggaggaagtaaattgttgttccaagaaaagggtaacctttgatttgaatgttaaggcttgtgtggcgccatctactaaggaaagtagctgtgatttggtggaaactaatgaggagaagaagagtggaaatgaagaaaagaatcaaaagataaaagaaatgaaacccattttggatactattgttgggtcttatgttccaaataataggtaccaaaattgcagaaaaagtactgatgaatgtgaagatattggaggaggagaagatagcaatgtggaagaagatgaagatagtgaggctgatgataaagggctagtgctgcaagaggaatcttctgaatcactgttttctttatctatagattctaggaaacaagtgtgtgatgttgagaagggtgaaaaagaggttagtagtccaatgccagtccctagtctttctgaggagaaagtaaaggcaattgggtcaagtcaaaatggcgtaaaaaggtctcgatttggtcattcttcagtgttgagcccaattgaaaatgtcactcaatgggaagtgttcaaagaagagacaccacttccaatatcacattcccagcttgtgaagcatcatcaagagaaagagaacagtatcagtttagagccaagtttcaaggttgaaaggcacaatttaaaacccaagtttagtgaagtaaaggctgcagagcaagaagttggggtagacaccagcctatctagctggttggttggatcagaagcaacacctaaatccaatggtagtattggtcactcttctgaagactcagagtctgagaaagaaaactcatctagcagtataaaacagaggcgagttttaggagaattgtctgaattttcaccatcattttcttcttcttcttcatcttcaagagggttaagaagcaagagcagtgaagcaacacctgaaataggtactgttgggagttactggattcatactggtcagagtatggattcaagctcttcttgcaaagggaccaaatctgttacaactgaaaaggttagtgtttttttttttaaaagaaatatatatacatatctaatgaatatttctttcttgtgcaaagttaaaaagtcttattttattttatgttttttgtggggttgtaggatcaaattgtaaattataagtctactccatttgaggccaaactagacacagctttggacgtggctgtttgctgaagtttaccaactgaattagtagtaacaatgttagccgttgtttttttgctttctttctcccgtattattttcaatggatatttgaaatttataataagtagactatgtaattagttaaattattgatatttcaaatggtatagttttatgaattgtttttatataaatataatataaattttatgtgaaaatttatatttataatataaattttattgtctatctcatccctctcctgctatggttaaatacattggtgcaaagtactctcctaattttttcaactctattctttaaaatattttattaaaatcttacttttttttttattttacctaacacatttatat

SEQ ID NO: 298164 - DNA, 3571 bp, Cannabis indica
tcagtatcttggtgataccctacgacagaaaggatacaagggttagagatatgagtggaatgagacattatattccgctacaaccactatattgttcttgatactttatatgtgtttatttcatatcgttttagaatttcatgtttaggatgttaataacatacttgttagtaaatctagatcctgataaaataattctaacacattgtacatagaattaaaagtgtaataaaaaataaaattacttgtatttggccaaagaatgtaactagtagtgaggagtattggattaatacattgtaaagatttatagatggggtaggtcctctaaattggaggatgctattaggttgtaaacatttttttggttaacacttgctgatttaccaaaaaaaaatatgtaaaaaatgctttttgatattaatgagtaaaaaataaaacagaataaataaacttatggggaaggaatttgtattcttgaattaagttgatagttgatgaagaagaaacccaaacaccgaacaggtaagcaatgattttgcctgatatatattttttttttttgtctaaagataaaataaattactgacatatatataaaagtttttgtacgtctattaaaaaaatatgttaggccccattttcaaatatcattatatattatatataaaacctacttttggcaaagcctttgtatgtttattaaaaaaagtgtcagacccatttccaaatattacttgctatgatattgactgttgattgcattaattttttagacacttaatcttgtaacttaaattctatctctacaatatattaacttgagtgatatatactggacctttcacatattgaccgtaacgaattgatactacatttgacacattgatcactattttttcaacattctttttataagttgagctgctacttttttcatattcttttattcaaataattgctaaaagttatttgattgatacctatgccatgagtcataagttgactccacctatttatcagcctccttgagcgcaacatcaagagacaaataatgactactatgagtcctacatattaactgtggtaatttatatttatctactttacaaatgaagacgtagttcattaaatgacagctattttctctataacataactataatttgagtgctatctctttttacattttattgcacacattgagtgctatttatttttaagttttctagtaaattgagtgctagtcattcttatatttccaagtaaattgagtgttgtatataatttcatgaattaactgctatttatttgattatttttggtaaattgattgatactccactaatgatatttttttaacttaaatgttatttctattatagatttttattgataccttcttataaattgggtgtcaaccattacgataatttgtaaggaccaattccaacttttaatcaatgtcaatgctactataaaagcaagggacaccattcccttgaatcgggtttctcgtttcaactactccataaaacctgattggtcgtagttgaaactagtctacacaagcttgaatggaagaaattcatccacattttaacacacatgctaacgtgcccgcaaaatggggcatgcaccatataatacaacattcacgttttaaagtgttaaaagcattcaactatgcgagctgaatgttcttcgatttgatttaacatagaacacaaccaatcgaaccatctatttcaacaatgaaacttaaatttgggcatttcgcaaatcaaaattttaaagataactcaacttaaagagtagggacaaactgtagagggcaaaattgggctcaggctcaatgtcacatgcaatgttttcaaagaatactcaaacaagattgggttggactatttgactagttatgatgatacgatcaacataccaagcccaataggcccaaaacgatacagtcaagtcaaacattaacattattcgtgagccaacattcagctcatgatgattcgacccgcatacgagactgagtcttatcactcatctaacgatttctaaagtgatcaatcaaattgaccatgcacataacgatctccctgagcaagtgggagaggggcacttctcaaggggggtgagcaatcatgagtaacgcctttccatggatgcctataagagccactctcagttattgaaagagggacatcaattttaatcatctcaatacctcttacttattgttcattctctcattctctctaaaactacatacttgtttctgcagtcaagataggtggtaacttagtttgatcatttattctcatcttttttattacaatattaataatcttgttgacttgactgtcggagtccctttagctggcaccatctcggtgtcctaaggtttaccggttactctcgtctttgttttacaggttgtcggtgcccgcgtacgattatctttgattgatagtggattttagcatccacagataccagatttggatctagttttcatcttatgtgtgtttgctgtggatgattggggaatagggttcggcacatgtgtatcacagattggtcctgggttaggctgaggtgggaagatggtaatgttattgatggaatcagcttgagaagtgctggcattggctctagagacagattcatttgtatggtgagtcctattcatagtagctgtagctattatagtgtcttggagaggactgacactaacaatagatgtatttttctatgcatgagtagtagttggtgtaagaacaagagctgacataattgtagtggtcctctcagcaacaggcacagtaggatctgtaccaggcacaatagcattaggtgcaacatgtacaataggtaagatagtatcagttgctatgggagaggtaaaaaatgaagtagtgggaaataaagacattggggaagagtgtacctttacagaatctgcagcttgaagagcttgaaaatccttttcattaaacaccacgtttcttgctacacaaactctgccatctttgttttcacacatataaccttatgattcattgagtagccaactaacatgcatttgtgactgttgtatggccttatatgtggataacatgcacatccaaaggacttaagcactaagtaatcaggaaccttatgaaacaaacattcatagggagatatgtttccaagtactcaagtaggcatcctattaataagatatacaacatgctgaaatggaagccactagtaagataaagacaaaccagcacgtgctaataatgtaagggcagttttcataatgtggcgatatttcctttcagctcgaccattttgttcatgatcataggggcaaggatgttggaaatagagtccatgttgagtaagaaaggtggctagagacctatattcacctccccattatgattgaacagacttaatagggagatcgaattatttttcaacaagaactttaaattgtaaaaatgttctataggcttgagattttgcaaataagggaaagatccatgtatatctactaaaatttgttgggttttat

SEQ ID NO: 298165 - DNA, 964 bp, Cannabis indica
tatatatatatatattcattcatctacttgtaccatggtttttgtgctacttttaagcaaaaatgacatgtttccaaaatttgcttatatcacttcatcaaagtgtcacaatgcttgtttcataaaaaaaaaagccatgattagggtatgaaatttataccttttaaagctaaaatgattgggattgcatattttaggccatatctcaaaaatacaataatgcatcataaatcaaattaaaataatttcattatttagttattttttggttttgataaagaatttattgataaaaatactaactttgtgtttgaggagaaagatggggagttatgcatagtatgacacgaatggatatgagaaatggaagagtgcagtattgctccaagccccaccatatctcaatctcatctctccctcttttggaaggattcatccattttaataattgaattattattataaaaggttctaaaataccatcatattaaattttgtattaattactattgacaatgttctattaaatttgtgtcatcaaaactgtaatttttttaaaaaatatacattaatattgtcaaaaaaaataatgtatcattaatatgtatgggcaagcacaaataatagtagaaaatatattagcattaaagcacatataattttctacctaacattcaatttaataaattaaaatgtttcactaaaaaaatcaaactatttattataataacaacttagaaaggtttattataataacttagaaaatgccctgattactttagagagccactacatggaaataacattaaagttaatgtggacaccgttatattttttgagactaattaatttgggataggttttgtggttcgaaatgaacaaggtatatttttagaaggtggtaccaaactttttaatggttggactacactaatgggggtgtttggaatgggttaatgctaac

SEQ ID NO: 298166 - DNA, 1238 bp, Cannabis indica
ttttacatcaccattggagttaccttttagcaaaatattctacaaattggcaatacaccacatttataactctctattggagatgctcttaattcttcttaggtgagaacactactactttattctcatgaatgaggatatttttttttaggaaaaaaaatattattaaatcaaatcagctgttacaaaagcacttaagaatctaggacaagcatctgtccacacatggactccaatcgaactagtaacagacttagctagtgtgtgggctacaccatttgcaaaacgcgaaatggcacaacaagaaccaccaccaactgtagctaaaagagaaatattctcatcaataatagttttaaacataatgtttgaacttggacaattgatccaattactaacaattgaagaatctgtctccactctcaccacattgaaacccaacctagacgcccaaatcaaccccaaccgcaatgctaacaatttcgccaccaccacctggaactcaccagctccacctatcgcccatgccgcccacaataccctaccctcaccacgaatgaccccccaaaactagcaaagcccctacccggagtgactaccacattaactgatagcacaaaactaccatcaacaggacgtagccgcctacagcaagcaccagaagccccacccccacacccctgctagcccaccccagccccgaaccaacaccactgtccaacaactccgccttcaacccagccgcaccaacaccatagaggaagaaatactatcccaagatttgaaaaccatgaatctctcgttttcaatgttgcccttccaccaatatttcttaaccaatgcatcaagtgagcgacaagttgagagaggaagcttattagtggacattgcataaatgggcgtagcagaatccattattttcaccataattgtccttttgacataagataaaagttttatcttccagccttccaatcgctaaaacatttttttatatcagttgttcatagtcttctttcttccttcttttaaacacaaaagggtttccctatgtgtttttcttctcccttcacttgttgaactctaagtacgttaacaattgatttgtcttctatcgtggcttatattactagtaaaaagcacactagtctttgatttaccacatctctatccagaccagctttcataaagagagaggcaatataaaatatgcttagcttttgttgggttttgtgccc

SEQ ID NO: 298167 - DNA, 4880 bp, Cannabis indica
aaatttaaagttcaaatcatccgtcataaaaaaatataatagtttaaactttttatttttataaatatgtataaaaattatataatatatagattatatataataaaaacacacatatatataaaactcttttaatcgggttggtcgggttagttcgggttgatattatttttaacctgtccaatcgggttatattttcgtcgtgtttttcggtttgtatttttcgtcgaattatctcagttttgtttggatgggttgttcgagttgggcgatttacaaaaatttatatacagccatactcaataccacgtagctattaatgtaattatgtatctggtctcgtacaactttaattttttttttaaaaaaatatcactaatcaatcgtaacatgtcacctataaaaagtgcacaataccaatgctctaaaataaatagctatttttttcattgtttcctcatccattttcattagtccgagtctccaaaaccactgatattcttcaacaccacctttattttttcttcaaattcacacaaaagaaaacccttaaaaccccaaaactttactccgtcactctctctccagtttccgacttgggttttccggccaacccacttgaccggttctccactcttcaatcatcgctttcaggtaatttagttactacttatgtttcatttctttgtatgtatttgattaatattattcacagtaatgtgaaaacccatctggggttatccttaatagtgagtttacttagcttagagtaaaccctgatgagatttttcttgaattcatactttttctcttgtgggttagatttacatgagtggtaatagacagaggacccttgggggtgggggtcaacatgtattggattacttaaagcgaatgcaagcagagaatcctgctttcttttatgctgttcaaagtgatagtgagcattctggagggaatatattgtgggctgatgcttctgctaggttgaactatactcactttggagatacagtgatttttgatactacatatagaacacaccgttataggttgccatttgcctcttttactgggtttaatcatcatgggcagccattgttgtttgggtgtgctttgattcttaatgagtctgaatcatcctatgtttggcttttccagacttggcttcatgccatgtctggacatagtcctgcctcgattacaactgatccggagaggctaatacaaagtgctgttgcccaagttcttcctggaactcgccatcgtttttgtaagtgggcgatttttagagaaactaaagagaagttgcctcaactttatcagtctcagcctacttttgaggctgagtttaagaaatgtgttaatgagagtgagacaattaatgagtttgagtctagctgggaatctctgctccaaaggtactacattatggacaatgagtggcttcgatcaatgtacagtgctcgacaacagtgggttcctgtttatatgagagatgcttttttcggcgaggtgtctgggactgagggaagtgggggtttgaatctgttctttgatgggtttgtgaatgcgtccaccaccattcagatgcttgttaaacaatatgagaaagctatagtgagttggcatgagaaggaactaaaagcagattatgacactatcaatactacaccagttttgaaaacaccatctcccatggaaaagcaagctgctaatctctatactaaaagaatattcaaaaagttccaggaggaattggttgagacccttgctaatcctgcaaccaaaatagatgactcaggtactgttgccacttatagagttgccaaatttggagaagaccacaaagcaaacgctgttagcttcaattcttttgagatgaaagctagttgcagttgtcagatgtttgaatattcaggaataatttgtaggcatgtattagccgtttttcgagcaaaaaatgtcctgacacttccttctcagtatgttcttaaacgatggactagaaatgccaagactggacctgttgttgaagaacaagcttcagaattgccagtacattttcgagattccttaactgttcgctataacaatctccgtcaggaagcaatcaagtttgttgaagaaggtgctaaatctatccatatatataatgtggctttagatgctctacaagaggctgctaagaaggttgcttctataaagaatcgaagttctggtgctacacaaggtgctactctggcaaatggaggtagccaagagttgcattcaaatgaagaaaatcaaacggcagcttatcagtctgtagtaagttctaactactttccagtatccatttagttttagattattcctttactctgttttttctctggtagcttgtataactcaatctttgtgggcagttttagcttaacagatttgcatctgcagctcttatctgtgcgtagaaacatatttatttatggctaattaagatttttgccccctaattttgacatgtaccaaatcatgttccatgaattttttttgactgttaaaaaattattctgaactattgatattgttggatttaaggatttttattcaatttcatttaattttactaattcggtgattgtccatatactaaatcatgtttcccgaattttgatatctactaaattacgtctcttgaactttgacatgtgtcaaatcatgctctctgaactttcatctatgttagatttttcttactaaaattagataaaaatctttacatttaacaatctcaatagttcaggaaaaatttgtaatggtcttcaaagtttagagaacatgatttggtacatgtcaaaattcaggggcaaaaatcctaattagcatttatttatttatctttagaagagttgtgttgacattttttctctgtagtgtttattatttctttattatatttgacaaagtgtttactatttctttgtgattgtctgtaccacatcatcctcaatgagcatgcagtttacaaaatttcatttacatagtgaaacaattttctgctgtgtattttgactgatgtacttaacgattattatcgatgaacatcggtctttgaaattttcttctttttgtcatgaattcatatggggttctgtcaccaatgaattcatgaacaaccagataaaattgacaacatatgatttaatatgcacttgtatccatcttctccctcattttgcaggatgagaaggaaaagaaaattaacgagctaactactgagatagagaacactaatcaacggtgtgaggtatatcgaacaaacctgcttgctgttttaagagacatggaagaacagaagttaaagctttcagttaaggttcaaaatgcaaagcttagtttgaaggagtaaaccagagattgcagaataggtcttattagcattttccactgtatttgtttccttctctagctgcgcagagttaccaaacgccatgttcgcctttttttttataggcttatctaagcagaggagtggaagatgtggtggactggacatatttgtattgaaatgcttgtatgtttttactggtatgaacttgaatttcattgttataaaaccccgaaggagaccccaactagaacgaaaatggtgttactctcagagagctgtatctaaaggttcctaaagacgggaccacaactagaacgaaaaaaaacgacacgtcgtttattagttaaacgactcatcaaatcggttttgttatttcaccaattataaatgttttggtacaaagttatagaaccatgtcttcttaactttgagtagtttgtaaatggacacaacaaagtctttctttgatttcttaatagaaatttagcactaagcacaagcaataccagctttttaatcttataacatcaatgattaaatctcacgcaatagtaagtaatcacacaacacaattttattatgagataaagttttccaagaataaaagttggtcttcaaaaaaataatacttaaacaaaggaataatctagtgggaaagaaaagtaagagggcatataagaatatgaaggattctttcaaatgaaaacttaaaaaaaaaagtgaaggtaagatacaaaatagtattgtggtaggaatcagtcaaaagataaataaataagaactatgagttaaaggaaaaaagttgcactaacataccttaagaataaatcatagaatgtactactttttttacttgggtaaatacgtgcactaaaattatgccgtaaaacattatacacagtgatatgatactctttttaaacgaggtaaatatgatttgttaaaataaatagtcacatcactgtatataatattttagtgtacgtattatcacctttaaaagtgatatttgatatttttttcttctaaaatcataaccgagactcttaatattagtgaaagtgtaaatttaaaggaataaagcaaaagaaaaaaagaaacaatgttaggagaaaagtaaaagaaaaaagagaggaggaagaatttcaaagtgattcttaactagttactatgcatgcaattttagccctctatcatagtaataatgagtttaaaattttttttgtagagtatgttatatctaaaataaagtgtgagtattattaggtatctttttacaaaattttactaaaaatattattttaaatgcaaaaaagtatactataaaaattttagtaccctgaatttagatgagccctaactcgcttaaccaagacctatgtggaacaaaaagagtctctctcatattacaattgtatgcatttcattttaattcatcaatttcattctcttccaactatttttctaacttatttaaagtagttgataagtgactcaccaaccaaaa

SEQ ID NO: 298168 - DNA, 2239 bp, Cannabis indica
aatgtaacaagaaaaaaatttaattatttttttatcaattttttttatacattttaaattttattccattccaatttttattcccattccatttcctatattttcagttaatgctttttaattacttttgttttcccattaccaaaataaacaaatcttctacaaatatctggcacggtcaaaaacattaaacacccataaaatctccttcaacgacacttggccaccatgcgcaattaaagcacaactggacttttcattcaaaactccagtccatatgggacccacctccaaaaatcagcccacaacccacaaccaagcttaaatctcgctacgatcaacaccacacgtttccaataaccccccacacccgataacaaaaccaatccaaatcaattcgtacacgtgtaaaaacccatcacattctgacacgtggcaacgtctccatcaccaccctcttctaaaaagctgcaaagcaacttggattgcaggccttgatgaactgtaacacgcaacacgcgcgctacgtgtcaatctctgcgcctattcttctctgacatctccccttgtatctcgggccccactcaacagacatcccacgtgtcatccaaaccatcaactacgtagcaaattcagtgctttttttaaaataaatttgaaaatgacggtagagattctcggcgacgtgataatctctgtacacgtgtccctctatcaccgccctagccatgcactaaaaaccaaacacgtgtccaattctacagacaatgcatgtggaacctccacgtggcgctccccgaaccaattgtaggctagttaattttttaatttgatttatttttaacgattaataatccaaattagtgagtggtggtaaggggcattgcttaacgcatccgctaataaaatataaatcatctgacgtgtcacaaccgtctttatctctttatatattcctgccacgtggcaactggttgtctctcctagcttctctccctctctctaggctttcatatatatatatatatactttcgtattttcttcctttgactctccaaaccaaacaaagctcagatattttcttagccatggcagagatagagcgagaagaggttgaacttgaattaggattatcaattggaggaagaggaagtttcagaaaatacgaaacgtcaactaaccccaatattggctttaatttagaaacgagagaaattagtacctcgccggcgccggtaccggagagtgatgttcttgatgcgaagacgaaacgtgagattcacgcgatgaggagacaagaggcgaagaagaaacgacaagagaaaaggaatcgagggttaagaaactcgaacaatatctctcctgtaacagagaatcaaaatcaagatcgcgatgatgaacaaagagccagtaaaagagagaagagtaatataaatgagtcgcaaatgagtaatattagcgaagcactgccaaatcagtacccttacacgtcgtttcagttcgttccgtacacgaatgggtatccgtacccatacatgatgccgtggtggacgccaaacgcagattctaatctaacaaatgtggttcaacccatgccttgtcgggtcggattcggacccgattacacgggttcggataagagcggtgaaaaaacagggggtgaagataggaaaacgacgtcgtatggtggttctactagttcttctactgtaatttcagatagtaatagttctgaaactactaatgtttctgaatcagtggttgaaactagggtcgatgatcggaaaccgccgaaggctccggttcgaaatcggaacgaaggagcttctcagttgcaacaaatgccttacgtttcgactaaaggagagggtccaaatgggaaaacagtgactggttttttgtatagatatacaaaatctgaagtgaatatagtctgtgtttgccatggaactgcattctcaccggcggaattcgttgaacatgccggcggtactgacgtatctaaccctttgaaacacatcactgttatcccttttgagtaatagtttatttatttttttcaaaagaattaggaattttcattttctttttaaaaaagggaaaagaaatagtacatacagtgaatttaatagttgacattaatcaaagatgtgttgattatttatttatttatttttcttgatttaattttactggaaagggaattgttaaggtttatgattaagggtaaatactatt

SEQ ID NO: 298169 - DNA, 1300 bp, Cannabis indica
atattggctgagctgaatcaacagcaacagagaaatacgattggtgttgccggtctgggcttcgaatcttcttgtaaggtctgggtgacatggaagcttcatctaaaactggcttccattgacgcctctccaagctgaagcgaagatccatatccatctgggtttcgtcgacacctttcttggatttaccactgttcttagttgcggccatattaatgagagttttccaccactcactataaataatatcccgctcgctctcttggttttacagaatcagaaacgaaagagattgaagagaaagaatttaagatgggtcaccaaaacttagacacgtaaaaaaagaaaaactaagagattcgaccaaaagcaaaaacacacgcacacactaaaagaaagaaagtaaattcgagttgaaaaacaaaagagaatacccagatccgaataatagtcaaggattaaaaaaaagagagacttgtgtaaagaaaagaatctgggggattcgatataaatctaatccgattgatccaaaaatagaatcggatacgaaaaagtgtcgtgtttacagtaacccatcttaaatatctgaaactgaatcaattatatgaaagtaaataaaagtaagagggagggagggagcgagcgtggaagagacgaaggcgtagaacagatgatgatccaagaagatgtcaacctgtgaaagtagcagaaggcgttgttgagtttgagagacttttgggtgtgtaagaaagggcagggaagttatgtttttctattgtatttttgggttttgatgagaattaaggtaagagtggcaggagaggagaagagagtttataagagagcaggaaaagatttttttgattgaaaaaacctgtgtttgagacagaatatgtattactgttactctcgtttggttggtacttggtagacattgcttggccccacacggcttcctttcattcttctttgtactgtctactttccattgtgaatgtgaatctcactcaaccatttcattttcggataaattggttatttgccgtaaaactcaattttatctttcttttatatacttaatctcattatttgtctttttttccctttaattttgtttataaatgtaattatagttggatatcactattaaatatcaattattattataaaatattagtattatgtaatattataatttaaagaaagaaaatagagaagagatgagaatttttttagtgttttattcgaataggtgatctcctatttatacacataccagagtgaaatattaaaaaactaa

SEQ ID NO: 298170 - DNA, 3071 bp, Cannabis indica
caaaagtgacacttcttgtagtggcgtgtggagaatgggaagggcattgctatttgttctgaaaattggaatccttcaatgccttttgttttgtcagctcctgctcaaattgatggatctagcaaggtgtgggtgttacggaaagatttagtaggataatgtgttcattcgatctattttcttgcctcgtgaagctaaatctatcatttctattcattggtcctcacatgatgtgcaagataaaattgtatggaactttgagaattcaggtattggtattctattaagagtggttattggcttggccttctcaatctggctgctccttgtgcttctccgtctggtggcatatctggttggtagaaaaatatttgatctcttaatcttccttcaaatgttagactctttgcttggcaagcgtcccataattggattcctactaaaattaatctagcttgtcatggtatgtgttatctgatgggttatgtactttgtgtgggttgaaagatgaaactattcatcatgctctttgggagtctactacattgttatattgcacgaagctctgtgagtttgtgttgggggatcgtcttgttcattgtgtagattttcttgactttattcataggtctattgatgccctttcaaaggaaataattagttatggtaattttatggaggatttggttcagacgtaataaaatggtccataataacgtcaaattgactcttgtgctaactgtgtattgggtctgtgattatcttgggacgtttcataacaaacaagctttggcagtgtctccctctccctgtatgaaggcataggcagtagacatctctactggtgggacaatgtcttggacaacgcctctttaggtttcccaaaatggaaacttcctcagcttgggttatctcaaaatcaatgcagatgcttctatcagttctttgggcaatttgtagtggcttgggtatggtgattcgtaatcaattgggaatagctttagcttcagaaacttggcctttttggatggctgttttattcctgaagtggctaaagttttggctatccacaacgatcttattcaatgcatctcctttaggtatggaaacattgttgagtctgattgtttgaataatattacacttaaactgaaaaataatactctattaatagatgatatatattattgatcttggtaataggctccaagatgttaattttgtgcattgtaatagatcttgtaatggtgttgcctatatttttggcaaacttgcagcagaaaaaaaaaggttatttggtggtcaaagaatcttacttctattcagaactttttaataatgaatgctatttttgaataaattatcactcccaccttagtagagcgcttgttgttgttgatgttggtggttgagaacttattaaaaaaacatggacagcattaaatacatatttacttaaaaaaaaaaagcattgacttaaaaaaaaaaggcattgactcaataaaacacataataatagtagtgtatcatatccttttcctatataagtattactcttctaaccggcccttctccatattaatcacaagagagttgttttgagttaaaagagaaaaatagagtattctcagtctcttatcttctctcaaacaccttcttcactttttcatcaagagctagctatatagcaacataatggggttactttcaaacatgattaaacaaagtcagctcaaagaaggggatcacatttactgctacaggagagctcacacctactctcatcatggtaataataatgtattaatttcatttgtgactaaggcttattctttcttctttgtgatgatcattagttaataagaaataaatattaccatatatataattgcaggaatatacatgggagatgaccgagttatccatttcacaagaacaaaaacaaagaaagtgagcctaatacgcaccgttttcgggagacaaccctgtgaaaaatgtgggtataacccaaatgaggagaatggagtagtgcagacctgtttgacgtgtttccttaaacaccacaggctatttcgatttgaatacaatgctggtttcagcgaacgtatcctcaaaaagtcagggacttgcagtgctgtttcttcagacatggctaagaaggtgactgaacgagccaaggatatgcttaacagtgataatcagtttggagagtatcatttgatcgataataactgcgaatgctttgctttctactgcaccactgggcttcgtaagaccatgcaaggaaatgcattcaaagatgcaattgagtctgtttataaaactcttatgagtggagaacaccattctctcaaagacatttctgaatctcttttaagaggtttcattgagaaaaagatccgcagggtcatagatgagcgtgatcgccctagatctgagataactaataatgatgatgatgatgatgatgggtcagaccaagatcgatcggattagatctacaccactacgtactgtttatttatttatttatttatttatttttttttctagttttatatttcggtcaattctttggagtatattatagtcttctctcgtacactgtatgaatgttgtaacatcctactactaagccatgttagggtgtttttttaagtactctcataatctttgttaattaaaaaatcttaatataaaaagtgtatttaataaagtgtcgttttataatacttttttaattatttttctgtttttaaaattgaaaaagtgaaaatatttttcaaagacaggttctataaaactgttttcacttttcaattttttaattaaaaatcaaaattttaaaaataaaaaaaaaaatcactttcaatatttttttaaaacaatttttttcttaatcaatattttagactccgaccaaatccggacccaaatcccctcccacggccctggctctaaatctggcctctgagaacccgaatccgaacctcggacctagacccgacttaaataaaattaaaaaatgaaaatgaattaaagttcacgctttgatttcaattttcatttct

SEQ ID NO: 298171 - DNA, 1517 bp, Cannabis indica
aaaaaaaataaaaaataaatcttataaacttaaaaatataattttttcataaaaattaatattttatgtaattatctaaaaaaaaattatatattgttcttgttggtttcttacttgttctctcatttttacacaaataactatttttttttttaaaaaaaaaagaacaaatatttaatgcatgttagatatagaaagccatcaatcatatgatgatgatgatgagaattagtgcagtggtaaccaaggtgttgataaaaaaaaaggatctgaaattgaaataaatccaattaaatattataagtgaaatgaatgaagtcatctcactctcaactgtaccaaaaagcactgacccaaaagcaaggaagggaaacaaatgcttatccaaacaaatccaccggcctttcctttcttacctacgtacagctcaattaaatatatacaataattatttcctctttttcatttattttaacacctttttttttaatataactattatattagtattatactagcatacttttggttgtgttgttgtgtgttaattaaagattacttaattgatattagcaaaaatacgttttttttttaatggataatcttcatcaaacaccaaaaccctagcaaaaatacttagcacaaatcttacaaaaaatgatcaaacaacgaaagtaaaggaaaaatcttctaaaagaatagaaaaagactatccaaataagaaaaagattgatcatgcccctaaatacaaacctacccgaagtaaatcgccttttgaagttttttacacataagcaacgaagctacaaattgctccaccaaaaatacatcgccttctgtgtttggtagcggaagttatggattaataaagcggattttccattaaaaaaatattaaaaactactcatttgaagtgtaatatttttattattgcaattaaatattaaattctatataatttaatataataatttttataaagtataattaattaatcataaaccattacttataaataacaatatctaataacaatactcttttaaaaaattaccaagaatggtaaaagccacatgctttactagtactttatttttaaccttgatacaactttggttgtattgtatgaatgtatgtagtagtactgtagtactaaatactaatactattatagtcatttccctttttgttttttattaaattgtaattgtcagtcaacctttctccaccaattagatcaaactcaaccttcattctgaacaactgtatatggctcttgcttcttttcatagattctctcacaaaaaataaaaaaaaaacaaaaaacaaaaaaaaccccattattcttctctcaagtttaatctattttcttattttcttggaccgaatcgccttcaacccctaaacatctcaaactcaaagactgattttttcttaagtcaactctgaggtttgtcatcatagtatctgatcctctgtattgttgcaaaatttcgtttttttttttgtttttttct

SEQ ID NO: 298172 - DNA, 3696 bp, Cannabis indica
gggtcagacccaattaattttttaaggtaatcggggcggggcgggtcagaagcggggcggggcagacccgccccatttgccattcctactgttaactgatgggttatgccctttgtgtgggttaaatgaagagaatacttatcatgctctttggggtattcttcgttgttacattgcagaaaactttgtgagtttgtgttaggaaatctacttgttcattgtgtgaattttcttcactttatttataaatttgatgataccctttcttaggagatgattgaattggttttggtgattttgtagagcatctgattcaaacataataaaacggtccataacaacattgaattacctcttgtgctcattgtgcattaggctcgtgattaccttgggatgttttacaacaaacagacttcagcggtgtctccttccacctgtcagtcggtggtggacgtctctactgatagcttagtgcctcaaatactccctctttatgtgtatccaaaatggaaatcctctcgcttggttttctcaaagtcaatacagatgttaattgttctcttaacaattgtagtggcttgagtatggtgattcgtgatcagtttggaaactagctttggcaaattggcatttggatggttgctttgttcttgaagtagctaaagccttagctatccacaacgcgcttctttaatgcatcttctttgagtatgggcatattattattgagtctgactactcaagtattatgattaaactaaaaaataagacttctattattacttctttatgacttgttttagatgacattatcaatctttgtattaagtttcaagatgttagttttgtacatagtaatagcatgcctattctttggtcgaaattaatttgactttaggaaaaagtgtcaattagtggccagggactcctacttgtattcagaatttaataatagtaaatgctaccgttgaataaatctccactcccacctttttagagtgattattgctcttaggtggcgtttagttgagatggatgaaaatataggaatagaaatgagaatgagaattagaataggaatggaataaatttaaaatgcaataaaaaattgataaaaaattattaaattttttcaaatcttgcaatggaatggtctttccttccatttcaaaatagaatagtcattccaccaaaatgatggaaaggtcattccattggaatggtattccaatggttttaaatgcaaccaaatgaatggaataaaaattattttatttccattccattgcaaccaaatgcaaccaccttagtgtttggtggttgggaccttctcctaaaaaaaaataaaaataaaattgacttcttttatttcctatttttttttctttctaaatcatgtgaataaactgaatagataactcctttttttgtccgttaataattacctggtaagatattcaaagtttcatcttgtaatggaggactggtaaagccgcctagttagacccaagacaatgccccaaatgttacaaaccacccaataacaccaacccattgccacatacactcaatattacttttaaatatgatcaaatttacaagtataattctataacaaaacacaacccaaatttcccagttaacatctcaatcagaaccatcacagtttggacactttgataaactctgcacactcttcatgttagtttggcattctgcaaacctgcacttgaaacaagacaaaatcctaaaacttaatatgtgtacttacaagtcaaaaactctatttgtgctagttaataataaaaacacaataacattagtacgtactcttgaaatggatatataaccacactcaatctttaagtaattgacattgcattttgcacatacaccaagttacaagattcagcaagtacctactgtgatctcaaaaagaaaaaaaaaaaaaaacagaaactacttgttgataataatatcaattgaaagaagaatcagagtggggtattattgaaactaataatttgagtcgtcaccctaatggtgtcgctcctttgaactggaactcaattttttgagcagcttaaggaccccctattcttgcgtgcaaatgctaaaaaatatgctagtgccgtaaagccacaagccagaattttctttgaacactagccatagggcctgtcatgctgaaagaatacaagataccaatttatgaaactaaatgattagagcaagcaaaacattataaagaatatcatcgatgaagaatcatgtcttgcatcgtaattcagaaaattatgtgaataaaatttcccaagacttgcaaatacaattttcccataacttcaaacattactaaaatatcagctgaaatatagtatggtcatagtagaatatatccaatccctggttctttttaaaattaagatttaggcatatattagttgcgtctagtcttttttgtcttcaaacttcaaatacttactattgcaacagatttacttggtcttcaagcttctaaaatttctataactagcatactataagcctgacttccaagttccaaccagattatggacctcactgggatcctagtcaaatcgtctaccaagaaataagtgatatgaagatacggattatatacaatgacggagctaagagggacttaaattatgtaaaaatgtatatggcccttctaaaatcaagagtttctttttatatatttctatattttgtacatacatcttttatgtagaaacccttctatgttttaattctggttccctcactgactatatactccaaagattgcagcttagataaactagaaagccaagaaccttaaaaataagtcagcacctagaatcttatgaaagctccaaccaaagactaagacaaaaaatcaattacattaaggtagcaaagtttatttcggaaataagatcagttaaggaccagtctaattactcttctttccagctaaaatatccaaacattgtttgatacagcaaaaacacacaaccatacatgtcaatgtcaacattacaattgtgttctatttcaataaatgatattcattggaaaagaatcagcattcaggattacaatcttgtagaagaattgcacaaaatattgggcaatcagtcagcaaaaatcacataaaaatgaaacatatactttctataatcgttttgctctgcggaaaagtaggaacaactaaaacataaattaaaattaaatacgctaaaagaattcaaccctcaaatcatcaaatgacaaaacattttccacagacccatcacagcaaataatcaaataatcattaagcttaattatacttaaaagggttgtcaatgaaattgcaacaaaaaatagattgtgaagagacgaaccagagtttggggtcggtgaatattggaatagtagtaagtattatataatcttcagccaacatgaaaaggactaatatcaccagttcggaaagaggtagcgatctcatcagctacgatgaggcaggaagaaacccaaccactcaaagcaagccaaaccattttcgtcatccaaagagtcattccccaaggcatagccatattactccccaaccccaataaaacaaaagctcttttagaattttcaaagggaacccatttgagatctgcacccactttttttttttttttttacttttactttatt

SEQ ID NO: 298173 - DNA, 6573 bp, Cannabis indica
agttcatcttgagagggggggtaatagaattagttggtccatcttttcctttggcccactttattttcggcccactatgtttattgggctgtcatcttctttgtctagtatatattcacatattgtaaccctaagaaaactaattggcattttactctctacgtgagccattttcccagcagaataatataaagagttttctctcttatcaaattcagaggggttcatagctatccaagtctcaaaggacttagctcatgctcaaaacagaaaataaaatgaataatacgatatgtttttccatggaaatgctttgtcttttacaaaatattcaaatccaagttaaaaagaagagaagagaaaataagaagaagagaataacaaaattcgagctaggagctcgggtccttcttccacttcaaaattcactcttttttgcttggattttcaatgctctaattttttgcaactgtctcctccattaatggcaactcaaaattgtgtatgtaatagattttcggtgctttgttgttttgtagttatatttttgttgtttcatgttgtttgttaagttaatttaagattgtcttttagttgtttttttttttttttatttaccgaaacacagtatttttgtaatttcgaaattttaaatacagtaattttgtaaaactgatacagtaaaacaaaaaatttcgtatccagtatttttataaatttttcctaattttattcccttcatttttaaccataaataattttgagttgaaatcacattatttttaattttataattataagtaaacatacatcattaaatataaaatttgtgtaatttaaatgtgtcacaatccttactaactttttttttttgggtaaggaatccttactctaacttgattattaaattaattaaaaaaaaactttttagttatccaaacagcatataattatagaaacatttatactaaaaatcctaacaatcctcattagtctaaaatatgtgtactttactcaatcgtccctctctcacattagtttaaataataaaattcagattagattttaagaattattgattactttgacacgatcacccctccatacatatgtcacgctctgccatcgcaccagttcttcaaacacgttttcatatacataccatcctaccgtagatctccacacataagtgggtcccacaatagatccaacggccaataatacattcaccggttgatcacgaaaaagcgaaagacaggaacgaggacatattcctctacaacagccttccgtcactcactattcctttgctgctttattgtattgtacattcatgactactccacaaatttgattgatctacggtacaatatgtagaagcacgtatcaaaatggtcccccaacaaagatacctatactttttcttttggcaatagtgtaaataagtaaaagagtgtaagggtattttcggaataaaaaaagtgtaacggcgtaggctgtagaggaaaactcactatgtgcgcctgtatattgtttatatctctgaagaaagaactaaaatacgctctcgtataaataaacctatactctctctctctgtgccgaaccagaccatttgagcttcgagatttcattcttctgttagggttattgtttttctatgtgagagaacgtcgagtaaatgctgttctagtagaaaaatctcagagatatacatatattgttgtgtatattatatacatatatagttctacgctcagttagtggtttctttcaacaatggctacagcacctgtcaagtctccgttgcacaacttccctctcacattcttgaaatggggcggcgcgaagaatcacactagcggtggtcatcatcgttaccgtcgaccagtctcggctgagaactctcccgtcgccgatcatggtgaggttgacccggataggaacgattcggagcctgaagctggtcggactagtaaggtcggatcgcgtactgttcgcaacagatttgggtttgcgtcttgctcttcagcggagaaggtgcagaaacagcaagggagcaacgagagtgatgaggttgtcagagaagggaagcagcagcatcgtgatggagaagaagttgaggctgaggagacggttcagaagccgtggaaattgaggccgaggaaggttttgttctcgaaacctgcttcgattggtgttaagaatggagaatttcaggaaccaggtgggactgttactggcagcggtgtaggaagtggtcagaatcagagtgagaatcagaaccagcaacaaccgaaatcgctgaggctaaggggattctcggagcagcagagtacggagaagaaagagaagaggaagttttggatcgcgctgtctagggaggagattgaagaagatatctttttgatgactgggtcaaggcctgctcggaggccgaggaagcgtcccaagaatgttcagaaacagcttgacgtacgcctttttactcatcatcttcttctcctgcttcatgttttctcgatcgttcacttcaattgtttgtgctggtctttctcaatcttcaaagcatttttttttttttacatattggctgattttcattgtttattttaggctgttttccctggattgtggttggtgggtgttactgctgatgcttaccggatcgctgaggctcctcctaaggttctaattctctcaatcttgactgtgtttgttgcagtttcttatgggaattttttgctaatatgctttgttgtatgttattattttgcagaggtagatgagtcctacgccaattgtgacttgaagcttgaacagggcgaaaggttgcatatctgactttgagacctcaattgaggtataacgcaatgaattttgtaaagagaggatatgaatttacgtacagaagaaaagaaagaaaggaaagaaaaaacagttggagaagaaacacatctgattccttgttttttctatcatcttcttttttctaaatttagtgttgcggataggggtatgatgtgcaggggagcagaacttagttgttttctttttggttatcttagtagtcttaagatgtaaacaggaaccgatatagttgaatggtatagcgtgaattttaaatcctttttatcatatcctctgtatgtgtatattggggattccattgtgtttacttgaagtaatcctgatcaactgattatttacaatgtttgacaggcttccctacatcgctggggggcacagagtagcttaattttcaaatccttattatgatagaggattaattctctgcttgcttccttgttctggaagagctcttcttcaatcggttgtgattgtcaagatgaacccgttatgaggttgaaagctcataagctggaagaatgtcttgattttcttcattatttcaaaataatattttctaatattgttattttttgctgaccaaattagccaactgtcagtactcagtaagtagtatttgaacttaaacaatatagttatttcacaatggaccgagttcgaaaatgagattttgcatacgcttgtgtcagcacgttgggttaagtatttttgctatgtataggaagtctatgcatttggtctgaaagtaatggttattagacactagtttttgattactttgatcacggacaaggctggtagtatttcagctttcaagctcttttatcatttgggtaaaatgatttgagaatcttctactgttgcttgatgctaagtccaagaaccacttctggtgtgcacgagcagtaacactcttccgattagctagcctcgtatcggtgtagcctctctcaaaagcaatggtattggtgtgttcaaatctaacactcttcataggcacaataaagtagttacgaatgggaattcacatgtttccaatgctgtttactttataggtttgcacttgtagacaggaaaatgagacaatttggtttttgttcaacagctgtgtagaggtaataattacaagacttcttgtccatgttgttcctttggtttgaattttatgatgcttatttaaatttaaattaagtgcttgttaaggaggcctgctggaatttcaaattttatcttcacaaaactttacacttctattgacttgtttttttacttttaattaatatttaggctatatctcctgatccagttgaaatattacctcgtgtctcatattttccatgcatgtattgttgctttccaattgttaacttcagaagtttggctgtggctgaagtcaaaaaatgttatttttgccaccaagagagtgaaggagcagattctgaatggctcaatcaattttgtgagtcttgcctaagaaaaacaagttcaattgcccattactcatccgggtttgttaatatttcgattagttgatgacttcttcaaaactttttcttctctgaataaacaagccataacaattgcccttttttctttacactcagttggcaagccagcttagctgcagtgtgataattctactacaaattttgatgaaagtaaagaacaacagtcaatcattttcactgagttcaatgttttccctcctgttattgttgatgctcaggagccaggtaattgttgaaatagatcatagctgtgaaataattgaattaccttggtagattgtctaatacttacttctttttacttcaaaaatttgagtagcaaaggcaaaaacttgtgctggaataggaagatagaagatatgttttatgcagacatggagaaaatcgaaagaacccatgaagctcctgcaatattggggtaaattaaagtagtttttctttctttcctcttttctccattgcttcgtttatttcctttaatattaataaatgttcactttgagcgttatgcacaattaaagtatggaagaaaaataaattgacactattcactagccatgaaagaacaagtagatttatgactaaaacgtacgtaagcatatgtggcatcatttaataaactttgttgaatgagaaaaatgcttattattgctgggtcaatgtgtcaccacatgtttgattcaagtggatgaaaaacattggtggctacatatatttttccttggctatagaagttggcacatttcataggtcaagactcgttcttttgaccaattactggtccagaaatgtatcttaaatatatatttaaattagaataataataataggtgcattaataaattacaccaaaacattacacagaaaagacagtagatttcagttgatttaaaaaattatcatgtcattgtataatgccttagcctaatttataggtgcacatatattatcaatcaatattacttgcaatgaagataaatttcatagcatttaggattgaatataactgatggtattattttactaacatccgtgtccatgatttgtttaattcggcagttggtttcttctttatataatattatcttatctattgcttgcttgtagctgagttttatttgttaatatactcatttaatagtaggcccaagtgaggtaggtaacacactgtttcatttagttgtgacacttttttttttctttttttggcggcatatttagttaaacttatatttgcttaattacattactactttcaaatgggttatcataaacatatgacccactattttctatattatttcttcacaggaatgatttaagacgaataaatatctaataactttcaagtttcaataattctatcattgaccacttattattttgatttcatacccttttaataaaaaatcgcagagttttaactttatatgctctatgagatatcataatgtgaaaaactacttcatatttgtcgacaaaagttatgctaatctttcctgttttccaaaaatttcttacatccaaaacagctgccgctatgaccaatttcttacattttcttcttctcttcattcatttttgttctctttgaacttcataaatgttacacattatagtgaccacattaatattcttaagacactaatatatgccctttgaatatatttgtgtatatttagttacaaatttaatggcccgacgatgctcgatgtcatgattattgaaatagttttgcttggatgtgctcgatggatcaatcttccgaagatagaggagatatgttttatgcagactttggagaaagagaaaataaaaagaacccataaagcttatgcaatgttggggtaaatatgctgaaaatggaactattatatatgaatatgatttggaaatttcttaataattggtttaaaagacttggttttttttttttttgaagataaaccaaaaaaatacgttttctttataatgaaaaaaataaagacccgttgaaacgcaatatttagttatattttggaaggttttttaacttaattgaaaaattttggtggatgacgcatttttttttgttgttttttgaaaattttatgtttattaagatgaattatccaattccatcatcctcatatattttagggaaaaaaatataaaaatataaaaaaggaaaaaaattacaaaaatactttgggcc

SEQ ID NO: 298174 - DNA, 3131 bp, Cannabis indica
aaaaaaactaatatatatgataaaattccaaactaaaaaatttaatacctatttcacaaacagattacaaatcaactataatgactatgattatcagcataaacccagattagaaatcctcgtccagcttgaaaacatggttaccaccatcgccattgatgctgtacatcacagaggccttttggtactctccaactctcttctcaaagaaattagttttaccctgcaacgaaatcagctccatccaatcaaaggggttctgggcattgtagatcttggggtaacccaacgcatccatcaatctatcggcgacgaactcgatatacttgctcataagatcaccattcataccaaccaaggcacacggcgaaagcttcacagacaaactctctttcgatttcaacggcgtcgcgaatgattcccctgactcgctcctcgctcagcttctttttcagaagcgtgtaaagcaaacacgcgaaatcgcagtgcaacccttcgtcccgcgagatcaattcgtttgaaaacgtgagaccaggcattaacccgcgcttctttagccaaaatatcgcacagaagcttccggagaagaagattccttcaacgcaggcaaacgcaatcaaacgctcggcgaaagtttctgagccgtcgatccatctcatggcccactgagctttcttggccacacaaggaatggtttcgatggcgtgaaagagacgattcttttcagccggatctttaatgtagtctccaacaacagactgtacatctcagagtgaatattctcgatagcgatttgaaaaccgtaaaaggcacgcgcctccgcaacttgaacatctttcatgaaccttccggcgagattctccaaaacgatgccgtctgaggcggcaaagaaagcaagaacatgggaaatgaaatgtttctcatcgggagtcatattttcccattgggtattgtcttgagagagatctacctcctccgccgtccagaacgaagcctcggccttcttgtacatttcccaaatctcagggtactgaattgggaacatacagaatctgtcggggttgggagcgagaagtggctcttctgggtaagcaggcattttcgattggaaatgaagaaaaaactgaaaagaaagattggaagagttgaatttggggattaggttaattttgaaggtctttggctatggagactgagagagtttgtgtggctatatataagggttttggtctgcaaaaaaagaaacgtttctttttaaaatattcaattgaggcgcgggttatttaaaaaatttcagaagcttgttggagactgaactggaagaagggtaatttggggatttcaagttgtgtgtttgacagtgtggtccttctgatcggctctatgagtagttgtcagaggaggatataatggtcatttccttgatgttaggtggctgtttggagggctatttcggtaattttgattgtaaaaaagtgggaggcttgtgagggaagctttgggtttcaaattggcgggagtttttagtagcgcgcgttgattgaaaatttgggttccaatttaatatacttttaaaaaattaaaattttgaaaattacatgtagttgtttttttaataaatttttgttattattatttttctctttgtaatttatttctttatttagaaaattggagcttaaattttgttgaaaaaagaaaatagagttagttagtagcacgagtttaatgaaggttttagaaggaaggacacacacgtgacacactctaccacgtgtggtgtacaaggacacgccatgcttaggcgcactgtacaatgtacatccacacatttttctacttttcttccttatcttctttatgttttttctttgctaatttactaatagttttgaaattattttatattttaaaatatacgatatatttaaatttgaagtagtaattatatgtaaatttctgttattatgtttagtaaaataattagtaattatatgataacttaatattatgtaatattttatttaataattcttatcattttataataaatatttaaaataatttaaatttattaggaatattcaaatattgctcaggataaatttcaatagttatatttttaatgtaactataataattatattttggtcattatctgttataatatgttgtaacaggtcattatgtaaataagtttttatatatattttaaaaacaaaatttgatatttagaattgtagtaatcataaaaaattatgcaattcaaaaaaattaattttttaatcaaattattaattaagatctttttaaaaattgattatgtatatagatttgttttatatttataaatttaaatccctaatttaatataacacaaatttttttaacaataatatttgaatatgtggaaaaatctatattttgccacaaaagttaaacttatatcaattataaatatttttttaatttaatttttattatgtttaaaattaaatttccaatatattttaatatattacaatagtataagaagattttttgaaaataataaaagactaaatttttaatcttttttatcaaatcatgacaaaaatatttactcatttaatttaaaataaaataaaaattaaatagaaacttaatcaaatcatcaatcaacatgagcattagactaattccttacaaggaaaaaatattagacaaattaaaatattattattcagcaagaactgtgttgaaccaatggaaatcagctgctgcaaaccgattctctccacttcctgctgtcatcaacgacaccagcaatctcagcaacaattggacgccacctgcagctggttttttgaaggtaaacactgatggtgctctattttctgcttctaattctttcggcttagggggtctcgcccgtgatgctaatggccaattcgaagcgttttgtttgcacaaaccgggttgtgttcaaccaagtttagtggaggcttttggtgtcaaagaagctttgagttggataaaaacgaaaggatgggaacatgttattttggaaaccgattcacttgtggttgttcaagctctccaaagtaatgtggccatgcaatctttgtttggatccactataacttattgtc

SEQ ID NO: 298175 - DNA, 4132 bp, Cannabis indica
tccactgtgctgacgacacaataaacaagaatataaatgtgaatgggtttggatgaatttataaatcaaataaacaactaaatgataacatgaaccaaatgacacacaaataagtgatgaaaatacttctgcttctttattgatatttaacgataaagattacattgaaatggagttttatttagggcataaaacccaacacataagagagcggtcaaagtgtcagggttacccctcaaaaactcttattcgatcaccttcacagcctaagtgaacaagaaggagcccaaaatgatactcaaagaaggtaaaagggaaatagacagtccaagcatctttcatggcattacctacccagtcacgcttacgagatttggaagtaagaactttcatcactagacaaaaggattcggtctggggttcagggttaagagagacatgatcaaaatcatggataagagcttcctcatcagtgagatggatactaggactggagttttgggaatagatattcatggctaacaacatgcaaggagaaagcagtatacgaagaggaggtttcaaataagaacgaagataatacctagagagtaaatagatccttaaatagaaaaatcaagaaaagaaatacatgttatagagcatagctgagaggtgcaaagatgtcgaatcagtcgtagcttctcctagccgatatcttccccagttaggaacaatgatgaccaaaatcttcctaaagatgaaaatggcagttgttaaatgcttgaggaggtgttggggaggagaagagctaagagaaggaaaaaaaaaaagaatgaattaaaattgagattagacatcacaaaggatgaagggataagagataagatgaaccatcgaaaaagggagaaattcttagagagttccagaactttttaatatttgtataatatattttgtttgattaaattggtatttttgttggttaattttatttattattatttatttttaccgctttaaagattcaacattattaattttaagacctaatattattgactaaaaataaaattaaataagaattaagtatacttaattataagtagatcaccacttggtggtgctattactcctgccttctcaaatgggaaagatccacaattgatggagttcgtgatattgattgtccgctgtacgtttaagtaatgtcttatccatctaggatgtttcctcttcctacccaaaaaacattaacataaaaacaggaaaagaaaaacactatttaataacattatatttgtcgttttgctaaaaaggcaaagggtatatttggtacttcacttggtgaataacacgaacctaggattctttttactaaacctgctaaagtagccctaatacaaaatatggcgcgtgataatattattaataataaaagtgatgggaatgctgaaaagctaaaaatagtgaaattggaaccttttcgtaatttaaggttacctaatttggaaattggtgcgtgcatctgagtttttttttaaaagagaaattatataactatcctctacgtgacttcagttcacacttcaatattttggaatagagtatatatctgatcctcttttttatgttaattaaacaactaaataacaaatatatataataaattttcccatcttagttcttacaactttgtcgactctcacttcttccatacaagttccaaaagtggttacgagggagagagaaattttgtaatggttggcacaataattttcacaccatttattatgcatgatagattaccaaaaataatcaattttcaaggtgagattatataagtattaatagtactgttgtttaaagaaatgttatagctgttttagtgttaaaggaaaatatatgctttttatataactccatatcccatatcttggtgaaggtgatgaaaaagaaagattaataatgtagaataatagtgtgtgtgtgtgtgtgtgtttaaaaggagtttgaaatcgtacgatatagtttttaagatattattgttttattgggttaaggtagatcttttcgatattcaaaggtgatatagttgtagttttttctttctttttttatacatcaaattaattaattaaaggaataagattaaggaattttgattatcaaattttcatgtagcgacaaaatgagtcaccggtgagctgtttcaatccactcaccagctcatcagaagatttattaaaaaattatttaaacttatgattattgttttatttttcaaaaagaaatattagctttagaaatccttattattactacaaagagaaatatataatccccatatataaatataatagaaaaggtaaacatggattaatgatgacccaaatctaataagatgatacggaggaagaattatgtaattaaggatatgtcaaaaggtaaatcaataatcaagctcttttttccctttttctgttcaaaaaataattaagcaactttccttatatatatatatatatataatctataattaagctaccgctcctctcaacatcatacctcgtatttagttggaatcgatttttcttatgacaatttttatacgagtaccaggtttgtttattacgaaaacaaacaattaaattcaaataacgttagggacgttatttggaaagttattattttataatttagagtatataattcaaaatatttattaggtttgatatgtttgtttaacttaataaagtagttacacatattaatggtgtatatgtgttaaatgttaaatgttgttttggtgtttattaatcctagtttagtgatttataaccgatgcaatctatcaggattcaaagacttggatgattgatatatcgttgttttactttttcttataacttttgtttaattattagaattgttatctccattaattattctttggaagatcattaatggctagtagccatcggtaggattggtctgttctaattgaataaaagaacatatagtttacttcccatttgttggaaggaaagcttaattgcatgtatacctaaaatgtttaataaatatttcatttgtatttgagaacaaaaaaatagagctaataaactcaataactccttatacataattaattgggcactctaaattaattaatcattatacgttttgagaggaaaagtaatacaaaattaattacttcctcgaaatgaccaaaagttaatagaaaaacaccaaaataatcatgaatttacatattataattaacttcttattaaattagaataagtagaagagatatgttaaaaggtattagtagtgcttatagtattttttttatgtgttattatcgttattagtcgaattaagtatcgaatttcatatagtttaatgtaataatttttagagagtattactagccaatcgcaagaagacatatctaaagatgctagacaccactaatattcaatatcaatacactaattaaatagaggatcatacatttttattcaacgcacatgtatatgagtattagacaacgaaagttgtgctgtcttacatttcatttaacactttaaaattaaattaaataaaaaaaatattgttgatatcatgagttatagatcgagtgtagtcaatattttatatattaaagaaaaaatcaagatcgaagtatttatacttttctaatcaacaaattagtacttatcgtgaacaatataaaagggtgcaatgtaattaatgttcattataatttgttttcttccataattagtctgttaaaatattaattaataattaagcttataatcaattaggtcaccactctaaccaccatacctttctctcacgcacacaaacacaataaaaaatataataataattgaaaaataaaaacctcactatatatactaagtcctaattaattagggatgcatatgatggggcgggaattggcggggagtgttcccccattaaggattttaattcatatccccgtttattctctattggaaatggggcagaaaatcccctaatggaggtggggacgggacagaaaatctcctaataaaaaaataaaatttataataaaaattttaatatacaaatatatattaaactatataaaattaaa

SEQ ID NO: 298176 - DNA, 2045 bp, Cannabis indica
agtgggagcgatcgatctaggaacatagtttcgaggaagtgtcatttattttctcaaacttccatcccaagtattagattaattatgattcacaacaaccctagaggttaatggttattaagaatccatagctaatcattaatgatccacaagtcattgataaaattctaatgagtcattctatttagtaattacttacaattgctaaacaatatacatgttgaaccattcaccctttgagagagtttgttggttcatccttaaaatgacttattagaacaataagatcaatgtttctcttcattacattttgtacaataaaagtttagttacaatattaattttagatacaaattaaactgtagaatgcaaagaattgaaattgtggtacaatatgtcataaatgaataaataaatgtcctaaagagtaatggagtgtatctttagtaaagttacctaatggggtggagaatattaattaagcataggtttttcaccaataaataattattagacaacatggataaaaatgaagaaaaaaaacaagaatcattgctaaaaagttcattttgaactaagagtcaataacaaaagagatttacattctcacttgtctttataaaagattctattatagtaacattgacttttattgctcgtttcaatttattaatcaattctaaacagtgaactagaggagaaggtataccaactattataaagatttttctctacatatgtaagtttaaagagtctacctataaattaaacaatcttctcacaattggcatttaatcttgtcatctcttcttttagttttgaaaagaggtatgaattaattatacaagagaaaaaaaaattatataagagaaggttagtgggagtaatatttgttttatataatcaaagttccttctatttcgccatttttattcacaaagccttcaaaatttgaaaaaatctcaacctaatttgctcccgaaaattgtatgccttcattatctctgacatattttcctagagcattaagtgatttcactcctcaaacccagaatcgatgtcgtccaggatctctacatcaagagttttcaaaagaaattcttcgggacccaacttcttacatcgaaccagtaagtgacattttttcattaatcttctagtttcttcctatttagtttcttatatgtttttgttgcatcatttatttcttgaaagaggggtttatataaattttttagtaatataagactagaaattttaaggttacgtcattcgtaggtttttagttttaatggtgctctgtttttccaagaattttttggagcactatactttgtgacaataccctttagaatcagactatcctcaatactaggtcgtaacatttaaacctcaaatccataaactcccgtccatacttaaaattaacgatgaaaagatcattcgagaacacaccattaggacaaaccaggaagagctatctacttactataggcaattcttgagtgaagtcatagaggatagacattattgtttgcgagaagaggctcggcctgagttgcctaattaagcaaaatattcatttagctaagccactatttttactacaagttactattgcttttccaccaggtgacttggaatttgaaatcagggctccttaaactcgtaattccaagatgcctcaaaatccttcagttacattcgaggcggaatgatcgaatccaaagttcgatcaattactccttatataggggacgtcctaaggtcgtgtgacattaggaatgagaaaggatgtcgtatccgttcagtcgcgccaagcgagtttagttgttttcctcgaaagcgtgtcctgaaagaggagggttgtagcaccaatgagtcttcaaaaatagggacttggagtgtggaacatattagggtaggagttgttctaccccttaggcaatattttaaggacttctgtaattatcttgaggttgctccttccaatgtgccccgaattcttacagaatccttacttgtctgtgttggaaattatttta

SEQ ID NO: 298177 - DNA, 3165 bp, Cannabis indica
ttgaattgggaaatgaaatttttttttttttttttaatcttatttattcattattatattataatatttgtttgtatatacatcccaaataatcactgctcactgctctctgattttgaatttgaaactgttttcttggctttctttgtagaaaaaacatgttggaatttgaacacttttttcttatttttttactcatctaattttttttctcttttctttttgattagttttgtttaaagggtttttttctatggttgtggattgcaggtagagaggaagataaatttggtgtatggtggaggaagtgttgggttaatgggtttgatatcaagaacagtctatgctggagattgtcatgttcttgggtataatatatatatttatataatcattgatttgattgttctcttatgcttaaacaaccaaaaaaaatccagtctttgtattaaagtttgtaactttacaaagttggaatatgtttttgttttgtttcacatgcagggtcattcctaaagctcttatgcctcatgaggtacccttttttgttctctttaatttattcctatgcttttgtcatcctcattgaatggctctaaattgtcctgaaaaaagccctcgtgtgtgacaaagtgacgagcttttttcataaacttttgtactgcatttttgaaacagatcccaaaaagtttataaagaatgtgaaagtgattttgttgttttgaagttgaaatatgctaattttttaaattggtgtggttaaattggtagatatctggtgaaagtgttggagaagtaagaactgttttggatatgcacgagcgaaaagctgcaatggctcgagaagctgatgcgtttattgctctacctggtgagaaataagattttactaatttgaaataaactttgagcaatttgatttgaaataattgttcttataggaggatatggaacaatggaggagttgttggagatgattacatgggctcagcttgggattcacaagaaaccggtaaccttttctttcaccattggtcattgaaaaaactacaatcaagtaatgaaaattttaactaggcattactctatctatgcaggttggtttgctaaatgtagatggttattacaattctttgctagcattatttgacaatggtgttcaagagggattcatcaaaccaggtgctcgggaaatcgttgtctctgctcccactgccaaagaactcatgataaagatggaggtatagtttcagcttatattaaaacttttcttttttgtttgcttgattgtaaatgtaagaatcatataaaatttttagttaaggaacttgacacaagtaaaaatggccatgtgagatttgaatcttttatccctagtgttgttgttgttgttgttgtagcatgaaatgtagacaaggtcacatggggtcttatctcccatccctttcaggcaaatgttctttttcattttcaagctgaccgacatgttcgtaaagttaaacacagtctgtttttattttgcagcaatatgctccttctcatgaacacattgcatctcacgaaagctggcagatggaacaactttgcgagtacccgagcaaagacaattcgaggtgatcgaaactgttattccctatatttctgatggtgattcatctgttcttgaaatgtgtaaaagaattcatttttatgggaccaaattactgttcattgccataatcttgtttgttgttctctttctatataatttgagttctagtaattaaattttcccttctcctttgaccacattatactttgttttatgtcaaattgatgacactattaccaccacagtcatatttttcttttgataccacttagtgaaagtactaacctactcaagataatattctagagcagaatcttccaagtgctttgataagatggtcccacaatgtagtggctttattgaagtagatatagataagttgagaacaacttagactttttggttgacatcatttgaggcacaataaggtccaattatttgttaaaaaacactatataatgaactactatgtctcactaaagtttttaccagtgaagttcttaactaaggtacttgaaagaactattcctcctcattcctttttacaagctttcacaccactacgaaacattgcttccatgtcagtcaaggactaatgtggaaaaactcccttttatcaacttgcgaggaagatttgctcggtagcaatgacatctcggttcctatcttaggaggaagacctcttaggtattagcgatatttttttactaaggtaactcaaatggttagcatgaggttcgagtctctcctgggtacctacatagcaattggtgtagtttcttgatcctaatttcgggaaaaagagactcaacatgttgataactattctctacttaccattaaagaaaagtaggatatttcccattaatgactaaaatggattagctacaaacttggcatttcttttgttagagtctttctaaggtcccacacttcattttcacaagtagctttgtgagaaggctaggcaaccccattttggcggcttaaaactctctctctctttctttttttctttctctttctcttgtttggtagcattaaatgaaacttaatttttccccaatagtaggaacacaaataagtgttttgcaatgtaaattatatgaagaaaaagaaaaacttatatagtgggtaggtaccattatagatagacaaccaaacatgtataaaatcaatgcataggaaccatacttatctgtcaaagtgtcaacctttcttgaaaacccaattcatatatttttatatctaatcaaagctaacataacaacatggaataacaagttgccccaactgtacttgcacatggatttttcaatatgtataggcccatcttaccacccgaagaggggtccttgttcttcttcttgttgttctgtgtattttgataatgactttctttagctgtcattttcccaccaaaaggagaaaatggataggtaattgctggttgttgatatgacattgataccttttctcacctagctcaaatggtcaggcatgtggtttgctctcactaggtctaaggttcgagtctctcctgcatacctacatagcaattgctatagtttctt

SEQ ID NO: 298178 - DNA, 3016 bp, Cannabis indica
tatacgtacattgcacgtaacatcaacctagtatatatataatcatttttattattttttatgactttttgttttttttacctttatcatgtcctagtaatatttcattgcaccttaagatcaacaatagactgaagttcaacagcaacaaatgaattataatgccactaatgatcaattggatgcaaccaaacaggatttttactttggggtatggagacttgcccaaaaaagtctccaaatatccaatgaaagtcctagcttggaattgtcgtggtctcaggaaccctgtggcagttcgacaattgacgatgctgattgtgttatcagaaacaagattagcggaggagaaattccatagattatgtctaaagttacacttcattgaaggaacttacattccccctgttggaatggcagggggatttggtctctactggaggtgtggttttaagtgtaaggtgcttagtgaagacaagaatttaattaatgtggtaattgaatctgatcctcctggcactccatggaattgattgggggtctatggccctccttctttatcaggcagagaggcgttctagagcagaataggcgatttactattgaacattttgaatccgtttatgattattggtgacctcaatggcacccttgtggatcacgagaatttacactactctaattggagaaacatggctcgatactcatttgatttgcatcgtatggtcgcaggaatgggcctggttgatctggggtcacatgttggaaaattcacttggttgcaaaaatccaatgtcacagggggtgcagactaaaaagagctcgccttgatagagcgttggtttcaataaattggagaatgttgtaccctagtgctattacccatgtcctcagcgctactacttcagatcatagacctatactcctcgacacggagggtggagtcagctgtagaaaatcacagttcaaatatgagctaatggtggggaagggatccttaatgccattgggttgtcaaaaatgcatgaaaggaaaagcttcatcatcacccgacggttaacttttaccgaaagctcaaaaagacaaaggtacacctatcgaagtggaacaaagtccatttcaaattaattgggcaccaagtgagtgaggctagatcatcacttcagcaacttgaaagtagagataatgtgaatggggaggattgagtaaagccagagacaatttgaataaagccctccctagggaagagatctcatggagacaaaagccaagagttaagtgctgtagcagggggtagatgcacaaagttcttcatggctactactgttatccgacaaagatgaaactgcattaaacaagtgcgaatgtacgacggtaattgggagaggaatcctaatagcattgccaattggttcattgaaagattcaataacacttacatagacgaaaaaacggctgctctccctgcactaagatgcctagatgaatgtggtatttcagtccaagataatgaacacctgaaagctttcccaacgaaaaaggaaattgagatgtgtgttcgatctatgggacaagaaagagctcctggacctgatggaatgtccacgagtttctacctacagcattgggccacagtcaaaagagatgtattcgatatggtcactcatttctttagaaattttgaactgtcacagtgtataaataacactaacattgtgttaataccgaagaaggagttcccaagtggtgttaatgattataggccgattgctctatgtaatgtcgcctataaatgcatctaaaaaatcttagggctctgattgagaatcatactgccttgtattatctccccagcccaaacaactctcgttaaaggtcgtctgatagcgcaaaacactgctattcaaaaggagataatccactcgatggggaaaaacagggtaaaaaagatttcatgatgataaaattagacatggagaaagccgcgtatgataagatgagttggaattttattggggaagtgcttggatgtatgaagtttgacgaagtctttatcagatgggtgaataagtgtattgaacttaagagaatggggcttctcctcgacggtgatgttcaaggagttatctcgccgacttgtgggttgcgccaaggagaccccctatctccagctcttttcattatagcagtggatgttctctctaaacttttaatggctaaaaatgaggagggcaagattgctagtttcaaattcacaaggggcggaccaactattacccatttgatgttcgcggatgacattatattgtttggaaaagcctcagtaaaagaagctaagagttttctaaattgcttgaaagagtattgtgcttggtcgggacaagcggtcaattatcaaaaatcaactgtccattttactcagggatttctaagcaaaaaggctgaggacattatgaatattctaggaatgaaaaggatgaaaaaagactctatgtatctagggctgccacttttcagatccttgaggagatccaaagaccttaacctccttgtggataaggtgatgcagcgagttaaaagttggaaaacaagattgctatctgttgaccgaggttttcggcaactaataaaatattataaagttactgagctgtaagaaattgagagaaggatttttacgtggttggggcgttaatgagccttagtccacgagtctttgttatttatggatgtctttaatacagagaatgtatttggggagtgtttcactcttataaatacagagaatgttcttggtgagtatttactctacttgctcatatgcagcccaagattctcgatcccatttagtgagctttgagggggtatttatagtgcttttggtggggtgatccccagagctatccttacaagtgtatctgtaggtatccataaagttgggcattcccaatgaatataccatgggtaatgaatggtcaaatccctaggtgctgtagggtttttatgtggaatgtcc

SEQ ID NO: 298179 - DNA, 3126 bp, Cannabis indica
ttttattaaaattagacaaaattaaccgaatgaaataaatttaaaagaaaaataaaagaataaataaataatgattgactatatgtaacccacacgtcaatttagcacaactttcgaacactgtgacctaccacatcacacgcgccgcgaatcggcataatagccaaagaatatgccacgtgtacaatccgatccctttttacatactcactctggtgacgttatcattatcacccttcttcactcttaaccctagtcgaagctatatatacccatcacccgcaccagattctttctcacctttttccctatccattttttcattttcttcttaacgatttcttcgaagctcaacgatggccgtttgggttttcataataatttgattggaacaaacaaaagaaaattattgaatttcggacctttgatttctttgaccactactgtgaatgtgtgaatcgatcttgattttttttttctttttatgagcgttttggtactaccattttgctggattcttgttcttttcgtttttgtcttcttcgaaagggtttggttagtgtgaatcatcaatggcggagcggaggttcggcgtaggttatgcgctggcaccaaagaaacaacagagcttcattcaagattctcttgttagtcttgctaagtctcacggtgtcgatcttgttcgtatcgacgaggaccgtcctctggctgaccagggaccgttcgattgtgttcttcacaagctttacggtgtggattggcggcagcagttggaagattttagggctgttaaccctaatgcggtgattattgactctccggaggcgatcgagaggcttcataaccggatttcgatgttgcaggttgtttctgagttgaagattgaggacaggagtgagacgtttgggattccgaagcagatagtgatttatgataaagaaacgttgctcgatcgtccggcatgggaagggctcaagtttccgattattgcgaagcctcttgtggctgacggcagtgctaagtctcataagatggctctcgtctttaaccacgatagtctcaacagtctaaaaccgcctattgtcttgcaggagtttgtgaaccatggtggagtgattttcaaggtctatgtggttggagagtatgttaagtgcgtgaagaggaagtctctgccggacgtgtcggaggaggagaaagtgggtagcttggagggtttgttgtctttctcgcaggtatctaatctcgccactaacgaaagaactgacgataagtactacaagaagatgcatttggacgaaaccgagatgcctcctcagagcttgcttatcgaaatcgcaaagggtttaaggcgtgctatgaaattgcatctgttcaacttcgatgttattagggatgccaggtttgggaatcggtaccttataattgacatcaattactttcctgggtatgcgaaaatgccaggctacgagaaaataatgacggatttcttctgtgatataatgcacaagaaagagagagatgcagaaaaggttcttgaggagaatgatgataatggggttgatggacttggatgtgaaaaaggagtgagaaagcttgtaagcaattcttgcggcagtgatggggaagatggagttctaccagtttcacctattggcagagaagaggagaaaccaattcaagtatgaatcttgaaatgagggtccgtgatatgtagtcaattgactgtaactcttgtccgttaatgtggttggtgattttggtcttgggaatttgattttaagcagtttggcccttttcaccaatttcttgatggaagaaagtttcacatttggtttagaatagcagttgatacagtgctgaatgagtaggctacagttttaacctgttgagacagcattagttggtgcacagtggtgataatgtaaattccagccaccgttcctatgaagataggtacttcccaaatactttcaagttttaggaaaatcaagttgtaatgacattttcactgaatggattttgcgattttgtcaatcacattttagtttctttaatattctcaattttttgtttcttttttaggttatccgattttctttgttcttgaacttgtttgattgctgatgaaattgattgatagatataaccccattaccaaatatatctgtggaatattgtcgaaactaattcagcttcactaaatccaggatttggctgctatgaggcaggtcttatgttttctatatgaatacatttctttgatcgttggaaagtgattgtttgtcgatgtgattattgatctgaagcaaggatttctttgaactggcgtgtctcatgcaagttgagaatggaaatacctcaaatattttgtccttcatttctttattattcctcataaaggtatttttcaatttgaggacatgaaagttatttggttttctccttgccacctatggctctggtatacatcattataagtttttttgatttaatgaatttatctgttatgttatatttgcttggtttgatatgatagtatgatatgtatagtaaagaagattcttattttgtgtgttgtactctgcctagggtttgtaggttatagattctttcaaatgcatatgtaggcttaatttcaaagatgccagagaagtttgcttttgctggacttgaactgcatatattcttatggcctgcctgttagagaagtatatactagaacaaaaaagaaaaaagttctatgtccttttattggtccctcaccatgtaccttatcctcttgtttttctggttgattagttgagttattctgttctcaccaatgtatgtgtgtgattgttttttttttttaattctctcttttgtaaatttacgtgttaagtataatcaagtctgaaattgtgtgggcaacagcctttgtaaataatactaaaaaggttgtttttttctcatcttcttcaccttttttctgctcccattcatataagtttggttatgacgcaaccctgtaccctagaagtgagcccaaataggccagtgttatactcaccttagaaggagttatgaagattttagcagctaatgtcccctgagaagtgatggacctgaatccacttcagtaaattt

SEQ ID NO: 298180 - DNA, 2056 bp, Cannabis indica
tatatatataaatatatattgtcatatgaaatcatgtatatatatgaaagtactattgcatatattttcactgtatagatagtcatcatgcctcctaaactttaatagaatatacttatagagttgtgaatcccatctattattacaattatcaaaatgtgcccctcaaagtttattactcaaaattcaagaaatggtttgaaagtagtaataattttaggggtattttcgacattctaaactagttgaaattttttgaaattttgtaggtggttttaaataggtacatgatcatgaaaaaaaaaattaaaaacctctccaaaatgccgaaatagatagggtacctaatcttatttattcaaaacataaatgatttatgtatatatatgaacatacttggacccgaacttggctacattggcaaatatctccttggctgcctcttttgcttgacattcagttttaatctgtagggaagactcatcatccgtattagagttctgtattttttcatccagagtggccaaggaaccattccttacagtatctatcattttcctcatattccaagctgatatattcttctgatttagcttatgcaagtgttcagttgagaatttggcaccaccatgtttgtgaggaggcacttgcctagaaaatctatgatcattatcatttgaaggaataagcagacttgttgtgaggtcatcatcacttggcatagccatggtgtttgatgccttagccttctgaaactccctaaccacagcaacagcccttaaatgatcttctttcatgtgatactttgggggaccagagagtgtttcaaccacatattggttaaacagagcttcttgaattcgatcaaagtagttgttgacatgaaaagacaatgctagaaccttaaccataagtgttttcagaagccatataagatttcccactaaaaaacaaaccagaattttggttacataaagtaagatcttactcttggacttgctcttctcctctaccttcttatcaaaaacagagttccaaacaagtaagactaagcctaaccagagacaattctggactgcccttctcaatccataaacgaaatacaaaacccttttcctccaaagaaattttctctctataaagataacaagcaaccgaatcacccaaccagagactaacctcccacagtttaatgccaaaacaagaatttcccatttccataatggaaggtcccaaagcttttgtttttcaagaactggaatacaaagactacaacccaaggatgctaagatcaaaacaaggcttacccactgaacaagtgtaactataatgaacttattattggatttcttatcttcttctgaaatgttatcatcatcctcatcatcatcaaaagactgatcaccatcttttctcactaatcgtctagaactgatgatcactttctcccatttctgatacggttcctcaggtgggtcagcaagcctggacttggtcctgcttaagggtggcttccatgagctttcgtgagcaccttggttctttgtttgtgagccctggtatactggtttgctggaactttcctctcctccattattatttttctctgcttctttgctgccacttgctatggttgcaatgttgacagcaaattctctatctgtttcagccattttcttctgattgagctatgtgagtatagcaagacagagtgaacttttcttcttaattattcttgttaagtgggtgggagtgtaagtgtaagcgtgtttttcgttgttagaagattcgaccatttgtggaaattccttcacaagttacgtggttcttactttgagcaaatcttttagcttttgttagtgcatgtcataaaaaggaataatatgcttctacattattagagaatgtaaccaatctctcattatttctctaccaaccaaattagccccgtattctttcgtgactagtcgtgcccgtgcttattttgtgtcatgtaaaaaaaaacctgaaaccgtatttataacactaatttttactaaaacctatgagcactccc

SEQ ID NO: 298181 - DNA, 6427 bp, Cannabis indica
gcctgctcagccatctccgatcctctgttcttcaattcctctttctctgtttccaacccaccaatcattctctccccaaattccaccctcttcctcatttccgctctcaacttcctcaactcctcgatctcacgctgagctccagccttgaaattcgccacgtcgtagtaagcagccccggcgagtcgatcaagagcctcgcgcttcgagaccctcgaagggtgtgcgaaacctgagcttattccgccgctgcctgagcccgttgtttgcaccgccgccggagagtactgtgttaagggatgatcgtgggtgaaaagtcttgtgaggttccggactaagactgggagagaggaccttgggtgagcccaagtctggagatagggacaggtggtggagccagagaggtagacgaatgggtgatcactgcgaattcggtcgttgtaatttggggagacgaagacgattggagccatgaaagggtggttttcgtggagccagattgtgatgggaacaagaggagtgttgggagttgcagagatgcggagttctccggtgacgcacaagaggttgactgccatgccgtcgttgtggacgaaggtgccgaaattgggagtgaaattgggaaaatcttggagaaacgaaaggaggtgatttcgaatcacccatttttggtttggatctaaatatgagaggttgaaaggactatcagaagagagagcttgttctatgaattggattttagttggtgatgccatgaatatagtgtaagaataaggaagacccacacttataacaacttcttcactattacatattagcaagcaaaataaaacttcttagtattattatagttttaatgttgtaactaattatttggactatatatctatcaatctaaatatatcgtttctagaataataaagaaatattataattttggtcaagttatgaaccaaaagagactaggtaatgagaaggatattgtaatttcttggaagttttgagttattgacttgatggatgtttcctgaggcttgcttctttcgtatcatgacttgactcggcaatattttgtttaatacaaaaaaagtagaagaaattcattagcttctagatttcttttcttctcaaaaaaaaaaaaaaaaaaagaaaatatacatttatatgtttatgttttattgtttaaagacaatgttgtagtgtttgcaagtgactgatttttttaattttagtgagtagactttctttcaagttcatctcctagtatatattacaccaaattgtcaaattcctcttgcaaattaaaatatagaagtagttttccgattcaaaaaaaataatgggataatttaaaaaaaaaatacaaaaacaacaaaaaaataattataaaagtagtccacctatcccgaatgtttgagagaaaatatcatttagattagtagtcagcttatgaatcgacactttattagggcttgtaatgagaatatcatccacataaacttgaagactaaccaaactctgagctgaactaaaaataaacagagaggtatcagcttttgatactgctaaacaccagtgaaagagagttattttgagcttatcattccaagctcaagggggcatgtttgaggccatataaagctttatggagtttgaaaacatgagttgacttagttggatcttcaaagccttggggttgagacacgttcgttgtttccagcagtgtgccactaataaaagcatttgaaacataaagttgtctaacctcccaattagatgacactgcaaaagtaaacaccattcgaactgtgataggtttaactatagaactaaaagtgtcctcatagtctacacctagttgttgaagaaagcatttagccaccaatctagaattggatttattaagagagccatcaacattcaatttaattctatgaaccccacttgtttccaataagatgcatatgagactcataagaaacgaaagtccatgtccctgtacaaataagagcatcaaattcaagtttcatagaggcaaaccaggttggattctgaagggtaggtttaatggatcttggtttagtatagagtaaaatctcaagtaacttgtgcttggtagctaaataaacctttggcttataaatgcctctttcatgatatcgtgtaattgtagattgagtcctctaaggtgcctgagctaccatatcaacttcgaaagcatagggagctatagttgaactaggaggtgagctagacacaaatgttgtaggtagtggatagttgatagatgaggcatagaagactcattcaacttagtggaggtgttggaagaaacttccgaagaaactgcagtagcaaggataaaattggacacctttggaaaatgcaagtgcggctcagagatagtattaaactcatttggagaatgcaaatgtggcttagaagagatcagatacagtagatgaagacaatacattagtacttgatagaatagagcttgtagaaaattgagcagtaggaaaaataggagaactaggaggtacccgagttgataagggagatcgagttgctggaaagacaagctcattaaacaccacatttgtagctataaaaaagtctagctaccagttgtattctcacagagataacccttatgtttgagagagtagccaaggaaagtgcattctttagatctgaactccaatttatgatgattataaggccttagatgagaaagtaagcacatgcaaaagactttaaaatactgtaattaggagcttggtggaacaaacactcaaaaggactaatatttctaataacatgtgtaggcattttgttaatggagtaaacaacacattgaaaagcatgccgctaataagacatgtccaaactaagttaaactagtttctgtgatgggtctatgctttctttcaactctaccattttgttcacgagtataaagacaaggatgttagaataatatatcttcaaaaagcttatattcacctccactatcatcttgaacactgaaactgtttttccactaagcttttgatctgaatcaatatttcaaaagcttgtaatttaagggtaagagggaagatccaagaaaccttgctataattatccacaaacacaatataatatttataatcgtcattagtcacaatatatgagggcctcgacaagtcaatatatggattaactcaagaggttgaatagcatgaggtgtagatagagaaaaaggaagtctatgacttttacccatttgacaagcattaaaaaattgcaactttttaaaaaagtgaggtatatttgattttgacagtattctcgagcttacagtgccaaagattgatgttagatgataaatttaagacataagaaaccagagaataaggaaaaaatgagtctttattgattgcaactatattacataaagaaattgtattcaagtttgagtacaagttttataataggaattggaaatacaatctatagaaatagaagatacatcaaaagtaaaaagatgacactacaataaagtgtttgaaagactcgaattatcatctcctaggtggtatagacaatctttaatcttccatttgattaagactgcacccgtttatttgtccttgacaaaacaacaagatttgtaaaattctaggaagacatcattgtccatggtaagcttagaaacactaacaagatttttggctacaaaagggactttaaaatagaatttaggtggattggtggagaggaatgagaagaaatagtggctttaccaatctaagagatgtcaagtttcttatcagttcctacaaccacaatttcttggctagaataagaaattgcaatctcaagatgatccatgttatgagcaatgtgatgtagctccaatgtatgcataccaaccttgatcatcgccaaatttaggaacaaaatgaggtaatgttcagtcaaattaacttgaagcaatgatgaaccagatgtgaatttaggggtgacccaattttgtcaaatctaaattggcatatcattacagtatggcgatactgcatacaaacctggcataaaggaagatttggatcgagatttgatggttgagaaaactggtaatgaccagaccttcttgcagaaaatcttgatgagttttcatgagaatttcctctaccaaagttgttgtaagattgataaggcctaattattaatccaaaggttagatttatagacatcttgttaaaagatcaatcatcgaagtgtgacgttcaagacgagtttcatgagacaccaataatgcttgaacttcctctagtgaaagattgtcactctgagatgtaactccaaagacaatgggatcaaactccagtccaatgccattaagaaagtgtaacaccaagtcgaaattagtaagtggatgaccaaatatagctaatgaattaaaaagaaaatttgatcttatcaacatagttatagatcgaaaaagtacctttgtgaatattagaaagttgacctttgagttgaagaagacgagctttagattggctcaaaaacttttgttccacgattaagatcgccattgacgatcagagcctaaaaagaagaaggttatctttccttcgtcattgtgtgaagacaggattgagatcgccattggtgagcctctgaggtggtccaacatcagagaataaaatttcgtccagctcatgaccaattactgttgatatgacttgagattttcgtgctaaaaagtttgtacgatccaatttgattgtaagaaaaaatgtgagagaattaggactaatttttaaccagcataactaactaattagatggttggttataatgttttactaataacttaattggtcctaaacaattaaggccatctcaaagatgatatgggagggatatgtgtgagttactgggtaggagttcgatctttatattaaaaaaagttaaaaataatagatcgtatatattaactctccttttttttttatgggtatatattactaccaagattttcgtattggacgtagattgtttgattcataaaattataaaagaattatttcacaaatataaaaaacaacaaaaaagaaattataaaaatacagttgtacagaattttaaatatttttacgatttttaaaattttatttatagaaatacagtctttttatgttgtactcttattaatttgttgttgattttttgttatatgtatgttattttttattgttatttggagttgttgggatgttattattattttctttttactttaatatagtttttttattattttttgtgttgtttttataaaaaatcgtaaaaaatatattaaaaaaaaatctttaaacgtaaatatatatttttttgtaaaaattaatattttatgtaattatcccaaataataacctataattatagtgaaaattacacaatccaattatccataggcttagtattttgtcaattgaggaatataatattgcatttatattgaaaagagacaaaagtaaacaatttgggcttgttctttactaagatccatgtacaaaatggataagatgaaacattgtagcccttcttagaagagagttttagaatatttcttacttaaatatgatacctctaagtttggtcattttaatgatataatttttttttcttatttttaaactatttaccatatttaatttaatttttaaaactcatatttaatctttagataaattacgactaaagatttttcattaaaaaaattgatttctttatctaaaaaaacttatttttttttatcaaaaaactaatttttctttttatcaagaaactaatttcttcatcagaaaattaattttttcatcaaaaaattagtttattcatcaagatactagtttcttcattaagaaagtagttttaattatatagacgtaaaatttatacacgaatttttaagtttttttagagtgaatactattttagatcctgtgtttttcaaaaattactgaattgatcatttattttattaaatgacaaaatattctatattttccaaaattgtaaaaatagaattttgaactcaatttttgataatttttttaatataaccaacttgaagacaattttgaatacgaacaaatatagaaaatataatcacatttgtcataacatctctagatcgcattattattaaattttattttggcaaaaatcagttcagggtcctatttatactattttgaaaagtacagtgtctattttgtcatttaacaaaattaatagtccaattggtaatttttataaaaaaaataaggtctaaaatagtatttaactatttttttatggtattatttcttatctataatgatttattccatattttaatttttttaaaaaaaaaaaattatcatattta

SEQ ID NO: 298182 - DNA, 3747 bp, Cannabis indica
gatagtctggtttctcgtgtgacacgtcagcaaacattctccggttgtcgaaaacgcctacggttagcaccgtacatggatcgtagacctgccacgtgtactgctcattccaacgtggatcgaaattgtcggtgatggttctagtgcgcacccacttcttgccatatttggccacacagtaagcatccgtggacccttttcctccgctcttggtcttcatcggaagaagtccccgagctccaaggatcccaagctctaaaatcccaataggcggcttccaaagctgcttggccgtgggtctgaaatcactgcacacgtgagccgcttcgtccaacacgtgatacccaccctccaagcaaagacgcaaatggattcttccgtagtagggtccaccacctggacccccactcccaccaccaccgcctcctgctcctccgcttagctccaagccgaaccatttcgacgccacgtggcgatcatctattcgctgctctatggagctcacaggaacaaggatgtggccgagaactgcaatttctttgcctgtacggtcttccacgattaagatcaaagagtcctctaatggctcgcaggcgacgaaaattagatcctcattccagtggaacgacgcgctgtgattgttcatggaccctcgcctggtcttcgccgactgaaatcccacctgggctttgatacggatatccggtgctgtcaatggaggcagattcggagcaatgtgaaggtcctgagcttccataattgttaccctcaaataccaaagcttcggcgattggtaaaccttcgatcgcgtatgtgccacgtacggcgcgtccgaactccatgcctccgggaaggcatcgtcggcttgggttcctatccacacagagagttgtatgtctccagagaccctgccagaattatgatctccgtcaccgccttctagcctataccactgcggagccaagggactgtccggtgcgtctcgaacagggacgtctgagaggtcaaaacatacaccaccgagaaagttattggacggcatgtcccagaccgagatctctaatgttgagcttgctgattcaggttttccatggcccaaggcgaatacctgatgccattctggtgagtcgatgggttctccttgtcgatgcatcgcaggcttagatttcactaaatggtttgacgtccggatcttcacgtaaggggcttcactcggagctaacccacgagccttcacaatccggataaacaaatactgcatcggctcgacgagatcgtagggatgaattcgctcagaagtcgtttccctttcatttttccggcgataactctcggagaaaactctccatttggtcttctcattctgactctctcaccgcctacaggtcttcgagtttccatcttcattaactccggcggtggataatgaacctcctgatgctgtggcgggtgtggctggcgaccgcccatgtccggctccgcaccaggtccaggctctgtatgtaaatgtaccacaggtggtggccctgtttcctcaatcactccaactggcggtgtatgcataacctcgggcactgcgtgaggatgacgattgtggtgatgagcctgaggaggatacggatgaggttgcccatccatgtgaacagggacctcataccttcgtggttcctcgactaccatcatcgtcggggggacattattaggcttctccggtggaatatcatccggcggaggttgagactcaggcggcggtccatcttcaaccatctcatcaaaataataaatcctcagcccaatctctcccctaatccaactaaacacactcttcttctccaaaggaaaataaaccagcccttcgtccccacgcttcgcgaactgggtaccgtagagcttaacacgacccaagaaatgattcttccgagctgttccagtggcgttgcagtacttcttatcattgtagacctcgatctcaagctcctcatactccatgttttgtgggtctgagacaaggaaatcaagggcctcgttccaaacagggttgaggtctctgaacttggtggaagtccgcctcttctggccatcgaaatcggccacgacgtaagcgcttgcggagccttgaccatctttgggaagaaggtctcgagcatcaattacttcgacgataagcttcctgacagctctcggcggttgaggttgagacggcggtggctgctgagattgagactgaggctgaatctgagacggcgtcgtattgttcatggtctcatctcatctcatctcttccttgctcttatttttcttcaactactatactactactcactcacactcactagctcacaattacagtaacagtaaagttttgcgttgaaaaaacgaaaccacctcttgggattagggtttgtttgtttggacctttcttcccgtttatcacggagacaataagattttgtgctcagttaatttttctcctattttcatttcatttcaattttatttttttttaataaaaactgaataaactaaatggaataatttctgctttctggaattcttttagtacggaaaatgcaatttcgtcgttgttttcttaagaataagaaagaaaaataaagaaattatcttgtacaaagaatgaaatttattattatttaataaaaacaaaaaactattgaagggaatttttctctttttcaacaaatatatacttataattttttaattaggaagaatgtcattaagctttgtgtttatttatttatttatgggagagagaatggaaattggggtgatggctgagttagtgtagtggaggagagattagattccattctctcttgccaagttttaatctacttttctattttattttattttcgtttcccgcctttatgggttcgttatccacctcaggattcttctttattatatatatacagatatatataattttttattctcatacaatatgtaatttatatataaaaaaaagattatatgataaaaaagttaattaactaatttatgtatagttgcattagatttaactgacacatacatgcaaacagaggagctgtagccctcaaaaataaatattaatgcttttgtatatatttaataagtaaaaaaatatattaaatatgattatcttcctttcaaataatttttgttgtatatcttgcgtcaatattcataaaataactatttcaatccaattcaatccacaaagtataaatatttgtattatgaggattggatgttgagtaacatataaaagtaaccaatctaattcaatttacacatatttatatataacctagaatttcttccaaaatatgtgacacttcaagagtaaatcagatggcaataggacccacactatggaacattccacctctaatcaatctcggaggatggtatttcagacaaattgtaaaaggatgggctatcttcgagagggtctacttggaggatgagaggttcttgccccttcttctctgtaagagagttcgacccggagaaggtgtagaaggacacgggagcatagcacactacacgaggctaaagtcactgtatatgcatttaatgcagcatggggaagatcatccaacacatttctttaaaaaaaacttgctcaatatggtttaaacgcataattccctgatttcatgatgtcccatacatcaattgacaactaaataatgagctatcaaatcataagcaagagataagtcaagtctcactaaa

SEQ ID NO: 298183 - DNA, 2858 bp, Cannabis indica
atacggtgtaccaaacaaaccctaaatgtttaaaaaatttatttgaactttgcatattggaaaagtttataactagacccgtaagatcaaaatatttttgaatatgaccaaattacccttagttttagtccctatattttagtataatgaccttaaattttagaaattttattttgtaaccaaatatattttaaaattaattttttaataattaagaaaacatatttttgttttaattttaagtactaatattattattcatttaaatagtttgattaaattctaaaatattttgactgaaagaatttagctcctatttttttcaaaaagaaaaaactaaaaaaaaaagttaggtcaattattttttagcctagtgaaagctaggtttataataaagtcaacaaagtttctataattttctacctagtctcaatccagttgaaggctccacaactaagtcgcattagatagcaaaagtgtatggtgtaagtagagttgtaaatatggctaaactttttaacacgatataaaattaacacaatcctaagaagcaagagcacgacctgatataaaaaaaatataagtttggacacaacacaacacaatactataaaatggcatgacacgacacacgtggcataaatacctaatattttaaatttcatacacttatatatatcacatactttttgttacggattaaatacttaaagttacatttacgttaccttcatcactacaaatccgttaaatcctattaaaatatatcaaggtgaaacatgtcaaggttgtttactcatattttcaattaaaaataaccataaaataattataaaattaaaaataactaaataataataaaactaaaaaaaaacaaaaaacgaaacaaaaaaagagatataactataaatagtatttattatttaattattgttttaactttaaaattatttaataagttttttattaaaaaatacttaacaaaaaaaatacattttttttatatgttttatttgcagtttaacaaatttaaataataattaaaaaatttttactaaaaatatatgaatagactattaatatgttgacacgtgtcaacttagtctcactactacataaaagagtatttgcgacagttttaaaaacgtttttttaactgtcggtaaaaaaattgagtgtttaaaaccgttgggaaaaatagtgatattcccaacggttttacactgtcaaaaggtataggcgacggtttttaaacatgccttaaaagggaatggcctacggtttaaaatagtcggcaatactataggcgacgctttaaatcgtcgctctactctctctcactttatccttttcctccgctctctcatggtagcataaaggtacgcacaacattctcttatttgttgtttaaatttctattaatcatgatttggtttgttgatattgatctgtgtgtgtgttcgaaataaatccaaaacttgcaatgcgaagaaagtttcaaggatcgtcaagtgaaaagtattccgaaacttatcaaagaaaattttgacgaggatgaagacgagtacaacaacggtggaggaggatgaagcttgtaagggtttcggagcagatgcgatatatgcgagaagtggtttcgaggaggataacgacaatatattttttaggcaatccactatagcgacagttttaaaccgttgcccatagtatcgattatagctgacggtttcaacccgtcaggaattcttttataatgacattttttcactgtcgtctactctacccagtatttgcgacgcttgtataggcgatcgttttacaggccgtcaggaattctttacctgacggtgtaaaattatcgagaattctggctattttattagtgtctattttaatagaattttaactggtaatgataaaagtaacgtatgtaaacgtaaatttaagtatttaatccgctaaaagaaaaaacatgtgatatataaatgtataaaatctaaaaatatcaggtatttatgtcgcaaatacccctatatttgaataggatttaacagaaaagtagtgacggaagtaacgaaaatgtaacttaaagtatttaatatctatcgaaaaaaatatgtagtacgtatttaagtgtataaaactaaaagtatttatatttatgccgcaaatatctcttttataactaaaatatattttgatcatcttaaattgttttaactttaagtcttaattgtaatctttagaaaacacaaattttgaagattttttaaaaatataaagtcgagaatagtaattcatctaatgtaaataatctaaaatggtatgttgtcttaattcaataccttagaatttagttgattggtagttctttgatataaaaaaactaactaaataatgggattcaactgaccattttaacaatcaggtaaagttttactgtcaattccttaaactaacacctataccagtactactacaaaatagacttttcgtgtctgttcgagggacgttttatttaaaaataaaaacaacggacactaaaaaccacacaactctaacgtgttggttcataactgacacccataatgactttaagtattggttagtagactgacactaaaacaataattaagaccaaaaaaagttaagagatattacctacaaattgagtataaatgttggtttataaccaacacaaaaagatcctttggtgtcgattcttgttaacgcagatgtttgttcctatttcgtgattaatttgcacataaataatagtagtaaaggaagaaaagataacacaaagttttttacgtggttttgcagttaaaattctgcatagtcaacgagtcaatctt

SEQ ID NO: 298184 - DNA, 4291 bp, Cannabis indica
taaatacatatgcatatcattatccaattcttacctcgtttccaaattcaggtgtgtcggtcaacttgagtgaaactactgctcgacgacttatggcccctaaatcacagtatttgcaaaattaatgagtgacacgctaaatcacttttcagggacttaaaatcaaactagaagtttccctatcgatgaataaaatggcaataccctaaacatagcaaaaacgggaaaaactagggttccctaaactggcccaactggcagactggttccacaaccaaatgaccagatctatggggttttttggggaccaaccaaaattttggttcctacatgtcccactgaaacgatcgaccagtttagtgcaggaaacacaaaaaacatcataaataagccaattcgaccccaaatgatctaaaaccttccaaacctcctaattaggtcacaacaaacatactttatgcaataaaaacaagaatcaaccacagaaatataaatcaccattacagaccaaagtttgagctctaaagctcaaaccttgaccaaaaacatcaccaagcccccaaaacaccgtgaagtcaactcaaacaacatcattttaacttcggaacacaaattcaaacatccttcaacatcacagaaccctaatcctaacatcatgcatggaaaactaaattgaacttaaaaaaaacaaaaagaaatgagctagggaaattaccttggattgaaacctacaagattctactaaacactctgaattaggcagaaaaaacccttcaatggctgctggtttctagagagcttgaagagagaataagatattgtgttttctttgattttttgataaatgaaaaaaaaaacataattatctaatatattaaatttatattactcaaataaaacaatccactacaaggcaaaaatataaaaatagaaaaagactattttacccttgcctatgccaaaaggaaacttaccacctaggggtaattgatcatttctaaaaccccaaatattcccaatgtctatctaggttgccctgctattattaaaatactaaattataaagaaaatgtgattctattggccaaacgtcgcgttccaatattgccacacataaaatataaaaaacataaaatttcatatatagtataaaaccaacacaaaatgtaatatttgtagtagtgtttctcattgagtatcaaagtatgaaaaaggagtgcttggtgagatcagatctaaagactgtgctcaatggcaatcatctctgtattccatctgttagctaaggtatggtcacgagattcgtttgctccttttctggttattttatagcatctttggaatgctagaaactcagtagtgcatgggggatttagcctacaggaaggggacctcctaaattggtgtggtaaatttttgcttaattataatcaagctaattacattggaggcagctgggaagtaaacacgtgggtgccacctgatgaggggtctgtgaccattaatgttgatgttggctgctgtgttgaggtggggctttcaacgagtggagtggtgatttgagaaagtaatgatgcgattcaattttactttagtcatgattctccctcaagtaagctcatctttaattgctggattctttgctatacatgatggcatccggactggcttacaacgatgtatacccatattttgagttgttactgattgtcttcgagcgatacaacttataatcgataaagagaaaggtgtagggactttgatgagctactgcgagaaattacacttttgttgtaatatcttactataattgaattaaaatttgtgtattgtgagtgtaattaggtggctcatattttgaccaattatactttggtaatcaaaattagtgtcatgtggattgggattacttctccttaagctattcatcttctcttctcaaagaaaaaggcatatctagatgaatagcttgaatatcaggagaagaaatcccaattcacatgacactaattttgattaccaaagtataattggtcaaaatatgagccacctaattacactcattatacacaaattttaattcaattataataagatattgcaacaaaagtctaatttctcgcagtagctcatcaaaatatacgtggttgaacgttaagaattaaaatataactcataacagaagaaaagatgaaaaagatagttattattatccaatttcaaatagaattaatagctaaatatattttacacaataaggcaaagtgtcaattatggacatttatatattaataaagatatatgatcttttcccgaaggttagatatatggagttgtaaagaaaaggaagagatttaggatttgttttattaaggtttttgtttattttatttttttttttaattttatagaaattcacatagtaattaataaagttacataaattgcagctaaattttatatagcaacttacgtagaaattatcagagtaactaaaatcgtaaatttatttaaaaataatatatgttacaaaattttatataaatctattatgtataattttctaatttaaaatattttcaattttttttatttttttgagaaaaccaaatttagatttttttaacttaaacattaaattactataaatatataatttttacttagtctcgaaacaattcaattataaattattttctcctttcaaaaaaaaaaaaaaaactcccatattttttctctcagaaaatatatatattttataaattgttattttttatagaataatctctcttagaaaatgttatttgaatattacaatactttctttcttccaaggccttttgtcttttattttgctgaagagtcatattcctttgtactattttgttaatatataaattattaaatttggaagaccggtaggcacatttctcacatgcccaaattaaatattaaattaaccacttaaaaattcaaaaattaagtaatggactagatagaagtgttaatctgtgaatgggaaaaaataatgattttatcccttaagcctctataaataggatcaagcaaccaggttaaggcatcccaaatattatcaatactaagcatatcaaatattgacattccacgtccgaagcgataatatggccttcaacaagctttccttggtgctgttcctgttggctgttgtgactatcacaactcatgctacccttgactcttccttagaatctgagagtgtttatcagtgcgctgttggtatgcatctataatatcattgagtgtctcctacttcttgttttaacttaaaaactttttattttaaagtagttatatacatatattcgttgttggaaggacccaacaaggattttcttcgagccatgatgattgaatatccccaataattattatcttttatgtgggccattttttcaaatataattggagttcctttctattttattttttttcatcttttttagacactcattaattaagatataaaaatgagatatgtgaatcttgtttgattatatattatttgataattactttgtgttttgtaaataggtccaacgaaatgtgctagctgtgattgcacagttggagaggatgggaagctgagttgcactcgtacagacgagagaagaggcgcttgcccatcaacttgcgggaacccttgctttgcgacagatcatcgtgcccaaggtgtctctgccgatacaaggtggttggatgcccaagaatatgccccacctctcccaacatgttcgctgattttcttgcttccaagactgattagttagcctatatttatatatgtatgcaacgtaacggttattacactatatctatatatgtgtatgctacgttaaatatatgtattatgtagtgtaatgcatctctatgcgagtatgctagcttaacctaattgcctcaatcagtactgttaaagttgaggaattttaataaaatgctagcttttctatatcttttgagatatataaatcaactcattttagcattgacactaacactatggtagagagatcggaaagatattaggattggattcgagaaaaaaaaacttatgatggaaaagagagttaagcttttttatttttaatcttataaggcaatttttcaaaataatatatattaggaatcatgatactattttaactttttttaatatatatatttttttaaggaaattatttcatatactatttttttaagttttttttttttcaaatttatggtttgggtttttaaagtggttgcaggg

SEQ ID NO: 298185 - DNA, 10457 bp, Cannabis indica
aaaaaaaaatgtttctctattacatattatgctgctgttattaatattattaggtttatttttatttttattattaacaaacaaacaaacgtgaagagtaacggttctgatcgcatcccagcggagatgatttggtgactggctgcacctgtactggtttcgccaccagctacgtcctcgactcctaagcccctcttcttcttttcctacaattctcttcagcttttgactttccatgcttcttccaatctcaggttctctatactactctctatttctttcgtttatttactactcgatttcattttcagcttttcatatttttattccacttcaatttgttcttatttgaaacgtattttaagggctaattaatcctggaaggccttagatgccgttgtttggggctccaaaatgtcttgtttttctgcattttcatttttaggatctaaaaatttaaagatctgttcgatcttgtttgacttgaaattgaattgggattacattgctgtgttgaacttggatctcgtactttttatattaaatttaggttgtttggatctctggtgtgttgaattatgtctatcgattttcttaaattagatttgatatatcttttgataaatgaatggttgattaatacattagccatttaaatttgactagaattccttttgaagctcattagttgaccataaccggtcataggtagcaatgggttgctgtggattttctgtatggagtgttttattacacctgagagacaacgaggaatggttctggagttggtgccgcaatggtggcaatggagttttattgttattatgctgctactttgggtgttttaattttttttattgttttaagttactgttatacattatggtcatgtagtattggattgaatttaaattaaaagcataataggaaaaacatagaagaataaattagttgatcatttttcaactctaaattaggaaaagttaagttggatgtgaagttgtaattgttttcttcttatcattgaaatgcaataggataaaatcatcttaaactttctgatgggattaagttatgccatactaaggggatcatttagaatgtttgtttagttctttcagttctccctataatttcattacaaaatcacatgataaaattatctagtctaatgttgctcttcaaatggacctataagtatatgcgattgtgcagttgtgggtgttctttcttatatggaattacattgatgaaaagaagattggcataacattttctgtttgtaataatgcccaatgcatttctggctcctaatggcgtagacttatattggtcgtgcatgtactgagaactacttttattatgaaatctttgatcctacggttttattatttattagtgtagattcatggagctcttctttatatgttattgaacactatccgttttcatttctgtagattgtgaaggagctttttgcatatgtttctacactgtatcttcataagagtcagtatctcctagctacagttagtccttgggttctttcttaagaatattgcttcaaaatggggcagctaaagctgaaaacaggaatcaaggcaatggaagaacctcttcctgaatgtgatcggtattctagtaaggctactttatcatgcgtgattaattcagaaataggagctgtgttagcagtaatgaggagaaatgtaaggtggggcgtgcattatatgtccaatgaagatcagttggagcactccctaattcagtctttgaaagcattacgcaagcagatttttacatggcagcatcgctggcataccatcaacccttctgtgtaccttcaaccatttctagatgtgattcgatcggatgaaactggtgctccaatcactggtgttgctttgtcttctgtttacaagatcttaacactagatgtcatcgatcgaaacactgtaaatgttgaagatgcaatgcacttgttagttgatgctgtcactagctgtcgatttgaggtgactgatcctgcatcggaagaggttgttctaatgaagatattacaagttcttttggcttgtatgaagagcaaagcatctgtcatgttgagtaatcagcatgtttgcactatagtgaatgcttgtttccgtatagtccaccaagcaggaactaaaggtgagttattacagcgtatagcacggcacaccatggatgaacttgttaggtgtatcttttcgcaccttcctgatgttgacaactcagaaatgtctccaataagtggagtcaatactctcaccagggtaacaatgctctatttttttttctttctttctcttcttggaagtttcattgtgctgtcaagtactggataagatgtattgctgatatgtgatgaaagaaaaacctaacgatttggttttcttatgtcaagaatctcttcatgtttgtaatataattatcaatttttaataaatatgatttcttttttctatgcagagttctgggttgaacagtgagcctgcatttgggagtaggcaatatgagaatggtaacatgacttctgaatatgatggtcaaacattatctgcaaatcttgtatccaatacttatgtacatgcaggagcagtaggactggatgatgagacagttgagactggatctggaaaggatagctcatcatatgacttaattctgatgacaaagccatatggagtactctgcatgatggaaatatttcatttcttgtgctctttgctaaatgtcgttgagaatatgggaatggatcccagatcaagtactatagctattgacgaagatgtgcccctatttgccttgagtttgataaattctgctatacagttgggtggtccttccattcgccatcaccctacattactgtgtttcattcaggatgaactgtttcataatctgatgcagtttggcctgtcaacaagtccacttattctttcaatggtatgcagcattgttcttaatctgtatcatcatctgcgtactgagctcaaattacagctggaggctttcttttcttgtgtgattttgaggcttgcacaaagcagatatggagcatcctaccagcagcaggaggttgcaatggaggctcttgttgacttctgtcggcaagaaacatttatggtggaaatgtatgctaacttagattgtgacataccttgcagtaatgtctttgaagatcttgctgatcttttgtctaagagtgctttccctgtcaacagccccctgtcatcaatgcacattctagctttggatggtcttattgctgttattcagggtatgggtgagagggctgccaatgcatcagttggttcagagtgcactccatttaatcttaaagagtacactccatattggatggaaaagtgtgataattatagtgaccctagtcactgggttccatttgttcgacggagaaaatacatcaaaaaaaggttgatgattggagctgataacttcaatcgtgatcccaagaaagggctagaattcctccaaggagcacatcttttgcctgacaaacttgatcctcaaagtgtggcatgctttttcaggtatacaactgggttggataagaatctaattggggattttctggggaatcatgatgagtttagtattcaggttcttcatgaatttgcttggacttttgatttccaagatatgaatttggatactgcattgcgactgtttttagaacattcagactgcctggagagtcacaaaagatacaaagagtcttggaggctttctcagagagatattatgagcaatcaccacatgttcttgctaataaggatgctgctctcttgttatcatattcattgatactgcttaatacagaccaacacaatgtacaagtgaagaaaaaaatgacagaggaggattttattagaaataatcgaaaaattaatggtggcaatgatctacctcgagaatttctatcagagttgtatcactcaatattgaagaatgagattcgcacaaccccagaacaaggtgctagttttcctgaaatgaccccaagtcgatggattgacttaatcctcaaatcacagaaaactgctcctttcatattatcagattgtggagcctaccttgaccacgatatgtttgcgatagtgtcagggccaactatagctgctctttctgtagtttttgataatgcagaagatgaagaggtttaccaaacatgtattgatggattcctagctgttgcgaaaatttcagcatgccatcatctcgaagatgtacttgatgatcttgtcgtgtctctctgtaagttcacgacgctgttgaacccatcatcgtttgaggaacctatgttggagtttggtgatgacacaaaagctagaatggcaactgcgacagttttcaccattgccaacagttatggtgattacattcgcacaggttggagaaatatcctggattgcattttaaagctgcacaatcttggtcttctcccagcccgtgtggccagtgatgcaagtgatgagttggagctttctgctgaccgcggacataataaacctatcacaaattctttatcttctggtcatatgcctcctgtgaatcttcctaagagaccgtctggattgatgggccgatttagtcaattcttgtcccttgacacagaagagccaaagtcacaacctactgaggaacaactagcagcccatcagcgtacgcttcagacaattcaaaagttccatattgacagcatctttagtgagagtaagtttctgcaagctgaatctttattgcagcttgcacaagcactcatcttggctgcaggaagacttcagaaagggagcagctcgcctgaggatgaagacggtgcagttttctgtctggagttgctgattgcaataactctgactaatagggacaggattgtgcttctttggcagggtgtctatgatcacatctcaaacattgttcagtcaacagtcatgccatgtgctcttgtggaaaaggctgtctttggtctcttccgtatttgtcagcggttgcttccatacaaagagaatctcgcagatgaacttttgaggtcattgcaacttgtgttaaaacttgatgcccgggttgccgatgcatactgtgaacagattacacaagaagtgggtcgtcttgtaaaagcaaatgcttctcacatcagatcccagttagggtggcgtactattacatccctactttctatcactgctcgacatcctgaagcttcagagtctgggtttgacgctttactatatgttatgtctgatggtgcccacttgttaccagccaattatgttttgtttgtggatgcagcaaggcagtttgctgagtctcgtgttggacaggcagagcgttctgtatgtgcactcgatcttatggcagattctgtcgattgcttatcacggtgggcctctgaggctaagaaagctatgggagaagaggaagctgtcaggatgtctcaagatattggtgaaatgtggttgcgacttgtgcagggatttagaaaagtttgtttggatcagagagaagtggttagaaatcatgctttgttgtcattacagaagtgcctgacagtagtggacagtttacatctttctcatggtctttggttacagtgttttgatctggttatattttcaatgcttgatgacttgcatgaaattgcccaaggtcaagctcaaaaggattatcgcaacatggaaggaactcttatacttgccatgaaactcttgccgaaggtatttcttcggttgcttcccgatctatctcaacttacaaccttcgtcaaattatggcttggtgttctcaaccgcatggaaaaatatatgaaggtgaaaattagaggtaggaaaagtgaaaagcttcatgagctagtacctgagctgcttaagaataccttaattgttatgaagaccaggggagtacttgtgcctagaagtgctccaggtggagaaagtttgtgggaaatgacttggtcacaagtgaataacattgctccttccttgcaatcggaagtctttcctgatcaaagtttagagcagtcatgccatggtgaagcagcagcaaatctagtatctgatgaatcagacaaagtaccgtcaacccaaatgtcatcttttgaaggtgctgctggtggaggttaggagtatgtatagtgtattggcaactctaactgaactcattgatggatgttgattgcaactcaagttttcttaaatttagttatgtgttgagatggtttcttttccagaaatcagaacttacagagtctgtacaactctttgttcatgttggttgggaaactttagttgttgcgacttaccactgcatgaaggtatggctatggtctactctttgtcaattatggtgaagtcaaaccgaggcaggtcggtcagtttttcaatgaggaccaaagatcattggtttttctgaattgtgagtttccattgatcttcttcctccgcgaaactttagagaagactttctacttaaatacataatgatacatatctttagcgccctagtcgtagagtgcccatttttacagaaaatttttaccattttatttttgtgttgtatttgatctataccagtatgaaagtgatccttatataattttgtattattgatgtacactgtacagaaccaagatttgtttcttagtattattttaagacttcctttttatacttctatctactgtacttcctcactgctcatcaaatttgttagtgaattctttgaactagctccctctctcttgccctctcaattacggtcgatattcgagtagcacagttattcagcttcttgaatcttgatgctgctctctcacaagtgtaagttttcttcttaggaagtttgtttttcttacctaaagaaatattgttggaatcttgtactgttatttgcgaacaattgaaagtaaagcttgttttaaccacacaaaggctgtactatacatgtgatttagagtaggtatttgattcccaacaaactactgattcatactagcatttattttcaaaaccaatcaatcttttgttggctggctttacctttcttggattattatgaagctttggtcagactataaattccaagttttgtttctgcctattttgccctttttttgtgtgtgtttgtttctgggtttcttttttaaaaaagattctgctggaacgaaagtgaaaatgaaagttaaaaaatctcctaaaccaaatgctgggaatgtttgctccacgacggaatccaactactcggaaagaaagactaatgagcaattttccttatacaacattttttttaatggatagtagttattgctttgaccatctataaaattacatcacataaattgtttcaatctcaccacactataccacaaaaagaaaatagactcttatttttaccaacatatgctaaacagcaaagttgaaaaaaggtcaggtgagtccaaacgcccaaaacattgaacttcactttgtattagattctataaattccaccaactatattttcaatagacatctttcgttcatatattcaaagacagtaacttatttattaatttaggattgaacaatagagataagagttacaaaattttgtcatcatcaatttaaatacttctcaactcagtttttttttccccttttaatgttcatcaccacgcattttgtaaattcccaatacatcttctaatttgacaaaactactattttactgcactctattgtttatcacataaatatttaaatataatgtatatattatatttctttttataatatttgtgtatagcattgtattataaataatattactattatgaagtcaagccattctattgtgtctttctatatttcatgatgatactaaaaggataaaagtgtataaaatgggaaagaggacaaaatttatttctcctcgtaacaattaaatttattactagcataattgtgaattttttgtacaattttgaggcagaaaacaagtacaaatatattcttcaaaacaaagatgtatgcatttccaaaaaaaaaaaaatgtatatgtagagagagacattttatgattttcaactcgatctgcctaaataacaagcaaatatatataaaaaaattcagcaaatttttaaagtcaaatgctattttacatattcaaataatattaaattttcataaatacgtttttttcttatatatttatttatatttttacgatctatatttttcttttacaattatataaatttatttatttttttaaaaaagtaagtttaaaattttaaaattataaaatatacaagataaaccaacttgagggaataaataagatgaatgttcaggtgacaccaaactacctgctacttgaattaccgtagaataaggggagccatcttaggaaatgacttaacttaaaagacagatgatgtcggtgcaaggcaagggaataacttgtttggtcttgcggtgcactcactctcgttacgagaataaagaaagctagaaaactaagattgtctagaagggcttgccccacgacttcaactaatagtccaactgtgcttgacttgttatcaaaagagagtccaactgccactggaactcaaactcaaaccgcaggagaatggtcctagaaactcctccaacttcctcttctactcaaacttccgggaaggaaacccatccaagggaactagcaattcagcatattagcctaggaatggacaagatggatcaaaacttgcatgagatacttccttagcaagtaaataacagttaaaaagagattggattgaaggaactcgctcaataaagaatctagcataacttaagagggctcaaaggaaatcttccacggtctctagtgataaggctcccctacccctatttctaaaggggcctatcacttcgttcgtaccttcttggcttaggcttccaactgaacttactttatggccttgctgcccaccgtgagcagaagctaagtgcttgaaaagcgtgctaagtaatgtttgtgatttactagttgattcaaggaggatctatctttgatgattgtgaccaatatgctaaagattctcccgaccttttttaacaattacagaagcaaataactgctttaaaatatagattatgatttcaaatcaatagttcactaccgtgaactccccattttatttgaacaagctttgttactacgttactaaagaaagttccatactatcgaactataggcgagcttctttagtgtttgctatctacttccgtgcttaatttcacatgagtagagagaggaggtttctgaaatggacacggactcaaaactccttgagcctatacttccctggggctgagaagaaagcttagaattcgattggaacatttccttcaagggcactcataactaaagtactcccaattgtagacgcggaaagggtctttctttagaaaagagggaaagcaagttagttacatctatgctaaatagaaaaataaaaaaagaaactcactaaaactgatttgtctgctcatctagatccattgtcttccacatttccctctaaatcatcgatacataaaagggtggcaaggtcccgcccctctttcttggccgggttaaaagtgaaagtcaccaaaatctagtggaatgctcttgaaaaaaattcacttgagggagacagaggagagtggaattttgtgtgttagggtgaaattcaaagatctacgaaggaacgccaaaagcgaaggcagctctctaggtccctactgacgatggagtgcaaaagcatggggagcaaaaaagattagatacgctggtagtccatgccgtaaatgatgagtgttttcccttggtctatccagatcaggggcccaactaacgtgtgaaacactctacggagaagcaccaactccaactattcatgccatcatcattgggcttacaagaaagggaagcttccaagtaatatcccccttcccttgtccagtccatggcagattcaaccttgagaagaataagcatggatgttggtcttgaactacgtgaaggctttatagagaactgggttttttgcttcaactttagttccacttatcttgaagtgtaacactcttcctgcaagttttcctatccctgggagcttgatttcacactgacaggtttgaaggaaatggaatgctatttggggaagagacaggttcaccatagacaagcatgaaggaaagggagtgctagccatctcctttctttctatatgttgattgatatggatattcataccttttctcaatccctttcgtcatgttttgaagtttgtatcgcactaatgagaggaggtggcaccagatagtttgttggtgaagaactccattcataagagtgaactgtgggctacaaaaaagtggggttgcacctcagttgtacac

SEQ ID NO: 298186 - DNA, 1730 bp, Cannabis indica
aactccctaacctaactatatcagacgtgtttttttaataataacaaagaaaaataataagactaaccgctctgttatcagtagaaacaccagacacaacaaacataaggtaaaatgttatgacgaattcaagcacaaacgactgcatatcagagcctgtgggaagtgttccaaagaaatgatcttgttttcctgtaaataatagccgaagcgtaccactagctagagttgatccaagaacttgagctagtacataagcaggtacctatacaaatcaaacaacacactattattaccaccatataaatttaatcttataggaactctggatgtaatcctattttaataaagtctctggccttcttgaattgttctctttttgattaaatttaaatattaaaggaagagagaaatccagtttttattacaataggttataggacatgacttgtagaataaaaatgggtaattgtacagaaagcattggggtatagtattagaattgcgttaattaaataagataagactcgttgaaaattttgttttagttgatgtcactttgggtcgacattttcttattctacacacaagcttcacataatcaagttttggttagaacatgcttacctgtttcagtggaaatctcctagtagtggcaaaagcaattgtgaccgcaggattgaaatgggcaccagagatatgaccaaccgagtaaaccattaccatcactactaatccccaaactatagatattccgggaaaagtcacaactttatcttcagccaaatttaccaccaccgaggcacaaccagcaaatacaagaaaataggtacccaaaacctcagctaacaactggatataagtaaaaaaaaacaagagatcatgattaattattaatcaacgttgtaacacacaagaataacacaccacatacatataatgagttaaacatctgatgaaagctctcatcttagaaaagtggaagaagaagagtaacccatatgattaaaaaggtgtgaccttttgtatgaatggtactgagacacatggtatccctgaatctgagttggtcttagaggaagagttttgattgggctcaccatctttaacattcaaaacatggtgtccattacttgaaatctccgccatgatatgagttggttttcacacaaaccaaagaaaagaagctcaaagatggttggggaaagataatttagagtagagaaaagggaagtctgtcctcttctgattttccaaaacctttgagtgagcaaagcccagatgggcaaactccaatatatatatatgcccacacaacgtcctaaaagaatggaaaaagttaagtacagtggtgattttgaccaaatatgaatacgtttattttattttatttttttctttggctatcttttatggttgtgtcaaaaagaaagagaagaaaagtatttataagaagaaggcgttgaaaaatgtgacaattaataactttatagagcagaaggcattgaaggctggctgagtgcctcaactacccaccggaaataccgaaacatgaataagaatgcctttcagataagtcttcataccgattattaattataacaactgtttattaattacggtgttatacaaaaatattaattaataaaaacaacaaaatgaaaattataaagaaaacaaggtaaaagaacataaaaataataccaaaaaaaaccaaaaacaaaaactaa

SEQ ID NO: 298187 - DNA, 3829 bp, Cannabis indica
aaaatattgtttccgattattttctattctaaaccgatacatttctcccattgattattctgattccaattacagtttagtaaacgcgctatagaagttctaaagaggacaaagaagtctgccaacaagaaacgtgcctcgacccagctttcaattgagccagagaagaccacggatgcttcctcagcacctgcaactgtgagctctggtggacaagccctagggtctgtccatcaaggtaagttctctggatctcaacttgaaatggtactcttagagccatcctgcccatgtctacttttgcaggtattgatggctcgcaagcatgctcccaatatgctacccaaagttggcgccacttcaaaacctttcaacatgatgactgggagttgatcaataaaggcaatttccaaagtttgatggcgaggagtgttgatcttacacaatcggttagtcccaacttcgtaaagctttgtggatcttcttactatattttttatatatcttcctctgacggttagtcccaacttcgtaaagctttggggcctccagaatgtcaaccagcttagcaccgagctttgcaagtctaatgaccaacgcgaagtcttggctaagcaatggaatgactcccaatcggagatcaccaggctaaagaagaatgttgaaaagcaagagaaagctcttaagactgagcttgaggctgctcaaaacaaaattaaggatcttcttaaggctaactagcaggcccagacaactattgacgatgctaacaaaaagcttgaaatggccaaggcaaatgctaagataagaatcaacttgatggccaagcagtctatttaccgagcttggttagcaaatcctgggatggacctgagtttcttaggggttggtgttgatgaaatgtgagcttattgtgaagagaccaagaaggatgaagacgttgaagaaggcaaatttgaagaagaagaagaagaaaaagaaaatttccctaagtcttcagctatgtagacttagtttttgtcattttaatttctggataatggccatttggctgagacaatattttgcctcttgtggcgtttactatgtaatataaattttcaattgctttgttggttagccaacatagctatatttatattttttatgctattttaccatgtttttctcaagttattaatagttattggatattgtgtttttatccacgagtaaacaaaacacctttctcaatttagcttagagtgtaatgcaaactttaaatgttcttacaaaatttttctgaacactttttgatattcgtttgagctgttgtgattctgctatattaattatgcacaggcagttagttaaccttctattcatactttaggttgtgtactatttatcaagacacactagggtatctcatttatagtacatgctataatatgcgagctgttatttattcagatcgcacttagctttgtgttgtttatgagacttaaaaatttcgcttacaactgctattttagtttctactttaagaagtgtttcaaaatattcaatttttatgctgttccagaccagcttttaatcaacatcctttctttttgtaaaaaaatttattttctagaccttagcgagcctagttctttaaacatacatctctagttaaaaatttagtttgttgtgtatgtatatgcccctcaaataattttaaagaaattaaattttatgattacttgaaatattcaaatctttattaaaataaagaacattatttacaacattatttacaaagataaacttaatttgacaagataaactactggtaatacgaccgtaagtgttcggtgttctagtaattttttattagcgagccgttaagtcatgctaatttataaattccggttcccactacaactttaaaacatacgaaccttcccattttaggttgaacacttctgctaatgggctcgcgtatttgaaaatacgcgtcttaacaccaaatcttctactttaaagagtatttttcgaactcttttattaaagtatctagtgatgcggtgttgataagtagcattgattatctgtgacttgctgtgtttttcttcaagcaaatccaaggacatactgagaagttcttagttttgttcctgattgtagaattcatgctcgtgggtcacaatgtttacttctacagttaacattacttctgagccaaatgccaatgaaaatggagtgtgtcccgttacttttcttttgtcgttctatttgcccagagtacttatggtaactcgtcaacccatctgcctttggatgcatctaacttcttttttatagtgtccttcaaggttttattaactgcttctacttgtccatttgcttaaggtcttgatactgatgagaagcttttgataattttattcctttcatagaacttagtgaataagtcctcgtcgaactaagggttgttatcagacactgttttaattggaatgccaaacctacaaataatgttcttgatgacaaaatcaagaactattctgcacgtaatggatactaaaggttcaacttctgttcattttgtgaagaagtcgtctgctatgatagcatattttgtgccatctcgaattgtgggtaaagacccaattaattcgattctccatattataaatgggtacgacaaggtcatcattctcagctcagtgggtggtactcgaggtatatgcgagaatcgttggcacttgtcacatcgtttaacaaattcatgtgtgtctttgttgatagtcagctaataataaccttaacgaattattttcttagataagctttgccaacctgcatgatctccacataagccttcatgaatttctctaataatttcgttggcttctgttgataacacacatcataataaatgcatagaatatcctcttctgtataattttccatcaactattgtatatcgaagaattgtgtatagaagcttttgtgtcttggttttgtttgtgggaagttctccatttaacagatctttgacgataagggtcattcatgacgggtttacatctatcatgtcaattttttctttctcacatatacttggctcgttcagtacctccaccagaaccaagtttaatttgtcgaggtcaaattgagatgccaattttgccaaagcatctgcattagagttttgttctcttggaatttattatattttgaaataaagttttttcaaacttcctctaattatttggccattgtcaagccttttgcttagtattctcccaaaatttgattcatgaccagctacaaagcaccaaaacattagtattttcatttactacatatttctctatagttcggaatatggggtctaagtccaaatctaaatcaaagtctgagtcaggtataaaaaattaagtagggtaggaaataataaattcttgttattaaaaaagggacataataaattcttgcaagcttgacttgccttcaaagaatctagaaaattttaatttcaaattttaaatattaaaatagcaaacacaccactctaataaaattattaaataagatacacatcatacctcattatttacattaatttacatggaaaaaaaaatgcacattgtcattttctaaaaggagaatattataagtgtataatataccttagatcaataatctaatttttgtgttaaatttgactaaaaaataaattaatgttatatttaatttaaattttataattattaaactttatattaagagatcaatataaaatacgtataacaatgaaatttatttttttattgtacatataaaatatgtttatataaaa

SEQ ID NO: 298188 - DNA, 2588 bp, Cannabis indica
tataatatataattaaatttattatggatttattaagtgcattgcacatgatttatcagatttagtcaactattaacttttttattttatgaaaaataaaaaaaaaaaaattagtcacacttataatcaattcatgttagaaggaaatattcccttacttttaatttcttattcaaaatttacctttatatatatatgaaattcacgctttccaatggtataaatgttttttttacactatcaatgacaatttcattattaaatagcagtttctaatcctttgtttagtaaaaaaatggtttgtttttattgatattaccaaaaaaacaaagtttaattaggactagtgcttgattaaaatacaaaacctatatttaattaattatttaaaataattaaaaaaaaaaaataataatctaaaaagagaagaaacgtaaaaatatatatattagataaagattgtgtgtttatttccaaaataataattagaggaaaatttactcaaaaatattagcaatatatattatatgtgttatggtaattaatttatatgaaattatgattttcatataataatagcaaatgataacttgttattaacatattgtataatctaatttgttgtgtctaaccaaaaagcattcaacaggtgaataaatattcaataatgaaagcaatgctcatcatttgattcaattaattaattagataaaatgaactttaattcaatgatcatcatttataatatgattgtgatatgtaaattactatatatatgtatatatgcttacattagcatccttaatgagggaaaggttagtaatgaaactaactataataatatgcatgtttaattatttattcacatatttaactttaggcctaaaggggtagccacgtgatagaataatatggcaattaatgattggattagtatatctttgtttgaatagagaaccattactactactactattatcattatcaatacaataattatgtagttatttgaagataaaaatgttataataataccatattgtgtggttttatttagcaagactcatcattataaaggggattaattaaaagcaattatgtagagatgttttagcaaaagagggaaaaaaagttactttgggttatgatataaaataatactttgggttatcatataaagtatgaattatttactatttaattatatttgagtgtaattcaatttaattacttaatttgatatttttatttaaacatataattacatgatatccatgcaattaaagataactgtatgtttttattgtaattatactaactattttgtcaaataaaataataaaattttatatcaagtactttttatatgtaaacacattttatattacttaacaatttcaattttttttataagaattacatggtgatatttaaatacactttacaattgtttagaattttaaatatttatatgatttttaaaattttatttacaggtcttttaatgtttcatgttatttgtatattatacatttattattttattattttttatattattttgtaatatttttttttttattatttttttattgatttttcttattatttttatagtgttttataaaaatataaaaaaaaaaggaaaaaatttaaccaaaaaataagtactctttctgtgtaaattttcagaaaaaaatgtaaagagttaagtttgggtccgagtagaaaggcaaaaagggcttttacatgtcggctattgggcctataaatctgggcttgattcacaaaatcccaatcaaaaaagttaaaactaatttttttaaaaaaaagaaaaaaaaattaaacttttttgacgaagttactgttgaacaccggacaagtaggcaatgagatatggaagccaagcttactcctttgcctctctctctctgcctcttgttatttttgttctctctttcctttctcctcaaaaaccttggtttcattcgttttcttgtaacgctcaaattaatgcctttttgattcttctttcttctttcttcagcgttctgtccgaaccacattgcccgttatttttttttctttggttcggtttaactcgttctgtctttttctcaaatgtgtgttttagtgagtgatgagtgagtgtcttttttggtactatataagagagctcacaattcattatcaatgatacattttctctcttcaaaatgctcagtctctggttttcttaaatggggtctttttatttttagtttagggattaaagatcaaaactttgagtgttctttctgtgataactgcagattactttagtggggttgttgatggttttgttctattttcctttttttatgttgcatgttttgtttgtaatctaatcctgtccttttgaacgttttcaaaccttttaaaaatctgttctttcacatgggttttgatgagtattttgggttattttataattttgttttgagttgagctctctcagttttttgaaagggtctggcgggtttggtagaattttgactatttggacgattctttttgattttgcatttgggaagttttttttttttttt

SEQ ID NO: 298189 - DNA, 1064 bp, Cannabis indica
atgatgattgtggcaagcatagttccagacttttcaatggggatcatcacaggtgcgtgggatccaaggtgtcatgatgttaaatggtggcttttttcgcttaccaaatgatattcccaagcccttttggaggtatccaatgtattatattgcattccacaagtatgcaaatcaaggattctacaagaatgagtttcaaggattgacatttccaaatggtcaagctggaggagagttgtccaccattagtggtgaagaagttctaaagagtgtttggcaagtggagttaagctactccaagtgggttgatgttggaatcttgattgggatggtggtaatttatagactcttgtttttgacaataattaagaccaaagaaatgataaagtcacactaatttgacctttaagggttacatgttgttaaccagtaattaactttcaatatttagttaaaattgtttttttggattattagaattttgttcttattgtattgccacatattataacaattcttattctagtcagttttaatgtatttattatactattgtatggtgtatgaaaattctgatgcatagcaatgaaaagttacagaatagcttgttcaattatgttgcaatgcaattttttgcttgaaataacttctcatatccatcctataaaaatctacttgatcaatatctcataattatcatgatgatatggttcttttacatagtaagaatgtcctactattttgttgtctgatcaattttttatttctcataaattttatatagcatgcatatcatattattattatcattaagaaacgtatctgatgactatatcataactatcaacaaatgctttgatgttaaaatccttttacatagtagatgtttctaacaatttttttttaagaccaagatggagtacaaaatacaagctcacaatttcgtaaagtaggcatatcattatatgttataacacatcaaataggattgttcattaaactgttcacgttgtacaaattaaacacaccacatatactgcataaaaaaatatatgttttaaaat

SEQ ID NO: 298190 - DNA, 1352 bp, Cannabis indica
taagttaaaaaagtgtatattattttggaaaattttaagattgattctacatatgggtgcattcatagttatttggtgtgttacactatataatacttaattaaataagatttttactttcggaattttgatatgtagtaaattgtgctcttacattattgtgattgctgaatttaagaaattttgtccaatttcgttcaatttactaacgtgaggattgtctatcattacaaaaaaactgctacttttaagtgacaactttttagtacacaacataatttttttgtgactaaatgtgacttttagtcacaataaaatgttaacttgagactaaaacatagtatttaattacaagttgtcactaatttagttttaatcacaacaagtattgtgactaaaaatatatttagtcactaacaaattgtaatttttgtgactaatacctttagtcacagacctttagtcacaacatatgaaaaataatttattattagatagtcaaattttttttttactttaatcacaaattttgttgtgactaaagtaagattttttgtagtgtatgtattacaatttgtgtctaccttaaactttaaaaatgtcgccaaatcatgctaccataatatgtaccaaatgtaaaaccctgactgatacaaaacaaaaatttagaaattttttggattgaccaaaccattgataacatcatattcatttagtccggtcttagatattttggtctggaatggttaaaattttgaattatgaattacgaatcatgtgaacaactctaaatcctacacacaattttgcccttgacctcatgctttcttcttcaatttccaaacacacaaatcacatctagatcttcttcattgtcccaataagatttgtttgtcattacacaaatttgtatttagatttaattagatttattattttaaattaattaaatttgaaaatcatattttaaattaacataaatttgacccaattgggaagtgttcggcgccatatatgtcctttaacacactagatgacctaaaatgcaatgtaggtctgttaaagaggtttagcatactgttaagttagttatgattagcttagttagttaacttatgacaactgtaattagttacattcatttatatttttaacaaactatttatagagctttttgctcatttgttaataagtaatcattttcaacacaaattctctctcttttttctgttatttctgacatagtattaagagcttacttttttttttctctctcatcatttgttgttttttctgttggaaattattttaccaggatctagatttattaacaagtatgtttcattaacatc

SEQ ID NO: 298191 - DNA, 10825 bp, Cannabis indica
ctttttctttttcttccttaaaaaaatgtgaataggtaacaatcttaggtaatttcaataaagaatttatagtgataaaaaattactggaaagaaaaagtgagtagaagagaagctatagattgactactgatatgaaatatttaattatttgagttttattttaacggtatatcattagttacttgaagtacaagatatatttatttacattgtcaagtttctttgactttttcagtacccattatgatatattttcacttttaaccaatgattggaaactacatttggatttatagttgttaattgtaagttttacttgattgggttttaactaccctttttaagaattgagagcagagcattactatattttatatgttacctctttttatatatgctaccttgttttttattaagaaagagaaaattgaaagttaaagcaaggcaagactttatacactcttcagtttacatgattgaatctcttttatcatgttttgaattgtatgaccatatagtattagtttcttaattgatatgcacctctttactcttctccgctgttcttccctagtatccggactttctggaaccccagaagttgcccaaagtcaggtttctgttggaatgggattgctagcagggtcaactgtaatgctccttactgtaatatggggtacttgtattgttgttggcaagtgtgatatcgaaaattcggctgcaaaagattcaactgatacgaaagggtttagcttggcagccttgaccggtacgttcctatcttcctgaaaggccatttccttttattactttttatatgtgactgaaagggatacttaattttctggcatattcaaatttttgcataaaaatgaaatcctttccctgttttgtcattttgtttaaagggagatggacaaagttccatagggccttgttttgtatttttctttcaggttttaaaactgcacactgttacattatgttaaagacaaaatatatcaaacttgttttgtttgtgaccatatgaaattaattagaagctggtctggtgtacataaaacggtatatgtatgtatgtatgttcctataggaaaaaatggtagcagtttctttttcacttcaagtcttcaataatattaggtcaactccaatggaggtgcctatactgttgcttgtcagtaagtggggccaaatagggtcataaaataatatttgatagtctccattgttggcatatatgtttttcttttatctaattggttaatttgagtaaaaagtaatttgtgtggtccagcaggcaccaaagtaagatgcctccattggagttgcccttgttaaaataatttcgagctatattaagtgattatactgaaataatgaattcccgaattgctaactatatctggtgagctagttgaatgcatcaaaatcacattcaactcttcacagttaatcttaaaactgcagaagagtatatctagtatctagtgatggatttcctaaggaccattttcattctcacttgaggaattctaatttgaaatggattacaagaatggagtattcttaagtgcaggttctggagttagcacggatatttggactagctatgctgctgtgattatggccatatctgttatcccatttcttattgttcaactacctcaagttatgagttctacctctggaagacatttagctgtgttgattgggcttatcgcatcggtgttgctattgatttcttattgcttgtatcaggtacattattcttactgtctaccaattatgcctttatatatagtttttcaactagatttagatttttttattatttgatgtacttacatgatcgtaggcttttgtatactttgaattctaggcttttgtacttacatggtcatattaagtttgctctctaatctttgttaagtgaatgctttcaattagcttgggaaaataacaatgagatttcattagtcattaacaacatcttttgtttttcagtttgctctctcaaaactcaaaacttttattgaacaaaatatgttctgattagtgcagaaagttgaaagagaataattgttattctttggcaaaattgtttgaactagtgagaactcaaaacagatatttgggtatttcaggaatcaattttatccaatatcatgtctgctttttctttctgttatcttttggcatccagatctttttgacatgtaaagaataagcaaacttcttttttgacttgtttttttttattacatggcatacattttgcaagatatgtgcaacaataattaaccaaatatcattacttcattacatgccatacatttgcaaagtgggaggggtatttgtatctttattggcatcattacaaaatctttttgaaagttaacatttagaagttgggttcctttcatatttcgatttattaaggattgagattcctttttggtgggcttctcttccacttactgtattattcttttcccacttatttatatatattatattgaaaagtaatagttcctttttcttttaaaagaataataagttttaggaggtggcaaatgacatgacaagactatcaattacaagtcttaagacatgttatagagttcagctcagtatggtgtcaattttggaaactctgttcataagattatattataatttataagaagaaatggtttatcctgaattaaatccatgcttatataactttacttaggtagatggattcatgattttgataaacatactgatcaggttatgttgttaactcctaagccaataatactaatgttgtgatcatatatgtaattgaaaaacacaataagttaccgtctaattactagagtagtaattatatggttagacaaacatagtaaactgaataataatctcaaattaaacaaaacacaccctaattactatatctggttcatcatgcaggtttttcagccttggatacagaggaggcgattggaatacgctaagcataagcatgttatatcaggaatcttgaaacatttaaagacaaataagaggctccttagtgatgatggtgaacctgatgtagaggttatatcaaagtgagtttgattttgaaaatggattcacttagttttgtgtttgtattactctttactatacactctttgcaactgcttaactttttacatggattataacatgtcagattgtttgacaaaattgatgcggacaacgacggacatctttctactgctgaaataagagcgttgattattggaattaatttcaatgagattgacttagacagtgatgatgccgcgaacaaagtgatgtctgattttgatacatccaatgatagaagggttgataaggaagaatttgttattggtatttctaaatggcttactgaagcgaagcgttcgcggagacaggggagtgtctcttccgaccctgttgatcatttccatgaggtaagctttttgcccattaattccgttcattaaaattcatcgtctattctcagagcatgctaagctaatccatgtgttatgtttgcttctcttctaatgagtttggttatttatgtacagaaaacaaagaaagaccttttgggaggccatgatcaaagtgatgagctcgtagaaggtattgtgaatgctaaaactataatagtgaaagcagtgttgtatttgttgcttggaaccgcgattgcagcagcttttgcagatcccttggtggacgccgtcgataacttctcaagtgctacaagcattcccaagtttttcatctcattcattgcacttcctttggctaccaactctagtgaggctgtttccgcaataatattcgctacaaggaagaagaaaagaacttcctccttgaccttttccgcggtttgtctttgtttccctatttcttaattctctctgcatcatcacataatagaatagtcaaaccaccataatggtgggaaaatcatttcattatattagcattcttatacttcaaaatgcaaccaaacaaaagaataaaataaccgaaatacaaattgacccttttagaatttgcgttcacttacctacattgctcttatgcaaccaatactaatgtcccaatcaattgtgctaaacaaaaccttaaactgtttttctttcttcttttgctgaatgcagctatacggggcggtgacaatgaacaatgtactttgtctatcggttttcttggcccttgtctacattagaggactaacatgggacttctcatctgaagttcttgtcattttcatagtttgcaccatcatgggtctgtttggcagccttcgaaccacattccctctgtggacggcttcaatcgcgttcctgctctatccattctcgctcgctctggtttatgttctcgattacttcttcggctggtcatgactcgactctcttaactcattatgtataagagttgtgttagcatacaaagagggtaactcttcatttttctgtattcagatcagaacaccctcttttcctatttggagtattattagtgtttggagactcaaaattatgtatctgaatcttactgcatcatatgattggagcagttactgcctcatcaaattttctaatatatttttatttatagtagtagtcagggccgaacaaagtgggtcacaggaaaaaaaaattatttttggactcttatattagaaaaaatatggtatttttttaaagtcggtaaaaaaatatatacaattttaaagggaaaaaaaaaatttgggcccctaggctaagtgggtcctaagtacaggcttagtccgcctatacccaaggtcggacttggtagtaataaatggtgaggtgtctttaattagattaatgtttgaaggtaccagtggcgctagtgtttagcgctcttctaggtgttatattgatattggtacaattaagtattgagtccaatataaatcaattaaataacttttaagaaatatcgctaatattgtacgacttagaaataaaaagttttgtaaagattctaatggaaaaaaaaaataggtttctccttcttaaatctatagctagtgaaggttatttttattctctggtcaggcctgtcagctttccttgggcttaagtgctgcttagtcagggttatgttttgttgttgccatttaatttttgttatcgtgattagttttgtctttgtgacataattttgagtgttttagttttgtctgtgtgacatggttttgttgttggttcttttttgttcttcaatgatttgccattaaatctttgttagtggttgggaataacaaattttttttgactaaaaggtttgttagtagtacagttacgtagcttacacaatagttgagtactcaagctacgaggttgaacctattgcaatagtttttactgttgtgtcttttggacggtggatgaaacaaaatataggtattaagattaactgtgatgatgtaatcttttttatttgattttattttatttttttatcaaaccatcttggaattagacgactgattatttagtttatttttctaattttaatcctggtcatgtcttcgacgaaggaaatgttctgattagattacaagctattattttaactaattgatattaataaaattttatgatttatttaaaaaaataaatatcgttaacgaattgtaaagtgttacttttacgttgtgctagacaccggtaatatccaacaatgatgatttagaatttttaggctgttttctttactgtcaatttgatgatttagagctgaaattttacagatgttactatatatgatatcataaacaattgttctttctagtagtgtcaaagagaaaaaaatgttttttttttttgtaaactcaatgaacttttgattatgtgcctaaaatgttttcttgaaatgtatataatataatttttatatatataaatatgtatattatgagatgacaattgaaacaaatttaagaaattgaaatctagtgtggcttggccattggccaatatacatcgctctcactccccaatgcattttttaaaaccctttgtggtgaggtatgagttgtattttctcattccacctaatgtagttcaattttatagagcattcatcgaccactttttaaaagtgatgtattgcgattagctagtgacattttataaaaattattatattaaattatattgaatttgaaacttaattatactaataacgatattagagggtactaagtaccacaagtgtcttttaatattcttcaattttaaattttataatagcattgctattaggcactaataatactcaacactcccataaatatatcaattttcgtgactctatggtataacttctatgttacctcaaattgacaagatttaggtatttcatcttaattttttttcttgacgacagtgttcattaaaattataattaaattaacaccctcttataattttttgaaaaatttataatactttacaataacaaaaatagaatttaaacaacttgttgcacacatttttttttcttatacactcgtgaaaacaactgttttgaactttttattttcttgtgtaaactattcaaaatttctcaaaattttacacaaagttcattataactatactaaacaccatcataacttaaaaatcaaaattaaaggtagagaggctctcaataaatatttagttcggccccgcaacatacacagaatgtactcatcaaaatagcctcaaaccactccacccgcacagcgaacacctcactattaaaatatctcaattgtttatatatatatggttccattcgagttcacttttcaaatatgttaatgcacactcaatacctatttgtcccactctcaaaaaggcctataagaaaggtggatgagtttgtaacttattctgtttgtacaaccttacaagggtccattgcttttgtcatcatctttacttagcaaacacatcaaaacaaagtcactctcaaactcaatggtggtcactaacatcacagctcaaccccatgtgaaaacaaagactaatcaaaagcatattttcagatcctcacaatccaatccaatccaaacacacaccaaatgttgttgttgttgttgatgatgattctctcatatatcaatcatactccaactaatccataaccaaaacaaaaagacaccaaaatttcaaaacctaaaaaaaaaggtgtcatatctatatgactgatatataatatcttacttgtaatctttggcaaaagagacaagataatacattttataacttcaaagtgaggtcaatattttcatcatcaccattagtactcttttgtttttcaactgctacttcatggtgattttcctttgttagtggtggtgggaacaagttgtgtaaaggcacaagttgttcggttgatgagccactaagaaacccatgttggaaaattggctcttctacacttcccttttaagaaaattaaagagtgttagaacaaagaacaagaacaagaatgagaaaatagactagtgaattgttttaatcactcacttgaattgggattgttccaaaattgtgtggattgatgtagtttgggaatggttgataaaatgagccaagactcaactttgaagctgaagatgttgttggataaccgagcgcgagaaaatcttctttcgaaactgtgttgttttccctgatgtttagctttggaactgaagttgggcatgaagaagaagaagggtattcatctctgaaaaatattacaaacacaaaatgaaaaaaaccatgatgaacaaacataacatgtgttgttgttatatattagcaacatatatcaatataaaggagcctatataacaatataatctaacctgaaatgtgagctgatatgttctggattgaagaaatttacttcatttccatatgatgatgatccatctcctatagttggagtaaaaaaagttggtttctttaagttgaaagagggaactgatggattctctgcaaaggggtattgcctctttttcgaaatcatctgaagaacatattaaccagatcaactactactaagaacataatgagtatccaaatccatgttgaaataatgaaaaaaccagtttgttttcgccttttcggtatagaatcaagttgaaagagaatgaacaagcaaacctcttctttctcctgctgaacatgttgtgtatagttgctattgtagctttggtttgaagggggctctatatgataatacaactgagaaggcacaaaagttgatgatggggcaatcacctacaaattcaacaaattaaaaccaaagaaaactcaccaataaaaactactactaacacaatgagtgttttaaatctttaacagggcaaaaccttgtctttctcttgccaaacatgtaatgatgaagaagaatagttggtataatgtggatccatttgaaagttcacttctggtgccacccaagttgatcttggcatattcacctaaaaacatgttcaacaaaatcaaaattcctataaataaatcaatattaaagaaaacccatcacttaaagtctacctaagtacatgagtaagaacctagattcaaattcaatgtacaaaagcaaaaatattcacattcacttaaaacatgttcaacaaatcaaaattccaatatcaaagaaaacccatcacttaactttagctaagtacatgagtaagaatctagaatcaaatcaaaagtacaaaagcaaaactaattcattattcacttaaaacatgctcaacaaatcaaatttccaatatcaaagaaaacccattacttaacactagctaagtacatgagtaagaacctagattcaatccaatgtacaaaagcaaaactaattcacattcacttaaaacatgttcaacacatcaaaattccaatatcaaagaaaacccatcactttaacactagcaaagtacatgaatgtgtgtgtgaaaacccaagattcaaatccaatgtacaaaagcaaaaataacttatatattatataccattgaatagtaagggggctgatattggggtggtaatggaactggtggttgtggtggtggtggtggtggtggtggtctttgagccaaatcagaaagagcccaaatggggttgttataagtatgagtattctcttccttatgaacactaaacaactcagaagaacaatctctttgttgagccaattgatcagaagaagaaacaggttgaccaccattcttgatattcttattcttattctgttcttctgatatgattttctcaagctgtgccacaccaagtcctctttgtggggctttgtttttcttctttgatccttttccaacgctaccactaccactactactacacatttgatcttggtaatgatcctcttgagccattataaacaaatctaattccaactcattgaaaaaaaaaaaagaagctcaaattcaatggtgttagttatgtaaaaatcgaatctttaatccaaaaaaaattcaacagatttgttttgaaactaatctgaaaatgaaaaacaaagataaacccagattaaaattcggaaaatttaagaaaacccagttgtttgtttgtcctaaagatcaagagtaacacccccaaatgagaaaaaaaaaaaaggaaaaatcttaaagatacagtctttatcttgtttgtcgcccaaaacctcgctccactccttatttggatcctaagccgactctcatgaaagtgtgtgtgtgtacagtgagagacaacacagcacagaggttttctctctctaaatcaaatgaaagagagagagagccaataatgggttagagaaatgagtagagaggtttgtttgtttgatattggtttgtgtaaaattaatattaataataataataatattgtcttcttcattgtttatttcattcttgtgggccccacacaacacatgcataattgcatacaattcttcaccactactttataaagtagagttgtacatatttggaaagttatgtgtatttgaaattgagtgtaattaaatggaattataaagtttagggtatttgtttaattatataattaattataggttaaatggtgtataagtatttaaaattttaatttataaacaatttaaatttaatatttatttttaacgatatagtacctaatatttataaaattataattttttctaaattcgtcagtacagatttcgttttgaatttattaaaagaatatttagaagtaatttatactgcatgtttatgtctagactcaataatttagaatatggacttcatatgtgtcctgtttaagataataacagaggttgtactgacaaaattagagaaaaattacaattttataaactatgagtacttatgccgctaaaaataaatattgagtttataacacttacaaacttaaaactttaggtacttatgctactatttactcttaattatatagtaattatgtaattagaaataattaaaggatcttaagtaaattgttcattttttatgacttcttatgagaatggagtgtgtgattacataaaattatattttttagataattaatattaggctaattagtattttttttcccccaaactttgacatgtactaaatcttgtccccctgaaccttttaacaattactgaaacagtaaaattgaataaaattagacaaaagtccttaaatttagcaatctcaatagtttgggggaatttctaacagccaaaaaaatttagaagacacgatttaatacatgtcaaagttcggaaaaaaa

SEQ ID NO: 298192 - DNA, 3097 bp, Cannabis indica
aaagtaaaatattttctaaaatctataaaacaaaaattactttctatattgttttaaatattttttttcttaatttatattttagactctgatccgatcctagatattggaacacgcactctgaccctgacatcgactccggacccggacccagcccccgatcccgacttcagatccgaacgcaacataaataaaatcaacaaatgaaaatagaaatgaaatttataagacatatatttgatttatgtttttaaaattaaaatataaaaaatatttatagaacacatttttatttttcaaaatcaaaattttaaaataaaaattttatttttattttgtgattaaaaatttaaaaacaaaaatatatccaaaggtcccctaaataatttatagtgccttcaatatgagataaactgtttgaaattaaattgtattaagaattagtcctatattgttaatttgtgaaaataaattgtgatatataagataaattggctactcctcccattatcaattgatttagagatgaaatctcattcatcttatccctaaattctaacaaattagagcataataaattatttaagaattattaaactttgtagatgaactactatcacaacaatgaatatcattattataaaaaatttaagtgtcttaattaaatcgtaccctaaccataaaattattttatatgtgcccattatacaactcgctccctataatctatattttatacatgtcacaaaaatttgactaaaccttaaaaatatatttaagaagaaaatgcttttgctttttgaaaacgtgtattgatattctacaatatttaacttgtgccgttgtacgtataaattagtggacaaaaaaaatacttaaagttctattaagttattaatctataattttctttcagaaaaaaaaaaaatctataatcttctttggtggtcactaaaccttgatctacattctctaaggtattaatttaatttaggaaaaaactatggcaaacataatgagaaccaacaaacttggggaattttccagactttttttttctcctttggaataatatgatgagaatgtctactttaaaatttacaacctgtaagaaaagtgagaataataatcaaaacttttttagaaaaataaacgttacaacataaattatatttatatatatttatattttcattaagggtaaaaaaaagaaaagaaaagaaaagaattgttttatgattttgagaaaaaagtggttgcaattatggtggtaaaggtgtgatcaggtggtgttagcttttgattaaacgacagaggcgctatataagagcgccgttaatggagattagattttgatgtaaagttataatataaaattattttggtgccaaaatgtagtggtagtgttgtgttgtagtgtagccccttatccattcattgatctaatctatacaactactacccttgctacacttttaccaaaggtaaaaactaaacctattgctagtgttgtaatttcgggaaaattatgtgatacacctcctaaaataaagttaaattggggatatgtggtgcacatctcttccttaccttttcggtagttttgacaattctgtagatcagccttaattggatcattggtatgtactttacgagggttctcatcctattaagaatgacactgccacacaacaagttagccttccaaaaaatcaagtataatctctgataagtgagattaaaccctttctacatattttagtttagagtattcctattattagacactgttatagtgcgaaatttttgcctaaaaactcgagatcagtctcctataaaattgacacgtagatccaatccttaagagatggatgagctgttaattaatggctctccgagagttgaactcgcttgaaccaaactcgcgagataatgcggccttgacaggatctagtcgtatactatgtctcacatataataagataagcaggactaaaaggaatttatacaagtcgcgcatatgtcaaaacatatgcaatgactaagtagctttctcctacgactaggtaaaaattgcttctttacataaaaattagtctgaatgacgaaaagtattcgatgactcgatagggactcgcctgtcccatgttgtcgatacatacaatgtccgttaaagcgactcaaatagaacgtagacattcgagtaggctcattagtccttttaagaatatagaacgtatttaaagcctgcaagtttgtgcgagaatataaacatgcaactcgcactttataaattgcataagttgtttacttattagaacatattaaattgtccttcatttattcttttacgtttactttattctaatttaatattgttatcaatggtaaaaaatagttctataatcggttattagttataaaaggacactaactttttatataaaggagtgattcaagatgaaaaaactaagcaaaaatcatttgtaacagtgaactaagcagaccgtaatatgactaaaccactatattctcttgtgttcattttatttttctatttgctctattatctaggcagtgtcctttgaatactcgttgttctaagtagagtattcgttgttgttttttttttcatcatttattgtttgcttacattttgatgttgtcaaaattcttccgacaacaggtaccttgtgcttagcactagatcaatatcgtactttataattgattaataattttgtatattattattatttattgaagcaaaatgtgctcaactcaatattaaaatgtgctaataatgttatattaccttgctaattgatgatttctatcaaatcattatgcataaatgataattgagagtatttacttattttttttattttaaatgttagtaactaaagaatattatttttcggtaaaattactaaccactagccaaacagaaaataaaaattcatatacaattaacatctcacttcaaatctaccttataattaaatcagatcaatgaaattttcaagcaactaattaacttaagtaattattcatatttttactattttttttttcaaaatttatagagaaaaaa

SEQ ID NO: 298193 - DNA, 7538 bp, Cannabis indica
atctagcggggcggggcagatccttacatgatctggatcaagtcggatcatagccgaattagatccgacccgacccatttacactcctaaaaattcacattaattaaaaatattttttgtcaactaatttgccaaaaataacttaacaacaatcataattttctcaagttccatatgggagagacacgagacaagatgaagcatagacaagtaacaagaatcatgagtagaaaccgacaccccaaaccatcgtcccacctcctcacgcacctctttaagggtaatacagctccacgaaacatggaaagtcaactcttcctctctattagataaagcacaagaagtatcaatgctcatgcagggccggccctaggcataggcgggctaggcccgtgcctagggcccacactttccgggggcccaaaataaaaaataaaaaaaattattaggcttttatttaagtaaaatttaagtgtaatataaacaacaaatatttatagcttagttggttgaggtggaggacataatgtccaaggtcatgggttcaaatcccatgacactctttttttgatatatttttgagggccccaaaatttaattcgttttgggcccataaattttcagggccagccctgtgctcatgtcatgacttttcaagtttttaaaagccaagatcctatccaacaaagatttttaaagaaaatccttcactttttgagaaacttttctactccataatttttttttccaaggagaagggtcttttgaagaattagcctacccaacatcgaggtggcgagccgcaaaccaatgacaacctttaacactgtagtaaccagacttctaatgctatcaaatgcatttatcattaatccccaccccccaaaaaaaagaagaaatagacaagatttctttagtttcttcgcgtatgaagtgattgcaaatcaaatgaacattccactcatcatcaaggcctttaagagaagaaactctagcatcgggcagtagtgtgcatgcagggagacatcgaacggtgaccaccaccttacataatcgatttatcaaagtaaataggcatgtatgctccattgccaatgagccatctagtacttgatcaattagttcctttcccaacataatactcttccaaataaaagccttccactagagtgtcaaacgagctagagggatggtaaatgcctttatgccaacaaagccactttcaagtacaccaatgcatccttcttttctcatcacaatgttgacactaagaattagccaactctatatcatccgataagcaataacaataataaatgaaagaaataaataagagagacatcagatagttcgctagaactacatttactttgagattttatttctcatgagattgcaagttgcatacaagaaaataagctaagaaagagctctcacttacatgtcttgagagagaaacaagtaaattctacataaaaaaagctgagaagctctctcatataatagagagatttttgaatttagaaaatgagcttagaggagcctcctatttataggaacattgaatggaggtccaataaaataataaaaaatatagaatataatgggaatattctattttgagtgatttttgtaaaatttcattttacctcaattataaattatttaaaggtgtacttctataatgcacccgttttaaggaaggcatcatacgcaattacagaaaaataattgaacgaaaaagtttctgaacgtcaaaacaaataaaataaagagtctaccaaaatgaccggaccgtttaggcgagtctagtactgaaatttctcatgttatttatatatatagaataattctctattccaatttccaaccactaaaagatatacaatgaacgccgtacgcggcaaaactatgcatctattgtgggagtgagaactctcctataacactatgaagccatgctcatcaaatttcgtagtaaaagctagcttcaacaaaaagaaataatgatgatggtagaacaacggatgttaaacagtaataaactagttaaaatatgacattccaagaactccattcattaacatcaagatctaaacactttagtatcttacaaaattccctggggcagtgaaattaaagagcatgtcagttcttaaagactttcgaagaagctaaactagaccttcaaatacaaagattcaagagaaacttgagctaggaggttcggcaccgccatatcctccacccccgcgaccaaagccagctcttccaccagcaccctgaaatatcacaaccaaatttccataaaaatcaaacaaattacattgcccactacaagccaaacgctgagtttgtagagtatcaaatcccattccaagtggaaggtaaagataatgtgaaatattatttcaggggttaattctttataggatttatggtaaattctttcttaatagtatacaaaaatgaattctcagttctttcttacagtatactagaatttttcagtgaatgtggtagaaattagctatccaatcatgaaaagagcttgacagagatactgaatatttaccctgaaagaaggctggaagtctgctggggcacctcccttttcaccagcaaaatcaccagtaggcccacgaggagctccacggtatccatcacgatcgccaaaccttgaacctccctcaaaacgagatgggccactgacacattattataggcaaacatttcgttagtccctttaaccatggagtaatggctacatggaaaagcaacattatcaaagataatatagatgcaattaccgtggacgatcaccaggtgggccgcccaagggacgaccgaggggctttgcagatttctttaaggtagcgggcacaatttctgatggaagatttaggtaagtcctcaagtgttcaattccatcattggtaaggtaccaataatagtgctgccatgcaaaagtttctcgcacatactccttcgatttgaagctttgcatcaacttaataacttgtaagtttggaacatctatctcggggtgcttgggaaggttataatctttcttcgcatagcatacaccctctttagattaaaacaagaaaatccaccataagattcttagtaaaacatactccaccataagattcttagtaaaacatactcctcttgattgttaatgttccacaaaaaaaaagcaacacaattcaaagaacaagcatttgtttgatgatcatttcatcacgggaaaaaatcagcaatagaataaacaatggggcaattgagaagtacccccataaaacccactttaccactagtctacttcatcatttaggtaggctcaaattagagtgataaattatcaagcaaaaatagcaaaataaaatataatcatggcaaattggtggaaaataagaattacagttacacagtgattctagttcttaaccaattcttccatcagttaatataatgcagcacagtaaaaggaaacgaaaaagacaaaattgccggaaatatagaatggaaccttggaagaggtacttgcagatctccttacgattcttctcagtaataatctgaaaattgttgaacagaaaaatagataagtaaagacataaagcagagtatcatatgatcatatcgataggtgggtagagagaaaaaggagaatcctaccatggctgttaaatgagaattatgcaatgcaatgcaatgcaatgctttggaaaccctagactgggcaatactacactctcgtataaatatgaactcaggcgacctcttaaacccttgttattttagcatattcggttcgggttcgtttgtgggccatcacaacattggtcgggttgccaggcccaataaccataattcataatgggctcacgtggaaaatggccccaaatagatacattagttagataaatgtcttttttcaaaaacaatcaaaattgccaaaaataataaattacataatgaaaattataaaactacatttatttaaattttcttaaaaaaattatataatgataagctatataaatttgttgcatattactttattgtaactataataaataaatatactatatcatttgttgatctcgcttctagctaatgacattgagttttaattacaatgattaaattatataaacaataaaaagcaaagaacaataagtaaagaaaatatcaagatttataaaggttcggctccatgatagtagtaatagcctactctcctctcaaatgtattaatttaggagacaaagaatgaaatattccttcttgaaagctcttacagaagatttatgagtaattcacttttagatcataatttctctcttgagtgttctctctgattaatttcgcatctctgaatagtgagatgagaccactatttataggagctaattacataggaatggtttcccttaatccatgaaaaattaaataagaaattaacatgtttccataattacaataaagaaattggacagatctaggctaatttcctttattctttgaatgtacgaattaatcccacaaaaatagggattgcttcgtgacatgcaagtttggagataatgtcgatcactgctggaattgtcaacccacatttgttggtcggtgcatgcgagttgatcacacgattgagctggtcggatgtccaccaatgactttacttggacatcctgctatgtatgtctgacttggatcttcatatcaatctttacgggctgctaggagtaaaatcatctgtcaaggttgaggaatgtaagacatgtgccatccagtcaggtatcacgtcatattgtaaaaattagaataatatttacctcacaagtctgtgtaggaccttcttagtcgcacattgactttactcggctaggaaactgtctagatgggtgacacatgtcctggttgttgaagttgatctaacgtgaattgattgagagtctcttcatgttttgtgcattaaatacctcttgaaagttgtacctagagtcacgcactgacaattgaggggtacaacatgtgtgaaatctgtccttcacagtgagtactttaatgtacagttttggggggacaacccaaattttaaattttggctaaattaatttcctctttcaggtgcctataaaaggggcttaatccttcatgggaacttttttagccattttcattctcagcgaatcatagcaaaaattttctttttacttttctcttaaatcttcaaaaaagttgttggagaatccattgacgtttccttccgagtgcatcaaaaaaactctgaacattgagtaagttacttttccttttattttatacaattgtcacttaatgtacacattattttttagatttcttgctgcaaatttatctgttcttgaactgtttttgactgatcatagaatagatgaaattagtgcttgtaactttagctaacactcgattataactgctaagtctctaattgtgtattaattttgacctgaaatcgtttatttccacccattcatgggattctaaagatttccaggtacctctcaaagttttgaacttttgggtttggaaattctatttttgaatgaaatcccttccttttgtctttaatctggcctggtcagcatataaaacctatttttcatcttccgatccatccaactctcactttcttatctaccatgttttgtagatgaaccctggtgattttttgaggaggcaaacaccatatcgaccaggacttactccaactcttgtacgaagatcattctcgactccgtgcaagttcatcttcatccagtgatagtctttcaaattttatctttcaagactgggaagtaagtagtaagacacactgtctctaaagcccgaggtgcaacatctccaataccctgaccagatacgtggagaagggtacgggcaattcatctgtgagttaaagaaagggtggaggcgttatcttcctgcttcttggacgtacaagatccaacctagggttattgatactctgcccgaagcccgcccaactctgtctactaagggatctgttgttgttgttgagttcgttgtaactgttgctaggcatactactaaatttaaatctctgcccaagcataaaatgatggtgctaacaaagcagacaatgaggaaagcttcagaaactgatccacacaaatctaattaagtagtactcaatatcaattccctatggatcgacctcacctgtgtaagtatttaaccgcaatagattatgtacacttgtgtagactataattttaagcaacaccaaccactcctggagctatttactaaacacctatactcaaacaagttaaacaataataatcttgtttagtaataactcatttatcacaattagcaatttagcttaacccttgctccttccggtttggagaactgcttgactgaggctctaaaaatcttgcgactggtaagcctttttgtgaagagagagagcaactctaccacggacaagttcttaagaaataacctcttcatatttctttccaatgacgagtaggaataggaaaataaaaaattctccctttccataatgtttaaacgttttactgctttctaggcttgtcctgttaaattatgtcatataatataatatttaaattaaatatttatgttacaaataactaagtgttgtaaattcttgagaaatgatgatcataaattgtgtaactctcatctccatattattactcttaaattagtaaaatatgttactaattgtttatgaatgtaaatgaataatagctattgaaaacttgatttattcatttataaggtgtataaatggtttaaaattaaatgagagtggtttggaacactttgaagaaaaattgaccaaatctaaagaaaaaaaatatggtaaaaattcctccaaatcacccaattaatactataaatatccaatttatgattggtcacgtccagagactttatggtaattattcatgttcatgtgagggtcaaaattctataaatagaagtcatattgttcacttgttatacatgtggttgaaatcacttatgtcgtggttagaacattgtaagaatatgttcaacattagacactgagcatatgaggctaaattaatcctaaagagcatttctaaaatttttataagtgtctatgaaagggagaaaatgacttttagacaaagatcattgaccttgtgtaagtctttgagagatatttttctcttctttatattcatatagtaagtattatgcattattattgcaaagagttgtaatcttttcttcttcttctcatatattccctcaaagtgtaatgaaaaaatttctattatgtcatgacaaaaatatgtacatttaaatgatgatatgaaatattttgtacgtgaaaaaacaacttcaacaaagaaagtaatttagtccatgtttgacatcataattaaaaaactgttttttgtttttaaaaacaaaaaattgttttcaaaaaataattaggcttgtttggccttgtt

SEQ ID NO: 298194 - DNA, 2148 bp, Cannabis indica
ggaaaagcaaagctggaggaacagtgaggcagaactcggcaatgattgtacatatcgcggcagtgcaacctggagggttttggtcttttactatggagtctgtattttggggttgcattttagcgtagttagtttttttaaaaaaaatatatatatatacatattagtaaaatacttttaacttgtattttgatactcgggatcccgacccatatgattattaagctataaattattaaaattaactttcgaagtttattaaaatcaaaaatacgggcgttacactaacgttttcagctgatgttttatccatcatgttgagaccgagttagtctagttgaataaaaaatctcagttgaaaaaaaaaataaaaataaaataaataagcttacacacataaatattacagacataattgagagagaaaaagagattaatatactatttatacatataaaccttaaattaattatgattaattaactaacttactaattatatagataaagaacaattaatctatgacaatatataattggtttaactaaattaataaatgaccaacatcactaatatttattgggtatctatatatgatatgttataataagcttgatatattttagttgcagtgattaagttgtaagcctcagttggatgaaatgaatcccaaaacacataatctcttctattctcacatggaatctccaaaggcttacactgtccattctcatctccaccacaacaaccaacattcaaaaccttaaaccctaataagaaaaaaaataatttttatttattttcgatttattaatgaaattataaaattaaaagtattactggcgctaaacaaggaataattcttaccaagagcgatgagatcttcagacaatcctatctcataagaattgacgtaaataaattttgcatcggtaaaatcactgttaagttcatctacgagcgttgtaagtttattattgaataattgaacagcgtcattcatgttaacttatacatgaagaagaatcgttgtttgtcccatatatttgaattgcattcggagtgcatccgatttgtcccaatccaactaaagtgatcattcttgcccccaaattgtacaattcctatcaaattaataaataatttccaaaataaacaattaatttgagcttttcaagtataataatgtaattattggaagtattaattaagaattaattaccaagatatgaagtcgatatttgtggatgagaataagagcaaattgttgaggtgtataaagatttccagaagaataaatccaaggcatgaagtagttgttaatgtaatcattatttccaatttcaacccaatataagcacttgtttaatagctcttgtgctaattttttgctccctaatttgtcacttattcttgataccataatttggtgatgctttatttgtttcttcaagcaaatattttcaccctataaaacacaataactctttgtaaataatagaaaggacaagagtatattgtagggacaccaattttgtccttattgctaaagacatcaatatatttttgataatttaaaaaattatatatatggatatattttttttttcaaacaatctacattataattatagtattatagtaggcatcttatttattttctaaaaatttctaaataatttacgatatcaaaaatagagttcaaaaattaaattgcacgcgtatttgtttctttttacatgtgtgcatctgaatgtttgaatctttctatttttttcacaaacacgtagaatatatttactacagaacatgtatacaatcacataagaaaattttagttataatccctctagacgtccctcctagtaagaacaaaagtaatatccctccagtaaacaaattcataatataaagttaaatatcgcactagctactacttaaaatgacacagattaatgtgacattttttattggtcgatcacgatagcctgcaaaaactgacaatttgacagtttttgcagcctactcataaccaataaaaaaatcacacttgctcgttcgagtaagagtactcacaaataattaaaaatatatataattatttatatatctttatatattaaaagtgcctatctaacggcatttctt

SEQ ID NO: 298195 - DNA, 3226 bp, Cannabis indica
ggcttggcgcacccctccaacttagttgaaactctttacctctttttggtgtccatgagctgagaagctcatttgtacaaaattggtatgctcaaacctcataacaaacaaaacaactataaaattcttcttgtttgagctataattttttattattctttctttctttcatttttcagtattcatcaagcttcaagaaatttttggctttcaaaatgatgttaaatatatcatcaagttttgtttttataactcagactaacatctactcaactagcaaatctttggtaagaagacaattaatttcataatggtatgcaatgctagaagaaagcaagcataccttgtgttgttgtctttggggttttttgccaacagtctcccaaccatcattattgctttcctcatcatcatcatcctaaatgaaaacaattgagagaataaagaaaatgaaagatatttcatgatgttttccaccaaactaataacacattgcactattctggatgatcaaacaaacctttctactccgaccgctttcctgatgtctttcttcaccagcttcatactgcccatatgaggcctgaatttcagaagatcaacaatcaattaatgtctaatgattgatacaatgcagaagtcaagccatcattccagtaaaccattcataaagacaattaaattctgaggtgtctctaactctaataattgttttctcaaaaattaaaaaacataattgcaaaaatatagtttaaattcttgttgatttccatattttaagtttcttctccaaatttttgttttcaagccaaaaaaatagatccattttagttccttgttctaaattatctacacatctaagaaaaagaaaaatttgaattctatgaaaatggaactaaccttctgggttctccttggaggtcttgaatccacattaggccaatcttcttgcctatgatcactcataccctgcaaaaaccacattttcaattcaaatttcagattcaaaaaaattaaaatctgatccaatccaatccaatccaatacaatgaattcaaacctcatctggattcgactgtttacgaccatagccatgagaacgacgatcacagcctcgttcatctccatcctgatcgccagacacaacctgaaataaccagaaaaaaaaaacaatgaggacaagaaaaacccagaaattacaaaacgccaagaggaaaagagtttggtgaacctcagcccaactggatctggaccgttcatctctggagtcatcatcgtctccgtggccgagaactacgtccgccaagcccctgatcagaccgtccatttttgtctactgtgttctggttgtagagagagaaagaagagagagagagagagagtgaagatgtatgaattattattaaagtgaagaaaggtagttaaataaggaagggtggaagctatggcgggtaatggcaatttggtaattatcataaagagtgccgacaaatttggacgacacatgtgtggacacctgtgacaacaacgtagtaagagttgactatgtgtccgacgtggcaatcactatctaatcacacacactctttctcttcttttttttctaaagggagcaaatctcaattgttaatactaaatttattattattattattagtaataaaaaaatctataattaattttctttccattctttctcattgtgtgttggaaaattttatttaacaagggaaagtaatcaattgattttcaagctaggattttcctaatttttgtttaaaatatattttttcagaagctatttttaaaagacaaattgaatttttttttttttttttgatataagcgtttatatattacaacatattttacctgggactcgaacccaggacctccaacactcacacacccacctatggtcacttgagctagccccaaatggtttaaaaaaaaaaaaaaatggcatggattattgcctttgtacagttttatcttttcaattttttgagttacaaaaatttctcacaaactatagcaaacattgaaaatgtgtccctactgcataataaggcttgtagtgcagatacagagttttatttttatttttattgttttggaggatgtaaggagatgtagagctgattttgtaagagtcgaaaaggaaaacttatcagagttagttccatattgttaatgtttgaaaataaaattccatatttaagatgaatagagtactcctctcactatcaattaattttgagatagaatttcatttacctttttccaaattcatattaatataatttagtaggatgtactaattattatctctatcattggttacagcaatctccttcagtactgtccatagctacaactggaatgtacacatttctatcttcttcagggtaactccaccatgaaaatcttacaccttagaatggaaccttttaacttggagcgtgatatggagtcgtgttcgttggtttggatttggattgcagttaacttgggtggcaatcttctcagtcttcttctcattgcctgtggccttctcaatcaattaccataagcacacaactatagagacagcaatacctcaaagcatagtatcatcacatgcagtagttttagcattttcttttttatgttcttcacttaagatgtaaaatttattagccactatcatcattatataggtaattaatttatagataaacaaatcactctgataaaccatggagtttataaaattaatattaaaattgccactttcacttgaaatatgtagatatgactcccacatggatttcaagctacaatagcaactcattaatgacttataaaactcgaagcctttgactagacaaatcatacctttctcggccttttggctaagatcaagtgtagtatctgttcttatcagtttaatatctgatatgtgagtcaatggctcacacgatattaaattaattttttaaggggaagagtccatcacattagcttgctattgggactcttaagtgttgcctatgtattgcactactgcatgggcttggcgcacacctccaactttagtttaaactcttaccttaggcctttcaagttggtgaaacattaaattaaatgtggaattggtatgtttgtttttctttggtacaccagaaaagtgattatattttttggtgttcttgtatctctttttaaatattttgtcttaattcca

SEQ ID NO: 298196 - DNA, 2036 bp, Cannabis indica
tatgaattatatgtgtgatatgaagtgtcaaaagtacccttggtagttatttatgtggtttataggtcttaggggcaaaatagtcttttgaccaattttacaaaggattgaactaagccatttgttggttgagttagaaaatagaacaccaatttcttggtctgaactctctcaaccgaccccctcctctctttcatattccaaaattaatgattttgtatgagctttgaagaaaattagaagtctttttaagggtaaagttgattagtgttgcttgaggaacacttaaggtagcttttctcctttaatttctagtttaatttgactaaaaaggactaaaatttgaagatgttatgcatgtgtttaatttgaagaagtgatgataattcttgtttgatgttctttgataaaatcatgttggaattaggagtgtgtgtgtaatttgtttagatgaacatgaacttaaattttgggttttatttttaggttctttccttgctaattttatattatagtttttggtatattaggtaaagaatttcttaatggtctttgttgagttaagtatgaatttcttttggtttttcttttagaaatgatggcataagttgtgtgatttgtactccattagggtgtatatgctagcttgtgtttgtggaagtgaatatttacctagaaagccttattttgatgctatgaattgatctaattgagttatatgaattttttgtgttttagtatatgctgaaatgtggtaaaatggcattttttagatctttaagcacagtcgtcgcgaacaaattatggttgtcgtgactaggctcgaacccagaacagggatagcccctacccaacgtctagttgcggtgagccttaatatggttgcgacattaattggtcgcaactagatggcagcgacagttccattttgctattttgttttgggcataatttttgactccgaactctattttggacgttttatatatatcattggaaagctcattttgagctctattattttgtccaatgttagagtcctaaatgtaaagatttatgaaatatgatttgagattaaccttattatgtgaaaattcaaagatttgtgactagaaaaacagacacttggtcaagattgcctatggattagaatttatcctcatgtgttggaaatcatgtaagacaatgaattatgcacatagagtatagtgtgttggcacaattatatacaattaattagatgaaagcatgaattaggattttaccctaagttatatataatgtgtaagttagggttattaccctaaatatgtattggcaaaaatatacgataatgtattaagtgaataaatgctaaaggttatgcgattaaggcatggcttgtgaataactgataaaggttatattatatggatatttagattcaaatttgtgctaggattaataccctaaagtttatatatgagcatgtactaaatgaactatgtggatttatgtcaagagttatgtgtataagacatagttgggttaggcttgataaacaccatgaagatgaatacatgtgaaagcataatgtatgaattatgcatatatgataagagttgtgcaatcaaggtataactaggttagacttgataactaaaactgagataaaccctatgaaggccttatatgtgagcgttgttaggattttatgccctaaataaaactcaattttattgtaatcttatttactttcaataaagatcagaaatcatatcttaaccttgtcatatactttgttcacatgttttacacatgattataggtttaatatataagtcctattaaatcctgaacatatagttattcacaattatagtgatgtcatcacagtggaaagtaattgtgattatatacatcgagttatttagtccaatgatttattagtgcattagatgtacactgacgtgataattaatgaggtagtttacttacacttgtataagtaaaatatcctttcaaagtcattaacaaagtaaactagtatcagatgt

SEQ ID NO: 298197 - DNA, 3347 bp, Cannabis indica
aagaaaaaaaaaaaaaaactgaatactaaaaatttgttaaagaaaaagaaagagttagttgttttttattttttataacataaaataatacatatttaattgtaaaaaaaaaaagatttaaaagaaagatgctgcatattatttaaataaaaaaaaataagaaatcaataaaatagtacaaaaaaaataaacaagtaaatgagctaatatattttaattattaaatgaaaaaataaaaaggatataattgttactatacctaaacatactttaaaagttacacatgtcactcattttttaaagagagtgtaaaagagaatgcaatatagagtgtccttagcattcctcatattatatatgacactctataatggtattaacattaaataaaaaagtattgttattagatatataaaagttattaatatgatactcatgctaaataatatcagtacttttttaacattttgatcgaaatcaaaatatataaattctgatatttaataataccaataataataataatatgataaataatgttttctcataaatctatcttttgtaaaacaaactaacaaactaacaaataaacaaaaaaataaaaatatgtataaagagggggtgacatttaactaccaaggaagatagatgtaacaaagagtcttaactagtgcacctaactgtatacacatgtcactatatatctacttacaaaatcaatatatatatatatgtatgacacacttaataaattcctttacaccttagattatattatatttatttatatatatgtaaagtcaaaatcattagacctataagatagactagaccgattatattcgatctactaacccaaaagcaaaaattattaatatttaacttttttttacatgttattaattaaaaatctctaagactacttacttgtcttctcagttgttaaaatgtccaatgtacctataattttttcaagtgtactatataaacaaattaatacacaaacaaaaatagtcaaattttctaagacaacacattaattaattaagatacttaaccctaaatgttaggtgttacattaagagtcccacctataattttgattgatattgaaaacagatttaatatgtatataactcaatatatatatatatatatttaatgcatataaaaaaaataaaaaagcgagattagctaagatggttataaagggtagtattagaatttaaaataaaataaatagaattctattttaaaattaattggtaatagaaagagtagtttatttatcttaaaattaaagtcttaaataaaggttaaagggaaaacaaaagttttaagtttgacccatctttttgaaccagtggcattttgggttccaattacaaaaagctcttttatggcttttcttttttggaccggcaggcggcgacactttaagttcacaacgaattacaagcggatctgatactatgttaaaatttaggataagatgaataagacttcatttcaaaactaattagcattagaaagagtagctccattttatgtgtagtaatttatttctacacattaataatatgtgactaactttaataagtattgagagatattgtggggggacgtcataagctctaattcatggtgtgtaactttaataaagttgaattttcttttaaaataaagtaatttgcgatataaatacttaaatttaactctcagttataaataaatacttaattaattttaatttttagcgataataatatttaaattatatttctaaatttatgtaagtacctagtaatcaagttattacccacgtatcattattttttattggcatatttaaattaatttattttttttaaaaaataataatttaataaccaatcaagtgaattataactttattattattatcgctaaaaattacttaaatatttatttgtaattaagaagtaaatttaactatttatgtaataaattatttttattttaataattaatttattttaaattaatatatatttaataaattatttaagagtaatttgtaacataaatacttaaatttaactcacaattacaaataaataagtttaattttgattcgtttgtaaatatatatgagcattaagtattaaataaattgccaaaggacaatcattaattagtgaatcattaaatttttattttacttttttttaaaaaattagtttaagtacgtatactcattaattaattaattaaaatgaaattatactcacatgaagcatatcattcaagaacaaatccggcaacatctttggccgccgatacacagcgagactaagcaaattcctcatctgtttagcggtggccggaagcataagctcctccgtcttctccactttacctctcttcaacaactcaacaccatcttctctcttcatattcaaaccagaactcgcaatcacaaccctaacaactctctctccccaccttttcgccacattatacgccacgattcctccataactcgtccccaaaatactgtacctctccactcccatcttctccattactccggccaccgccgccgcctggaattgctccgaccgatcgctcgatcgggtggtggattcgccgaagaagatcaaatcgggaatgtagagatcgaatttgggggccaagtattggacctggttctgccattgccacgtggatactgggccgaatccgtggattaaaaccagtgcgggcttttttactgttttgggctgggccgggtccggggcccataattggatctttgtttcgtcttctccgttgagattgacggtttgggaggttagacccgccgtgatgaagcggcggcggaggtattggccgtacaggtgagttgggctgaggaaggagggaagcattgtgagggtttttgggttagagagagaaagaggagagagagagaggagttgggtgtggttgtatctatatgtgtatatatatataggtgttgtatgtatatgtttgggtaggaaattggagaaggaaagaaacggtttttacagttttaaaattgagttgtgtgaaattacggttatagccttagtggtaggtgtattacttgaagggataaaggatatttttggttattttaatttatatatgaatttatttaggaaaattttatttacaccccaaaattttctaaaggcacccaattttaataatttttattttatataaaatttatatctttaattgtactaaatttttttaactttttttttttccaattcatattcttaaaaaatatacctatcaaacaaaataaattatattttaaatattatgagaaaaaa

SEQ ID NO: 298198 - DNA, 2582 bp, Cannabis indica
aaatattaaatctctttttaatattatctcattttaataataaatgaaacaaaaaaaatcactcatatacacagacaaggaacaaccactttcacgagtaaaaagttcttaccggtaacctaactaacaactatctgctaaattatgaagacataaacatgcaaactgatcttttataggtaaatattttttggcaatgtgtttttgtaaaagttaccctccaacactatttttttaataataattttgacttggtatttttcaaaataatacaaatatagtataattttactttttgttaaaataaaatataataataattctttaatcgttatatccttacatttttttttatatggtggtgttgtagattggttatttaaaaaaaaaaaccatttgataaaaattgaccactattattttgtactattcaaaaagtaacttgaggagaaacgttcaaaaataatattcatgttgatgtttatgtaagaatcttggaagtggtattagttagttaccttgtcagaagataggtagctgttccatatgtatatattaatattttcatttaagaaccagggccaacttgggggaagtaggttggtcaactacacagcatggatttgacattatgatatgatgtgctttaaaatatttttgtaacatgcatgcttgaggtggagtaagaattaccaatgtcgtttatttattcatcggttaaaaaccaagcaaagtccttggttaaaaaaaaattacaaattgcatacagaataaacagagtgacagtccaaatcaggggaaaaaaaattactcacaacttgatataatggtaaaaaaaagttaagacacaaaccgatctatgctcctttccttccttccttcctcccctgttcttggaatttgataactgatctatttctgccttttgtatatcttacccaagaaagacttcaacactgcttgcacagctttgctggggtgagattcaatagatgtgatcagcttctcgtagctcttgctctcgtagtctgcaaattcaccctgcaaagtagggggttatatactaatatatatatatatatatatatgcagatggtatataaatctattgttcttattaagttttatataagaaggtctcagagtttgatggtgcacctcaagatcaagctccttgtagagggcttttactttagctactttttccgggtctgccttgccatagttctcctggaacaaacatcaaaagtaagcaaactgatttttgataaggtaagtgacaatgtgattaagaaagagccagtctcacatttaatattttcttttgttcctcattgctgagctccaatgctttaacaaccaaccaagaacacttgaaatcttcaatgtctgttcctatctgataggagaaaggacctatattagggactccattaaacaaaaatgtaaatgtaatagacttatttcggttactggtggagaattatacaacattagcttgcttaccttaccaaggatcttaggatcaacaaagcaatccaaatagtcgtcctattagaaagagaaggcagataatagtcgatgaataaccagtacacaacataaacactcgtaaatcatagatgttttttcaagtacaagaaagttttgctaaaccagatgtttcataaatgctttaaatactcaattaaataaatttgagagtaactatccatgcttaacagaaaacttacctgtacttgaaagtagattcccatctgaacaagaatgttcttgacatcaacatggtcttctagattttcccctgacataagcaatgcacatgcaacctgtgtagatatgggaaatgcataagcaatgactctgattttcacaggcatttcaagaaggacccaaaaatcttgtaacaagattctagatgcaagtacatttggggtggcacaaggagtgcaaataaggggcgaaatggacagatattgaatgtttatggaaaaaaagtcatcggatgcttttacttgctggataaaataatactcactgaaaggtaaaatgaataataggcagttttgtactgaacaatgcggcggtgactgcaagtgatccaaacaaatgtaatattagcaaacacttgaaattacaagggacattgaacagagtattatggagtataatgcaaaacggcatatgtcaaacacatttcatcccatgtctctctatttatacaactctattttcctttataatcgagtaaagtgcgagagtaaagtgcaaaacaaatgtgttgctcgcacttttcctccaaacttacgtatttggctgcaatataatgccaacattttcatggattgctcatttttatgaaaaaccaaaaggatccttaatttagtcactatttaataagcagaaaacttctgcaattgttcactcacagtgacaatgagaatttcgatagatcattttccccttcactcgaaattaagtctagcatttgtcctgaagcggtttggaactccacctatacaagaggtatttattcgattaagcaaatgagagagagagagagaagaagggggaaggggggg

SEQ ID NO: 298199 - DNA, 2469 bp, Cannabis indica
ccgctgcaaccaatgtaaggttaactaaactttatatgtttttatttcattgttttagaaatcatattaggatgttaataaaacatacatggtaataaatctagatcctggtaaaatatttccaacactcatgcgatgtgaggacctccaatgattgtcaatatattgcaaggagttctcgaaccactcgcgttgtcattctcttccttatcatctgcttggggatgactctcctcatttttcttttattttccaaatttacctcggttgatcagttcctcgatctcatcctgcaaaaaccaacattccagagtagtatggccaatatccttgtgatacttcaagaatttcttcgggtctctccaatcgtgatttcccctgattaggggaggctttctgaagactccattcttttcttcgatcgcgtagatatggtctcataggaccgctaattctgtatagttcacgaaacgtggtcctccctttcttttaggagacgactctttcttcggaggggatttggccaactttggacttcgatgtctttggggactgcatctcctagttcttctccctctagaatttttccctctgggactgcaggatcgtgatcgcggtactggcaacttacgcttatcttttcctttctctagctcggccaaagaattttcaatccttttatgtggctctgccatagcgaagaactcgaccaacgattcgagccttcgagcttgtaactctttctagaagtcggttcttggcaggaaacatgttattaacatgcaaactaacaaagactcgggggccttctctacttttattacttcagcattaaaacgtttaaaataatcttgtagtgactcaccgacctcttgcttaatgtttgcccaagtagtatagggcggcctatacgtcatcatggcttggaaatgtgtgaggaaaaggtcgacaaaggtttcccacgtcgatatagatgcttcaggcaactggctgaacgagtcgtgagcattatcctccagggttgccacaagaatgcgacattttgcgagctggggtacctgatccacttccataatagtatttaacttctctagataatctatagggttagtagtacctttatatttcaaagactcggacaaccggaattccttaggcaaccgagcttgtcgcacttctacggtaaaaggagaggtcccatataatttgtatatgggctttctctgctgctcgattatttttagagcctgcaaaagaatgccctgatcgatacctccagcaagcacgacattgttccgagtcgtcgcaggtgcaattgctacaatggctatattggctgggatgaccacccttgtagtcgcaattggtgcgatcagcagattggtgagattatttatgccttgattgcctaaacgggggtcacgaggctcttcatcgtttcaaggcatttgagaacgtgccctaaaaactgcgttaaggtgatcacgaagatcacccctatgaacctggtatcttccttcttgcggtgtttccaccgaacctgacttggtgtacctgctcggggtgcgactttgtgaagataaagagccacacttagcgtcattctcctcatttcacagttggggtatactgcgaggattacatcgttctggatcttcttttggttgcacctcgcggttgaggtttcgcgcggactgatcccttgacattggctgattcaaattgaacccttcctgacctatccttcgttccctgcgagtgcggttagttcatcttctagagatagttacctgtggattatccgagcgggtagtgggtactcgaggaggacgtcgagtcctgatctgtctgtcgatttcggcctgcaaggcccgcatttgatcctgtatcgccgtgtattgatcagtggttagttgaacaatacctttggaaaccacggtaggcatgataggcagaaactgtcccaccgtagctactggtgtggacgtttccccaacgtgagcagcagtttttgggaacaaattgagcgtggttatgtttgtccgccctactccgccgttgatggtgtcgatgggaggtaccctgcttcttgggaatgtgacattcatcgtcccaatattgattgatccattgttgatatctccatttgtctaatttccagccgtagtgattttccttctaaatcagtaaagtattgcgttcccacagacgacgccaaatgttgttgaaggaatttttacaacaccaaaaataaataataacaataataaataaggaatatacgcgagtactcaacccagaatgacgagtattcaaatcataaacacaaaatactttagcaaaatctggaaataaaatgaacacaacggagtatagtggttcagtcagatcacggtctgcttaatacactgttgcatggatttctctcttatttatttcacggcggatcactccttaatatacaaagca

SEQ ID NO: 298200 - DNA, 2027 bp, Cannabis indica
cacgtaacaatcacttagtatatattaatgacaccatgtgaagttatcctcttaggtgacaaaacatgtacaactctcttaaatgtactacttttcctccccaactcaaactaacaacccactcctttataataaggatttcgttgattgatctcttacctaaaataataataaaaatgttgaatttaaataattcactatatatattcacgttgaaaataaggcatatttattattgtcaataatgatatataccactcttcattaatttgaattgataaatttttggttaattaataagtaaaactatttatcagctgctaaatcataaatcataataatacgactttaatttagaagttagttataataataatttcatatatatgctatttaaacaaatttggtttggattttttgcaatgatctagtagtcaacaaaaactagctcgtggaaaatgtttaattgttatttggagtgtagatagatacatgtatgctatataagtcaataagtaattaaacacgtgtgggggtttagtcaaggattcatttgtgcaataactaatagaacaagttttagacaaaaaaaaaataaaaaaaagaaagaaagaaaataatgaatagaacaacactctgactgttaaaaaaagaattaatgaaaatactatttaactttaaccatttctataccaaaatctgatttgtagggtcaataaatggagcaaatatgaaaacattggggtcctgtttgacttgtcaactcttcattttttttttaataaatcagcaaatatattattaccctaacaaatacaatatacaacttaatagcaatctcttaaattacaaaagacatcttaatctataaaactttacaagctgtcaaaccaatctttttcactattttttgataggggggttgccaataccactcagaatttattaactaaaataagcacttacaaggggcagaagcccgaacaggaaccaacaaaccctaaacataacaacgaaccaagcaacaagaaaaaaacagagcacaaataaaaaaaagcaacctaaccaaaaccgaaaacaaagaaccaagtccctacagtcatcaaccattcttgtgtctccactcaatgtagtcatccaaaattggagtacccagatccttaggattgatgatgccagtggtattcgtcgctttgggctaactttttcactattaattacatttttggacaaactacaagtaaatattctttttattgtgtctttcactctgtacaatattctatcaatattatccaatgaatcatgccagagtttgccattcatgttgcaccaaatatagtataccaaaacacaaaatagtagccgacaataccttctttttaaatttactcatctcggtctttccaaaccacctgataatccgatgcaaggaatttgtgcaaattccctaatccagccagtctttcacctgcttcaaacagttgataaaaaaaatgaaacactaaaaaaattagtgatgaactgtttcagttgccccattacataatagacaagtagcattatcagtaatgccaaacttcagcaatctatctttaattttaattctaccaagcataatatgacataagatgaagctatgcttaggaatattgtgtctgctccaaacaatattactccatgtgactttatctggattagaggcaagcatttgatatcctttggtaatttgaaacctgttggatacaaactggtttatatctaccaatctcttagctttttctttgatcatgactagtttcttccaataccaactagcttgagttggagctttatacgttccaccagtcctcttctttcacatagacattatgaatctatttcacccataaattgtcttcctttttggcaattgcccaaaatatatttgtgttggaatatattttatcaggacctagatttactaaacagtaatgtttttaacaatcttaaaatatgaaatttctaaacaaatgaaaacttaaaac

SEQ ID NO: 298201 - DNA, 1379 bp, Cannabis indica
gttgcatgaagcttttcttttctttgaatattttctgattctaatgttatattgtaatctttttggtattatgatctgcgtgatagtcttaggatatataatgtgtgatttcctaacgaaaaagatttaatttttactttcgttgtgattcttgaccctttaagtcacgaagaacacgaagaacgtgtttgagttcttaaaaaacacatgtttggatccaaagcacaacctggctagccataggggtcttattcaagacctggccggccatgggtctttatcatgggagctggctggccatagggggtaccctaaaagctggtcgaccaatgctgggaatagggtccctagcttgcccttgcctgggtcatggaacctggccggccctctctcagcttgggaaccctagtcatctaaggccaaggttctaagcaagcgaccaagttttagttctcttttgatctcggcaagggtcttgtgacgaccatataggcgtatacaactataatcccatacgtggcttccttgaaaactctgtatgagacataatggttaatttattatagtcaaatgtacaacttaagactctccatttgtctaagtatacttgagacggtacttcactaatacctaaccttgtacaatgtagtttatctggcaagtacccttaggtacgattggccaaaattttgtttgtaccttgtggttttgttaggttattcacctccccttgtctcttctatgcaagtgattttcgagtgctggtctggggaggtgacaactacgttgtcataagtctaattggtcttacatttgtgagctagcatccggtctgtcccctagcaactttccaagtgatccctaggctgacattggtacactatggccagaactaagcggtcgtaccataatgcaccatcatctaacctacacattgctaggttaccagcaatgggcagggttggtattgtggaggaggccacgcagccccttgatggtaaagatctagaggttggccaggtagaggtgcttgtgaccaaccaaggtgctaagagtctagacaatgagtctgaggtggaggaggctatgcctgctaggtggaggatgtacaagactttaactattttctctgacaaccttctaggctcatatgatgttaacaagcagccattgaacaagattagtcagcctttagtaattagggtagaccatgtcttggtacaagcttctaagcctcaagttcttgatgaaagggcacaagaagaccattgggtttctcattcatttgttatcaccaccgaggctcttgataggatacgagagagtgtactagtgaaaggcatccagtgtgaggtgtctattgggaatattttaccagg

SEQ ID NO: 298202 - DNA, 2961 bp, Cannabis indica
ttttgaaacataaaaatgactatttggaagcttttaaaaattaaaaaactcttgtagaaactgaaccaaactcaaaaattaaagtgttaagaagtgataatggccttgaatttataaatgataaatttaatgagctttgtttgtaaaaaggcatagaactgttatagagacttctcagcaaaatggcattgttgagagaatgaacaaaaccttgttaaacaaggttagatgcttgtttccagaagctggaatgagcaagatatactggggagaggctttgcacaatgcttgctatctcatgaatagaagtctaaatagaaagattgatgcaaagacccctgaagaattgtggaaagataaacctccttcactagctcatttgaaaaatctttggttgtgcatcatatgcacataaagttgaagataaactaggaaaatgattagtcaaatttattttcttaggatatcgaaagggtataaaatgatatagattgttatcaactgaggataacaaaatcattataagtcgagatgttattttcaatgagctagattttcctcttaaaagaattgagaagggcagttgttctgatgttgcaagaaatgaaacacaaatcaaaactggtgtacacattgaggtggaacctatacaacctcagatggaacaagaactatagcctgaagcagaaatggaatcataagatgaggtactagaagactactagctagcaagggatagaactagaagagaaattaaacctctagtcagatttgtgaagcagatatcattgcctatgccttagttgttgtcactgagtcaacagaagctgtaccaaaaagttatcatgaagctgttactgggaaggatgctctaaaatggaacaaggcaatgtctgaagacatggtatctttgagaaagaataagacttggatagtgattataaggcttgaagtgcagaaagtgataggttgcaaatgggtttacagagttaaaccagaaattctaggacaggaaccaacaatatacaaggctagactagtagccaaaggattcacacaagtagagggagttgattattcagagatttgttcacctgtggtaaagatgaaaacaatcaagaatgattcttgtagttgttgtacaaaatgattgggaaatagaacaaatggatgtcaaaacagtcttcttgaacggtcaacttgagaaaacaatatacatgtctcagcctgaaggattcaaggtggaatccaatagtggagaactagtatgtctgctaaagaagtctttatatgggttaaaggaatctccaaggcaatggtaaaaaaggttcaattctattgtgaccaaagtgggatacacaagatctaagtatgaggcatgtctccacttcaaagaatcagaaacacaagcaactttcttgctcatctatgttgatgacatgcttataatgggaaaggattcaagtcaaattttaaagttaaaagaggtacttcagggagaatttgatatgaaggttctaggaccaacaaggagaatacttggaattgatatttttagagatagggagaacaaaaagttaactttctctcaaagcacttatgttgagaaggtgataacaaaattaaaggaagttccctttgttaaagcattggaagtgtcatgtacacaatgataagcacaagacctgatatagcttatgcagtaagtgttttgagtaggtttatatccaatccaggagaagagcactggaaaggtttgaagtggttactaagattcctgaaaggaactataaactatggtttaaagttcaacaaagatagtttaaaggtgaaattagaaggatttgttaatgcggattatgcaagtaatagagatacaagaaagtcacaagttactgtttccaactgaatgggtgttgcatcagctggaaagttcagcttcaaccagtggtggctttatttacaactgaagctgagttcatggccaccgtagaagcatttaaggaagttatttggcttaaaggaattctaagtgaaattcaaatgaaaccaaggaaggtaattgtgttctctgacaaccaatttgcaattcatctttgcaaaaatccagtctatcatgaaaggtccaaacacattgatgtaagactgttttggattagagacaaggtagaagaaggagaagatgagttagaaaagatcccaagtgaagaaaaccttgctgatgtaagtacaaaagtgctttcagtcaacaaattccaacattgtttggatttgttaaatataatttctacctaagatagttggattacccttttatggtttagaacttgtttactctctttggattaaggtggaatttatagttttgataatccaaatagagaaataaagttagttaataaccaattctgttattagttataatcaattctaattgttttggtacaattagtttttttagttaagttttcacactcttaagcttgggtagttaggctgttattgtttttgttttcttttcatgtagcctgattatataaaagcattaaggttctcattttgcttatgataaaagctgtgagattagattgaaaggggtgagaggaaacagagtgtgagagagagagcctaagagaactgtccaagttgtgttcttggagtactcaagttaagagtgttgaaattctttttgtaatcctctgaagttgtgttcttagccaagattgtaatcataatcttcaaataaaatacaaagaatatcacctaagggggtagtaggaagtaggcatttgtttttggctaaacttggataaaaatcgtgttcttcattttagaattttgattcctttgtcttttgatttttattgattatctttccactttgatgttagttgaattcagtgtgttagtgttttaaccactttgaatagtaataacagaattaactgttattcttgacaa

SEQ ID NO: 298203 - DNA, 1529 bp, Cannabis indica
aatcatattactagagcggtcattacataattaattttaactgatttcttttttttttcttcttattgactatctaattcttgtgttttttttcttccatgttttgactttagcctaacgaaatttttcatattttaataaaataaaataaactaaagtaatggagaggaatgagtcgatagactacaaagcacattagtataaaaacgaagctaatcgtgaacgattttctaaatcaagctaataagcatggcaagtatgtgacgataagaatgtgaaaatggtttatgtatgtgattgaatttttgtataagattgagttactctaaggattgctaacatatagttgttgtatgaggttgagtttctctaagagttgctaagatagttatttttttatgagattaagttgctaacataatttttgtataagggtttctaattaacatagttattttatgaaattgagttgctaaatgtataatgattgctaatatgatttttgtatgagattgagttgttgtaagagttgctaagatagtttttgtataatgattgctaacatggttgttgtgatattgggttgttgtaagagttgctaacatggttcttgtatgagattgagttgctataaaagttactagcataatttttttatgagattgggttgctagcatagtttttgtaaggattttctataatatgattcttgtatgacatttagttgctataaaagttgctaacataatttttgtataacattaggttgctagaatgattgttgcaataattttctataacatggttgttgtatgagatttagttgtaatgaaagttacaaacatagtttttgtatgatattaggtggctgcatggttgatccatctctgtatgtcgttatacatgccacatcgtttccaagtttccttggccactaggcactcccaaagggcatgtatgatcatttcctcctttctcgctcctatacactgcccacaatatttatcaacttccattttcccgcaaaacagaacactattagttgggagccactcatggctcactttccacagaaactacttgactttaggggaactctcaaattccaaaggtgtttccaccatctctcagtgctttctgtgtcggaattctcgtcaaacactctatcattaagagcagtaatatacccactacgaatattatattcaccattcttcgcaaagtgccagattagcttatctttcgtctcaagagagccttgttggattctcaaaataagctctgcatcagctccacaaaagattgtcttaatgaattcaacatcccaatctccatttgctaatctgagatcaatgacctttgtgccaatggggatctccgggctgataatgggtttaaaactcaaaagtctaggcagccacttgtcctttgtgacatcaatgttttccccagacccgactatccatcgtgagccagcttccacaatctctctaccccaaagcaaacctctccataccgaggacgaagac

SEQ ID NO: 298204 - DNA, 6729 bp, Cannabis indica
atatttatattaaattagtgattaaattagtatttagcataaataattttatattatttaaatatttttattttactactttaattttttatttaataaaatatgataaattattttattatatatttatgatatatatttgatgatatatgatatattattttattttattttattatttaattatttattttttattttttagttgcgaattatttatttatttttatatatttttattttaatttaatttttttaaaaaataaataaaataatttcttcaataattataggatataataattacaaataattaattgttacaaaaataaaatattaataataataaaattaggagggaaacatttcccgccaaattcgtgtctccttcaagacaaatcaacttgccatgtctgctctaaccctaaacagcttctccgctgatctatccctaaatccatggccaaggctcccagaacaaccgccctccattccccgaggagatccaccaactctccttgtttcaattccaagtccacgctcactccttcaactccggcaacttccactcccggtcgtcgacgctcgactcgccggacttctctcaacatcgattctgaaattcaaactccactgaagggtattgatattgatgagaggcccatccatagttcagcgaagaaaactccaagaaatttgagaaatggggagggagccgccgatggaaagacaattcggaagtcccttgattatcctgaagattccattagagggaagaggaatcgaaacgttgtagttcccgaaaccccagatgtgaaaaaagccctgaactctgagaaaaagagcgagaaacgtactcgcaaagaggggaaaaatccaactcatgtggaagaagttttgttatctccggcatcgccagagcagccggaatcaagaaagaggaaagtggggaatggaagaacggtgattactagagctacgcattcaaaagataagaaatttggaaggaagaagggtggggcattatcgaataaacgagtttattacaagaaggttgtgtatgatgggggtgaatttgaggtgggggatgatgtgtatgtcaggaggagagaggatgcgagttcagacgatgacgaccctgaagtggaggagtgcagggtgtgctttaagtcggggagggcagtgatgatcgagtgtgatgattgtttaggtgggttccatttgaaatgtctgaagccgccattgaaggaggttccagaagaagattggatatgtgggttctgccaggctcgcaagatgggcaaagaggttatgcttccaaggccccccaaaggaaagaaactggccagaacaatgagagataaacttctttctagtgatttgtgggctgcttgtattgaaaggtaatccttttattttatttgtttttcattaaagatttttatcgtgaacattcatttctttatgtgtaattctgaatgtctattctatatactgtcagtccattttggctcttctttacctagttgtgtcattgattcattgctgtagtttatggaaagaagcgaatggtagctactggtgtcgagtacgttggtatataatccctgaagagaccgcttctggaagacaacctcataatctgaggagagagctttatcgcacgaacgatttggctgatattgaggtgaaaataaattcttgatccctatgctgataacaaaacaatagttgctgctgcctagtaaagtatttaagacagttctgagattttaatggtgcttcagagtgtctccttttgaaatattggacttgcatcttatagacagatgtgtctatgttcagacttttggtacattatatatattttgtaaaatatttagatatgaatgcatgctacagttcacattgtttattgagtttgcactctttttctgggcatttagatattgttgacgtttaaaacttcttcaacagccaagctatttatacttttaaataggtcaaaacttgaaacatagtataggtacaaataatgcaatttcgtgcaccaattgtttttgcatgatactcctacattgaaatcaggtattgtgttgaaaaagagggaggtgtctcactcctaaattcatgatttgctactgtaaatgcgcagatggaatgtgtgcttcgacattgttctgtcaagaaccctaaagaatatgtgaaggcctgtgatgaaggggatgacgtgtatctatgtgaatatgaatatgacatacgctggcacagtttcaagcggcttgctgaaattgatgacagtgaagaggtaagcacttcagaaattagaagcaggatttaggttataaaattttgaataaggatcatcaatcagttaaagaactttataggttcttattctcatatgctaggatgaagagtcagaaagtgatcaagattggaaaagtttgcaaggatgtagactctaacacagaagatgacatgtactatgaagaagagaacgttcaaaatataccagaaaaatcatattcagctcatgtgaaggctgctgtacgtacattatctttcataacaatttttggctttagcttgcttgaatgctttccaaatgaatcaagtccattcttttttttttttttttaataaattgtagaactctcgaaaggggcagttctttggacttgaaaagatagggatgaagaaaatcccagaacatgtaagatgtcataaacagactgaccttgaaagagcgaaggcagcacttcttttggcatcaatgccaaagtctcttccttgcaggaataagtatgttgaaattcgatgtgtgtgtgcgtgtgcattttactatgctgcacttactaaagatcacattcttttacatagggaaatggaggagatatcttcctttattaaaggtgccatatgtgatgatcaatgtctgggtcgttgcctctacattcatggtgttcctggaactggcaaggtaaattatttctttaattaatggtgtagagaccaatttaggagggctatagattctgttccagatcctattttttgttgtttgatctttctttgtgaaactgcagacaatgagtgtattggcagtactgcggagtctaagatctgaagtagatgcaggaagcataaaaccttattgctttgtggagattaacggtctaaaattggcatcaccagaaaatatttatagggtgagatatacatagtttagctgcgagtttctttgttcaaaagctgtatttcccttgttaaaacgagttatatccccacaggttatatatgaagcattaaccgggcacagggttggttggaaaaaggctctccaattgctaaatgaacgattttcagaagggaaaaggtttggcaaagaggatgagcgaccttgtattcttctgattgatgaactagatcttcttgtcaccaggaatcagtcggtaattcttttcttttcttctcgccctttgctgagcttagctggtaaccaagtagctcttctagtgatttttttgtactgacttctttagcataaggatattcgctgggggaaaaatgtgaagacctgatgtccgaaagtcttaactttatcatatttttgcaggttctttacaacattctagactggcccactaaagcacattccaaattgattgtgataggtatacaatcatcctgcgtcttgtctttgtataatctataattggttatttatttggcctcacctgctctcatgtgacaataaatataggcatagcaaatacaatggatcttccagaaaagttgcttcctcgtatttcaagccgtatgggaattcaaaggctttgttttggtccatataactatcagcaacttcaagaaattattttgagtcgcctgaaaggaattgaggcatttgaaaaacaagctattgaatttgcttcaaggaaggtcagttgttgcgtcctatttatttcatcatattttgttttttttccaaactttttctaaatgtaaatgggaccaagtgctgatcttacgtattgttaatatgtatccaggtagctgctgtttcaggagatgctcgtcgcgctttggaaatttgcaggcgtgcagcagaactcacagattaccatttaaagaaactaagcacaaaccccattaatatttctgaaggtacttattttatgaagtcattatgtgctacatttgtttcacaaatcagtagacataggggatataatgactccatatcattgattagtttcttatgctcagaaccctatttttcatttgcatgcacctggagaaagcttgtgtcttcgttggagtttatcctttctttcactaacactaatctctgaaattcgtatctttccaacagaagctgcatctttttttcctttccattcaatccaagctaatgacttcagtttgttcagctagtggctaaaagttcttttatttatttatttattttaattatatatcgattttctaggaaaatcacttgttggcatgagagaagttgaagcagccattcaagagatgtttcaggcacctcatattcaagtgagttatattttaactgaataattgatgacaattgatctttggttgaaacttgattcggttaaataataaatgattacacataaaagtatgttaaaattcttgtatgaggctatcttttgtatctttgttatagttaagtatcataaagtgcttttatctttgttgtggttaagtatcaagtgctgagcactggaaattgctaattatgtgcacaaacatgattaaatataaatactcggactgctgttcctttatttgaggggagggtttaatgtttgttggtttatattcgtatcaccgagatgttgatgttgttgacatggttcttgtttggcttctgcaggtgatgaaaagttgttccaaattgagtaaaattttcttgactgctatggtgtatgaactttataaaacaggaatgggtgaaaccacctttgaaaaggtctacatctaatgctttccctttaatatcctggtctcacttcttgctttattaacatgagacatccattgatactttcactcctgtttttagtaaacacttcttatattactgaagtactgaagttcacaattgagtttatgactttgcagctggcaatggctgtctcgtgtctgtgtacaagcaatggagaagcattccctggacatgacatactcttgagagtcgggtaagcatgtttcacagttatatattcacatcataaagtttgaaactacttaatgatcagaagaccattttatcttcttccaacattgttaaaagtcatattttcttacaatggagaatgtcaatttgctcttcttgaaatagattttgtaaattatatttaaaggcaaatttcatgttaatgtcgttggtaggtgcaagcttggtgaatggaggattgttttatgcgagtctggtactaagcacaagttgcaaaaattgcagctcaactttccaaggtttgattttacctcttactacactaatgatcactttcctggtttgcatatataaattttgttatttgttaacagcctgcacagtattatattgtattatatgacatttttatatgtttgatgctgacttgtatttacatagacatacaatattttaatatttaatacaaatcaataataataaatatcatataaaaatatagtatagaacacaatttaagtatagtatacaattgatataaaaaagcatgtcaaacgtttccaatgagctatcaaacgtttacattttagaagaattagtagtatatattattattaataattttaaggttcgaggtgataatatctatttgttcgaaagaaaaaaaaaacgataataatatctatatttgtctacttcttttatggcaacaactactctaatgattttttatctgtcaagaattagaaaactttggctgtattttggtccgattccaaatctgttttttcattattgcagtgatgatgtagcatttgcactcaaggacagtaaggagctaccttggctggctaagtatctttgattcaaatggaaaagaaaaaatctttagattagtagacaaatcaaattactttctcacttggagcaacaattttggagttattatcgttatcagttttaattttactgttgttgttgttgttgttgtcgttgttgttaaacctatgtattttccatacatataaaacactgacattcttaaattttgctatttttttatttatttgaagatacagtcagagaactgttaaagcattataattttatgatcattaagaaatgaatagaaattcagaagaaaaaagcgttaagttagcattttgggttcaaaggggcatttaggtttgttatgtagacattaatttgattttcattatttgaggatcacacaggtgcctttgactttagagccggctgtgatggcatatttttccagaattaatgaaatattttgtttgttataagtgtaacctaaaatgtataaatatattatattatttgtgtattaagatgtaagaggttctatattaaaatttaggctaattaggatttttatcttttgaactttgacatgtactgtataatattctctgaacttttaaggtcattaaaaatactctttaaactattgagattgttagatttaacgacttttgtttaattttagtaaa

SEQ ID NO: 298205 - DNA, 3059 bp, Cannabis indica
tttttttaaaaaaaattctcaacattttccccctaattacaataacaccaaattacttataattcatagtaacccattacaaaccattccctcttttatttgcccatattctcatattaatttgctaagagaatgaaaataacatgatgtcaatttgactcgtatttggtatcatagaataaagctgatagttttttaggctcaataagggtaacaatagatagttattttcaggttggctcgaaagcataaacggtccaataaaaacacctaaagcgtcttcctacacatatcttatctaggatttcatctgaagtattaataagcaagtttaagattcattcattcatcaaaccacaagatatttgacaacaattcatacatccaaattcatttgcaaagaatcttttagtcatggaaaaacatgtgatttttttgtggattgaaataagctactaacatagtcaaacaaagcgcacagatttatttaattataattttgaaattcttgcataatattttcctacatatcatcagctaacattgaaaacttgattcacacaaaaatgatacaatgattaaaactcaaataaaatagtaaacacaaaaagaaactaaggtatctataatgagagatgaaataaaatttgtttccctccccaaacataatttagatattgtcctaaatgtttaaataaaagaaaaggaaaattaagaaaacttacctttaacccaatacaatgctacattatagtcctattatgacacatcaacaagaaattgacgcccataataagcgtcatacatgaccacttgaaagttaccattgtgataaccctcaagcattgcatgatatgggtttattctacatttaacaccaacaacacaagattctaaaggatgagttttggaagaaacctttagtggcttgtagacgatgtaatatcgcagggatgttattaataaaaattatgaatctattgcggtgcataagttaatactagtgacgaattcaaatcaatgctatcagatgttttctcatcccctgtgtaacctttcttcacatttatctagaaactcttcttttgtggttcactctccacttggctatctataaccttgcttgtgatttgatattcaataattcatgatcatagctttaccctaattgtataggaattcacaatcataatcgttgaataaatcctaccaccatctatgcctcatatttaattgcttccgtgttaaaaaatatttgacactcttgtggtcaatataaatattataatagactctataaaagtaatgcctcaaaatttagagtgcaaacaccacaacggccaactctaggtcatgcgtagggtagttcttctcataatttttaaattgttacaatgcatagccaattactttaccatcttgcatcaataaaactcctaatccctaactcgaggcattactatagttggtaaatctttctataccttttggaatttctagtactagggctattgttagcctggttttcaactcttaaaaactaatttcacatttctgtctccacacaaaacatccttgcgggtaagtgaagtcataggcgttgctatcttggcaaatccgtccatgaagcacctataataacctactaaccctagaaaactacggacttcttgtgtgttcttcagagcctcccaccgttttcaacttcaattattgtaggatctaccaaaattttgtcccctgacaccacgtgtcctagaacactcacatgatttagccaaaattcacattgagaatttagcataaaactttttctctctttagcgtttaagaacttttttaaatgctctgcatgatcttcttgaagcgttaataaatgagtatatcatcaatgaacaagatcatacccttatccaagaattcaccaattaacctgtgcatgagatccatgaaagccataggtacgttggtgagcccaaaagatataactaaaaattcataatgaccataacatgctctgaatgtcaccttagggatattaaaccttcgagaatacgactgctccttgcaactaatcaaatagatcatcgatacttgtaacagatattggttcttgatcataactttatttaattcttaaaattcaatgtgaattctcatggaaccatctttctttttcaggaatagaacaagggctctccacagtgaaggatagtttgatgatgtacttatcaaggtgatattgaagttggagttgtaactcttttggctctaccaatgcaatttagtatggagcctttgagataggtgcagttcctaggatgagttctatttcaaactatgtttctctttctaggggcatccccggtagatcatctagaaatacatctataaacttgcacacttctaagatattagatggtttcttcttgtcttctttactcttatccactatgttctcaaggaaccaaacacccccattattcaacatttttcagaactttaatgcttacaccacaacaaaaattctagttttggatgttccttgtgttgggttttacgccctaaataaaagttattttaatataattagatttactaattaataaagatcagaaattattttatgaagatcagaaattattttatgttgcatggttcacatgatttatatcatgtttatatttaatgtataaattctattaagtccagaacatatgtatttgttcacgattatagtgttgtcagcatagtggaatataatcatatgattatatgttcaaaagtttaattccctattttgtcagttcactagatttagattggcatgatagtcagcgataggtatacttacaccttgaataactgttatgtcatttccagggtattgggaaagtttaccagtatcgaatgtatggagtacacattcgaagggaccgatattgaacttggattagatatgataagtttaccgtagtatctattcaattcaatatcagctaattgatcctagatctaatgatctaaatcctgacatgagtaggttcgatctcaagagt

SEQ ID NO: 298206 - DNA, 3499 bp, Cannabis indica
cgttttttttttttatattaggattttatactattttttgtaaaaattcaaaaaaaaaatattagaaaaattcaataaaaaattgaaaaatataaaaaaaaacaagtaagagtaaccaattaccttaagaactaagaaggtaaccaattagcttatagtactgttttctcttatatttctttatttctttctaaaattttctcatcaaataatttttttcacaaaaaaaattatatttttgctaatttataccttaaaaactgctaaaataaaaatttcccaacattttaagtctttgtttaatagaaatatagtaattttgaaaaatatgtatatttttttcaaaaataaaaaataaaaattggagatctctaagctaagtaggccctacgcgcaaggccgatctaccttagcttagggttgttgtgtgtaatattttagtacatattttaggtgcacatatcattactaacaacatatcctttcgttgcagctaccaacttcaaaagtacagaaacgcgggatcgtttgtagtaccggttgatccaaaggacaaggaaacatggggagacagtgaacacagactagcctatgtttcggaaacaacagttatttttaaggacattgttcaagttagagatgatcaatggtggaaggctctatcaactggttacatcacacaatgggctgcaatgcaccctcaaaaaattgatgcactcttctatgctcattccctaaatgaagtcaaagcactctcacctttactcgaaaagtttaggtcaactgttggtaaaaaggcttacattgctgtttctggtggcaaattttgctcttgtgaagatgctgcaagtgctctcaagtggcgtaaatctgtttgtaaagaaagaaggtttaagatttttgatttggatgtgggtgccctttcgggggtatcgaattcggaggtgcccgttgtacaagctatttatgctagtgttaagggtttgatcaaaattcataacccaagtgttgttattagtgtggctgatgttgatcctcatgtgaagaaagctttgaaaatggctagtgagactaatgccaatgctacaacattggttcttttgcctaaagcctcggtttcgaaggtgctttggatggcggatttgcgatcaaccgctttaccaagtaagaaacactacctcttcgtattatttattaaattaaaatatgtgcaattgagtgttttagaccaaaaaattatatttgaatatataatcataaaaattttaaatatgatatttaaaagaaaaagaaatcatatattttgttgcaatatatagtagttaaagtttagaatatactagatttttaaaattaaattaggtatttttttaagaacttttaggctaagaggggaaagttttgatattgaatagtttcaatagcattacagtattgttataaagtattaatagtttttaacactatttagaggtattagatagcgatatttcgtatattgttataaagtattaatagtttttaacactatttagaggtattagatagcgatatttcgtatattgttataaagtattaatagtttttaacactatttagaggtattagatagcgatatttcgtatattgttataaagtattaatagtttttaatactatttagaggtattagatagccatatttcgtataaattattattttaaattatatgaaattcaacacttaattttaccaataaaaatataatacattgataggtattagttactattagtaccttttagcttttttatatttttattgctttactttagccattctctaatataaaacacttataggagaccacaaattttagtgagtcaaatccttaggagttaaaaacatctatatagatgtatacaaagacacaaacaacataataagtttattattaattaaaatctatttatatattgacatgtgcagattggaaccgcatgagagtatcagtaaacataatcactcaaaacagagttgaatcactaacaaggcttctaaaatctctaagcaatgcttactatgttggtgatgaaataccaataagtttcaacatggatagtcaagttgatgagtcaacaataaaactagtgagcacatttgattggccacatggtccaaaaacactaagaagaagaataatccaaggtggattaatcagagccgttagtgaaagttggtacccttcatctgatgatgattatggtctattacttgaagatgatattgaagtatcaccttactattatctatggattaaatatgctcttttagcttatcattatgaccctgaaattcatttccctgaactctcttctatctcactttacacaccaaaacttgttgaagttgttaaggaaagacctaaatggaatccaactgattttttcaagaaaattcatccaaacacaccttatctacaccaattaccatgtagttggggtgcagtgttcttccctaaacaatggagagaattctatgtgtacatgaatatgaggtttactgaggatgcaaaatcgaacccggttcaaattccaaagtctagaacaaatggttggcaagcttcatggaaaaaattccttattgacatgatgtacttaagagggtatgttagtttgtatccaaattttccaaatcaagctagcttttcaaccaaccatatggagccgggtgctcatattagcgcgaaagacaatgttgttcgccatgacaagagcgattttgaggtgcctttgttgaaggaagattttagaaatcttttgcctaatgggaaatttcctccagcttcaagacttccttctttgaacttgtttaatcaaccaatttctcttaagggacttaaggcagctggtgctaaacttggtcaagatgttttgaaatgtaacaatgtgagtgagattgtggttgttaatcaccaaactggtcttccagctacttgtgctaaattctgattatatcatcaaataatgtgatttgttattgattattattcttttcttttttaaaaaaaacaaaatggggaaaaagggtacattttttttattatttttattttaattttgttgattattcttggtagaggattggagttgaatcttgtttaagatttggtgataatggttcttgactgttgttgttctctttagttttctatgtaaggattataaatattggcaagagggtgttgtgtattgttttgatgccagccataaatggcttaagctctcttaattttctaatgaaaagaaatttatagctctgtctctctctcttcttttaactcatgatgataagttgtttaattttgaattattaagattgtaggaaattacactctataccctttttatattgtattcttttatttttaccttcttttttaaaatctatcatttttacctcttttttaaaatattgtaccaattttgcccctgtcacttcaagatactctccatgtga

SEQ ID NO: 298207 - DNA, 959 bp, Cannabis indica
tcgtgtgacaattgtcaactccttattggtctaaattgattggttagaccaatgaggagcatgccttagttaatatttaacagaactaattgagcattagtaaagaagtcactatttatcaacatttggttatttgtgcttaagaaaatagagagagtttaacaaatattgaatattcatgccacttataatcctttctcttaatatatttttgcattttttatttggaacttttattacgttttttggtatattataatggcagataatttcaagaagaaaaatcgaactttgagtgagttgttgagtggagataatctcatcaaggctccatatgaacttgagtttttagttgaaaaaaggcttgaaattgcttgttccaaaaccttaacaaaggaagaagtttctcagtttagagaagcaatcaaaagaaattactacttccaaatgtactatgatgacttgccaatcttggaatatataggagagagttacaacagaggcattattactgatatggataactacacatttatacttcacacatacattcaatttgaaattcttttcaacaaggaccgagtaatcgaaatcaagattcaattcatccccggattaggaaaagacataactgaggacaaggaaaagtgtgtagactttgtttacaatgtatattggaaggaagttgacactgcatttgacaagagaatggagaagtacttagttgctccatcacggtgcaatcacatcgagttcaattggtttgcaattataaatacatgcgaatcactaatcgtcgcgattggtatccttctgaaactttactttcatgctcttaagaaggatttttctgagtaagcattgttaatccttagctatatattaatcttatgatctgtttcttgtttttgtttttcctttatgtatttttgtttttcataaatgatgactacaatagg

SEQ ID NO: 298208 - DNA, 1675 bp, Cannabis indica
ttttcaaaaaaaaaaaatagatataattattccaactcacactactaaattttcaatttatcaaacactacacctaattttttatctcacaacatatatagttacagttgctatggattattttctgtcatatatggtttatttttcttcttctacttttgtcttacttttacaaatttacaacataagtactaatatttgtttagctatgtattattattattattattattattattattattattattatcattatcatcgtactcttgaggacaagtaaaggtcttcactcattacatatccactaaaatttagttttctttatattattaagaaataaaggcatgtttgctatgtttaggataataataaattattaaagatgatgattcatcttatgtagtggtggggttgattttatgtggacaattttgacttcttcttctaattaataatacaaggcaaattatcacaataatcccttcccaaatatttcacagatccatttttatttttatttcagaaaagcacaaaatgggaattctcccatttattaaaaaattattagtaaatgtatgaatgtgatgtgaaacacactatacttaaactataataaatatttttagggacattttgttaattatggaatacactatagtagtatagtagtactagtggtagtaattaattaaggtttaagaaataggtgcaccagctgaaatgatttgattgttagttgagcacgttttcacaaatcacatcaaataaataggattaatggataaatggttattacacctaacctaattcacatatcataatttatttcatccaaaagagcaaataatgtaaaaatgtatataaatttaacctatgtaagttgttagctaatctaataatagaagtttcaaaagaaaaatagaacaaattataatgagacaaaagactaattcttttgttttttatgaaaatattataaaataataatgtgtatactattgattttgttcaacttcacacaatattatattatatgatgaaggagaagaagaagaagaaaaaaaggtcaaaataaaatcaattcacaccctattaacaattatagttagtcaaatgtaaggttacatatagtagtgattacattaagctttgactgtaatctaaaaatgtaaggaaatttctatttttcacacaaggacatgaaatctttctcttattgctttaataatagcacaacacttacaaaaagtggaaattttgtagaaataatatggtttctttttcaagtcttttcccactcaaaaaagaaaattaaataatgaattttgttaggatcagccgaactttaactcctccatatcaattatcaggcccataaagtccattcatcactttttttttcttcttcttctattattattatattattttcatattctcttgttagtagctatagcaatcttggaaatatcaagaatagagggttattttatttaaagtaatttgcaatataactactatttgatatgtatataatatgtattttatttttatgaaagaatatatgtaatttttttttagttcgaccatcggaccgattttttttttttttttagtcgatttctaaagagaggaagagagagtggggttgagggggtgcgacgtttgggtg

SEQ ID NO: 298209 - DNA, 5024 bp, Cannabis indica
aattacctctggatcagattcttctgaatcaaattgtgcagatgtttttcctatagctgctgaaaatgcagccaaaaattttgcatcgatagacccaattgaggacgcgccttaagaaaaaagcacaggcatcaagcaacagaaaatacacactgtagtttcttttagtcattatcaatatcttcttttgaataaataagcaccactcaccgtaaatgaaatcagattcaagttgttcaggccatttatattgagacagaacctatcggagaaaataaaaattacattaagaaactaaacaatattatggaatcaggatttactaaaacaacattacattaatgaaatgcctgactaacttcatttaaacacctgataacaaaaaattgagtctaaaaatgcaaaagaaaagtaaactttctgactgattggcaacaagatacaatctaaaagaaagaatgacacaagaaggaacttgactatttattacatttaggagaataaaagttgagtcttcttagactgcccaatccccctataccacccttcccgaaaaaggaaaaaagaaaacataaaggggaaagactacaattacctcttgtaagcgccagaggcccgtgcacctttgaattgcagcaaccattgagcataatgctgcaacatgcccaggttgcattaaattttgtatatcttgaaaattgggcccctgaacaagtaacagcatctctttattatatgtgccaacaagctattatatatgttatgattcaagtagattataagacaaaataaacatggtcacccaattccaaaatatcatgcctgtgaaacatgtataaacagtgtcactttcttgttacttcctcctaaagcagcagcaagggcttgcctttgacaaacataagcacagaatctgaaaactccaatatcccacagtggagagatccactttgcaaccttcctaggaagaaatccaagctgaacacaatctggttcaagtgcagaaaaagacaataaaaattacttggctgtccaaatattcaaaaagtaaaatccatttacagaatatgtgtatgtgtttgtctttgtgtgaatataaaaaagaatttatgattgctgacgtatagtggttaagaagatctatagtggctccacaaactaactaaaatgaacaccatcatgtattgtagctacagaaaattaatacgaaagtgacaaaacaaaacaagagctcaagaaatccaacacaaccaagcgctttcacagataaagagtcatggtcatgccaaagcaagaatgtaatagtatatcctcgacctacagttgactatgtacagcaacaggattcatcacattacggtgtcttctataacagatgatacttatgcaatcagtaatagcaaattataagcattttcaccacagcctcactctgttctcctcaaaaccataagtccaccagaggtccaattatttgatattatccaatgtgagaaatataatatataacataatgttaatatatcaataagttgaactataccttgactaaggtcctcatttgggttaggaacaagaatgctcacagcattttcatcggcacgaacatttttatttctcatcaatacaaccatagaaaaatcatgcgtattttcacatgaattcctcatgaaagaagccaatttcttaagccgtacaccgttggagtcagctgcattgtgaaagaggtagctcaaaccaacaacagatgcttcaactgaaccaaggaatctgtgaccagatgatgttgacatatcctaaccaaacagacaagaacataatgacaattacagatctggttttatcaagcacctatatgaaaagaacactatgatcaataaaatatgcaactgtaaagtagtgataattctttctaagaaactgttccatgcataatccattaaagcatcaatgcctcaaattcactttagaaatgggtgacataagattgtgggcagtcttaaattaaatgaacaaactggtaatcacaaatgtcaatgcctagaaatggtatatgaaaggaatattcatctactataatattatccacatagagcaagaaacgcaggctagtgtgcataatcaacgaacgcactcacttgtaagagttgcatgaatggaaacatattgggaggtctgtaagaatgaatcccaggaactgaagcaactaaatcacccattgcctctccaaagtcatactttgccaattcaacaatccaatgagcctggctgggtacatcagtcaaaagagatgccataaacccagccagctgagaacaaaaatcagattttgagtcttggtttactcctggaccatgaatttgagtaaaaagagacatgtaatctggaacacaattgcggggaaaatcttgccaccagactgtgttagtcacagcattccactaaatcaagagaaaagaaggcgaaacaaccacaagtacaaaaacattaataaaatagagaaagaaataagggatttattatttaaagaagataactacatttaatctattactgctacatttggagccattgaaaaagggtcgtgatgcctagtaatagtttctctaacctctttgtctcagatatttaaatattctagatctctaaaattcagatgcaaagcatactcaagcgtcaatcaaattagatatatatcttgaatgcagagcaataaatccatgctaaccactgcacatgacatgctcttgcagagtgtgaatttcgaagaaaatttggaaagtacccagtatgatgtaaaaacaaaaacataagaaattacctgggtcggaactaaatttgcagaagtaattataactcgaacaaaatcatctctttgtaaaacaaacaatttggggtgatgacaaccaattccttgtcttttcaagtctttaccgaaagcaatgtcctcaggaaatgggggatacctgatttgataagcacaatgatagcaccaaaaaacattcaaagatacaacccagcttacactagttggaggtcacgtaaatcggttgcaatacacagaaataatactcacactacaacaaggttaggaaaatcagggtaaggcacagaagtcctacattcagtacttgaactccaacatttctcggtactatgacaagcaattgtcacaggtaaatgcctaggaatctcgcaggacgacaaaaacctacaaaattctcccgtagttttagcactaataaactatcaacttaaacaaacatataagttcaacgatagaattatcaattatgtaaggatgtttgctactgtaccataaaatgtcgctggtaaaagttgcaataaaaatttgggaaatgctttcaacaggatgaaaaagctcatgtaaggatacatcagtagtatgacttgaagaggaatcatccataaacccaagacgattcagataaaaaccttttccaggtggctcagaaatgcagccccgagtacttatgcttctctttacagcacaatcaggaaacaaagaacaatccttaccaactatattaaaccaagacttctctgaattattatccacactagcagtaccaaaaccaagcggactttcattttgtctactcaaactttcactattagcaacgtaatcaaacggttctgaagccatttccttctcgcaaggacgtgaaagtaaactcgaacaaggcagcaccgggctagccccttcactactttccaacttctgattcatatggctttcatcagattgataggttgggatagcagtggctcgaagataagatacagggtcatcgctaagcaaaatgcgcttgcagttactcaacaagcagtttgctctggcaacgaaatcttcacattttgaaactgcatcaaaatcctcgtcactggcctttgaagcaaaaattctcttgtttcccttctggcttgatacaattgttccttgggagtactgtgactgagattgagatcgtgatttctgggtctcaaaaacaattctttgaatagaaaaaccaatgcgaaaagaagaactacaacgccgcctgtttgaacagacaagtgaaacttcatctccatcggccaactccacagccatgcctctcttaaccttgacaccattaacaaacactccattcttagaagccctaacctgaagagcagagccagaatcaaattctccgtcgagaagatagagtttgcggaggaaaggatcgaagagaatctggcaatggcggcgaccgacgcggcggtcgctaaagaaaaaatcggaatacctagaactacgaccgatggttgaggaagggcgacgaggatcgagacgaatagaatcgaccggagaaccggtggtagcagaaaggagagggagatcaaagtgattcaactccaccacaacgctcctcctacttcgtcttcttctcccttcatcttctgtgcttcttcttcttcttttgttagatttcgaagaagaggaagaagaatatttatcgtgtgaactacagcaatcttccattgaaacgtgaattgaagaaactcgatcaattcatcaactaaaagattaaagaaatcgtatattaatttgatttaaattttacaaaatactcttgctgttgctgctctgaaactgctcaatgaaaaatcggtttctaagtttcaattttccctccaaaatccaaatttatcttcctctttatggtactattaattccttcatcaattgccttggtccaaactcttaaaaaaaaaaataaataaatatttctttcatcaaaaataaataaataaataaatttatctcataaactatttttttaatttttttttcaaatttacagtttggatttctaaagtggttgcagcgctagttgcaatagggatttctatacgattttttgttgcaatttaggttgcaacgctagttgcaatatggatttctatgtagaatttcgtaaaaatgcagaaaaaaaaaaaaaaactgttttaaaatataaaaatgaaaaagctcctat

SEQ ID NO: 298210 - DNA, 6467 bp, Cannabis indica
tcaaatagcaaatttttttttttgctggagattgttttcggttcatagcttgaatattgtctctgtagatctgaatcttgaatgttgtctttttggcgggtcaacaattaaattatgttttgttttaaagcatttgcccacttgttggcgccatgctgtgaaatttagaaagtaaacagcttttaaaacttcgtcccaaccagcccttatttgaccatctcactgttaaaacgattttcatctgttgaaaacccttaaatcggtttttaagattacaagatgttatatggtgcttccccttttgctgagatctgttcttttgcctctttcattcatgaattttgagcacaagtctcccaattttgataaaacttgttgtgttttccgctaccagttgtgatataatcctcaaacaatttaacaaaacacttcatttcattttggggactttttgcaagaatgcgtaaacatggaacatctgaaattatcacgttaaaaaagatgaaagaagctggactattaaaattgtgctgaaaacgccctccatacaaaaatatgattaaatttgacaacttcatttttcaaagtgatcaattgtgctgtgaactcttcgggtaaatacaaagagagaccagcaactttgattgaggaagcatgcaacaagcaatatcacttcatatactccaattagcagcattggaaaatctgcgaagtgccctgagctatcaactacaatgctaataatgtcgccactatgttggtagagaaggtcttaagggagatctcatctggaagtcacttaacagtcagctccatctcaactatatagctgttaaccctcattctgtagtttccttttgtatttcctaaacacttttcttcggtattggctgcctttttgtttttctttgtttttttttctgcagtttgttcaccctgctttgcatttcgggtttgttaatgcaggttccatctgtatccacatctccccatttctctgttggctctgattttatttcaaagaattgtgttcctcccttgggcagggatcacttcagaaaaaacaaaaacaaagaaaaaagagaacattaatatttgctttattaaggaaaacaaaggagtaagtttaatgttcttgaaaatgatactcccatagtccccctcgtggcattcgtatttttatcataaattctttgctcaatttttggttttctccactctcttttcttttaattatcgatttattgattgagttttaggcttctacatgtgttatacccctattgtaagacttggatgtacatgtctctatccgtatgatgaaccttattgtttatttgatcacacttgaaaaacaatatcagcaaagaagaagcttaactgtcctgtccatacatgaagaaagtgacatgcatttatgtcatttcttcaaagcaatacatataaatccatcattagtgctaacgaagttaacctttgagtaaatgagcagaaaggatcccattttacgagtaaaaaagaatcttattgaagaataaaattcttacctacaaactaaatcatatatcaaccttgaattcatgctgttatctctcgtgtgcaaattgcaaccggatattcctcccatccagtaactgatcatgaattttagaagattagtagggctaattttgatgcaaagagagagagagcacaaatacagtgacactacctgaccatctatttctttaagagcatcggtggctgcagcttcagatgtgaagtgtacaaatccatacccctttgatctcccactcttgtggtcacaaattactttaactgcaacaaatatattttgacaaacttagcattcccttacaagaaaaaaataatgccactcttaaaaaaataaatgagatttacattaataccttctagtatatccccatgtttctcaaaggcagcctttaaaacaggttcatttgtatcataagatagacctacacttcaacaacacataattggattgagctatttaaatggtgaccaataaaccaaaattaaaaagcttgaagctttggagacctccaacaaataacttggccgagaagtgtcttgcccaaaactttccggtcaatgaacatgtgccccaaacatgaactccaccatataagcctctcatggttgatttctgtgtaagcagaagcaatggtgagtgataaactaaaacgcagaggaggagatggaggctgtcctgtccatagtcctttaactacactcacattgctgggaaatgaaaaagaaattccagattaatagctctgaagatggagaaggaacctcaaagagaaataggctgggatttgtattttgtgggcagtgctttaatttcttctattggtttggatggaggcattgttcatatcaagatggcaggaaagcaaggtgctaaggattggaaccttaaagtattaacccccgaacgtgataataccatactaatctagtttcaacatttcaagctaggatacgtttctaagctagagcacaaattagctagcagatcgttttcttagccaacttaagcatacataagaagaagtgcaaggttttctcaggttagaagctctctttttcttaacccatctcctatacaaagcaactttcttccaagatctggctcctcctaaaactttgaattaacgaataaacataccacaattaaacaattaaaaatacactcaaacaattcatacccaaacaaagaggacaaactcaactacaggcagtcaaagcagcttaaacactccaagtgaaaccaaaagaagccaacagaaaattaaaatttgaaaagtaatgaaatagagtgaagtaaccttgcaaatcaacttgtcttctctttataattaagactcagaccccattaagctcattctaatttaaaacctaatcaaaataaatcaagaaaatcaaaagggacattcatagattcgtcgctgcatgattggtggaaacaaaaacctaggtaacttatgagtagcaactagaagagctgtatactagtttttaggacacaagaaggaagaggaggatgagtatcgaattttaggcagagagaatcgcagagagggcctaggagttcgagctccattgtcattatttttaatggacaaagttgaaattaaacaaaattactctacatactccttttacattaatgtctttaatttttacctcatttttcaaaatttattatgtctacttcttttttcaatcattctatcaattttactcctatcactttataatagttcatttttctctaatcaaaattttgctcaaactttcccataaacctacacatctatctccaaagaacacaatctaatgaatctattatgtttgatattgtatcttagttatatgtgagtgtggtgataattaaagtacaatactcataaaaagaggtatagcgcgtaagtaattgacactatgtcacatttaccacttagcttgcaatcagactatatgacttctttttcacttaacttctctttgtctactttttttcttcataattttctcttattaacttagattttcgttaacaataaataaagtattgcaaataaagaattaatacctataattaatatatatggaacacttaagaatttttacgtgattttgtagttaaaatctatataatctacatactccacaagtcattattatttatgagtatttcttaaaaatatacttagaatagagaggaataattatgaaactttactcaatctcacaatgtctctctttcctaaaatgattgatcctatttggtttggttcctatttataagggttcttggaataacaattattctcctttgatcttatttaagtaatcgttcataaaatgtggacaatacccacgttttatatttacaacatgtagataaaatgaagtacctaatgataatcgctttctgttcttacgtggaagcagttagtctctaccaagataatacatttcagctatggctcgtatcattcgacagtgttcaaggatagctggtcgtattttgcgagactagttaaaatatttgtcctcgctatagcctttttagagcgactcttagaattagtctttcaaaataagttgtattatgcttatttccgttagttttttaatgtagtcatgagtatatgagtcaataagttgcaagcttttaaagaactcgctatctacccattctacttaactcattctttcctgctatttaccctcctcgttcatctcagtaaagttctaaggatttaacttgtaatcctattatcctcgtaaatcattatattgataaggccatgcgaggtcatcacatctttttaatcgtagtttatcctgaggcgagacatttattcattcctcgcatttattattctcttcattcttttagacttatatgatatgtgtcatgtccatattcaatgctcaaattatgggcataacaattaccccctaaaaagtatttttcatttttaaaaaagacttttttaaatcattgttatcacttgtctgttgtgtaacgagaaagctccttaaatttttgctttggcggtttttgtctttccaataaaaagttaatcatggctttggtaataaatgcacgtcttttaaactgacccgtaattaatcaccattgattaaatatttcttttaatcgtacaatgcttacgattttgcttataagactattatttttatttctcaccaccattttaccactgttatccaagaataataatcacaaaattgatagcatcccctgtgtatgccctcaatgtctttttgctttttttttttcccgcaaatttggaaccattttttaaaatctagaaaatgttttatccttgagccttggattcgtcgagctttaggaaaaactgcgtctaatccatcgttaaattctaaacatggtatggttttcttcacactttaattcgcatcccacgaagtgattttttggaattctgcgactccgtattttatattttcaaaatagaatttttctagtacaaggaaaatgaatctatttaactctaaagttgataactgacgacggatcagtcgaagagaccaaagtgtgaccatgcatagctgcacaacaaaaggcatcacagttcaggcagagtatagagtctatatccgaatagactttcaaatagggacttgggggacaaatgttatcctaattttttcccgtgtgatgtggcacctccacgtggctaaaagtaaaagacacgtgggagacaagttagcactaaccggccagggtagtgccatgcagctccctaaacctcaagatcttggggctgcaagatggactcaaacaagaagagcatggagacttacaagatccacatcttcatagttttgaaacaagtttatcctgatatcagaatctccaacaaagctacggggatcatgaacagtttcatcaacaaaagaagagaacaaggcatataaccaagaccctggccgaacctctagctagctggccaaggatgaaaatccatatgccgggcaaccttcagacatggttggccgaccaatacacattatcaatcccaaagaagaataattttttaaactcaaaccaaactcctcagtgttctgccctaaaatcgattaccagataaaaaaaattgttctaactctcccttaaatccttaaacctgataatgatactgagcccaaaataattcttcaattttttcaatattttaataatcaatgctctcttaaaaacaaaaaaaaaaggaaacaaaataatcaatgcttcggaaatataaaaatcaacgttcttattcgagatattatctattagatgtcctcttttccaggtgtctctttaaattatgttagtcggagtgctaattacgctgcacatggtcttactagattcactttacgagtggatactaatattgtttggagggttgtttgtccaagccccattgaagctattgttgtaaatgaacttattcattaatattaatagcttttctcttaaaaaaataaaaataaatattcatgtgtttttttcaaataaataaatatgaaaaaaaaattcggttttcaattttttcggtattcagacggtcagtgtactcggtttgatcgttttcttagattttttgctcacccctaatgggaagattctacgatgcatctcttaaaagggatacagtgatacaccattatctatctatactagtatctgaaataattttttagtcaaatttttttctcatggtcatatacattatagtaatttaaggtatcctgcaaaattttaagaaattttaaaaaatttaacatcctgaaatagtgttcaaatagtgtgttgcacgtgtagctattttattttatacgtgtgtaaaatagactgtttaaactttaaacactactttctatattgtaaatta

SEQ ID NO: 298211 - DNA, 3323 bp, Cannabis indica
ggcataaaacccaacaaggtgtggtcggagcacggtgcttccagtctaaactctgacaccacacaggtgaaaccgagagagagaatgggaaagaaagagaaagagaatgagatggattctcagttttagaggctctaggctttgggaaaacttaaaatatacgatttccaactttctttacaaaaacatagcataaaaaacccacccgtaaccccaaaaattatttatttataccatataaaattaactcttataattttccctactaatttgtagtttttttatttatgcccataatccaatcacatgcgcactatcattgcagcctccttccccaacaaaaacgctttgtgatcattgatcactcttgttctttgaattttctcggagaaaatctcaaggatgagatctccgagaaaattgaagtctacctctaaatccgattccaattgtatggagttggttctccatactatttcggcgaatgtcgagcacccggttccgttgaccgttttcgacccgaaatcccatgggcagataagcttgagactgtccccaagttttagtccaagttcagtagagaccgtgttcagaaaaggggctcgtaatgtagataaggtgttccatttggcgacttcaactagcgtgagacgatctcctaggctctcttcgggctcaaatgagttgaaatcgagcaatgtggctccaagattaggttcgcaactactgttggagtcttcaaatagccggagaaggtccccaacgctagatccgagtccgtcagaggtcaaaaagagcaatgtgggtaagctactgggtaagaggggatctgcaaagtgtgagatggaattattagacgaagtggctgtgagaaggtctccaaggttttcaccacctgcggtggctgtggctgatagtgacattactaaaagtaaatcgaaatcttctaatgccatggtacgctctctaagtttcttttctttcttttttttttcttgcaaattttcactattcagaatgcatgaaatagtttagtgaagttttttttttttttcagcataaagtagtagcttaattattttcaaagtaaaggagaagaaaaaaaaaagttcactacattaatgctagtttgacagcttcaaacaaattgtcttttttgctgaatctttaaacaaattgtcattaatggaagtaattactccataaaagttttgagagagtggaaatgtatcatttttgaagcggtccatttagctgggctacatttgacatttatgttgcttttttgtgcaagtgaaattcaacttttttgtattatgttgccagagtgttgaaatacagagcaacagtaaattttgatttttcattatagaattggctactgggttttcttctgccatgggcagctattttgatgtagaatatggtataatatttaacttctttattttgtgggaactgggaagtcctttccttttaacttactctacatgtaaaagagaaaagtagaacagtttctagtttcatttcacatttctgggctgtggtcgacactcttaccaatctagaaaccgctgaaggaaaaaaaaacatatatatatgcatggcataattcaatggcaggattacacagtgcataagacactacaacgattaaagctgacttagaaaattccataaacacagtctctcactcatttctaatcccaaaaaaccatatccaatagaaaatttatgaggttgaacaagtgacttcgtttgaaactaggctcccgcctcacccgacaatatttggagaagtccgatgttgactaggatggctgccccaatagcagatggtcacttgttgtgggtatttgttggaaaaaacaacaatgaaattatagtaattactatgtaggtatctaaaagtgactcgaatctccgacactatgggagcaaacctcatgcttgaccatttaagctacttttttttttgtagggtgagcagtgactttgaatcataaagatttcataatattattctctcttccttttttttttttttgcaaagatgagatttcataataatttagtagacactttatggagattaaaagaaggtagctatcaaacactacatttccaagagttaattgtcgtggatgtgctctctttgggttgtaaaattttaagacaataaaatgtaattgttggagtcctcacttcgcagaagattagggatggcaggggccatatatggtggaagcggggtcatttctcgtcctgccatgcccatgtgcatcccttgattgctcatctctaacataacttttaactgttaacacatttacactaaaatatgtttggggtctgaaacatatttttaagagaactttctttttatgtaaaaaagtaggaaagttacttactgctatcaaaatttatataagatttttagttgtcgattttcaaacacattttgatataacaaattacaaggaaaatttatggcacacttaggctagataattaggtatcctggatggaaaaattcctccacctatttgtaattgtgtcctatgcaatcttataatggtagtcttttttggaagaaaacatatataaatttcatgggatatttctttattttggcatgtcaaattgagattattttgtgggtaatgttagcttttgaagctactagagaaaacaagtaacactatggaaacattgtgaagagatgctggattgtgaaagaaggggttcaaggttaggacagctatataaatactcaaagtgtggcaggttgtgttggagttcggattgggtctatgatacactcttgtagtgtatctgctctcacagcagtaacaaataggaatcaaaagaaatcgaagacagttatagaggatatcagggtatggagcaaagatacctttgccaaaatcatttgatgattaagagtccactggagaaaagattggcgaatcttagtaggattgaagcaagtaataggtggaacatttctctagcttaagagagaaagaatattaagaaagaatggcagaaattagttttcgaagaagcaagtaataggtggaaacatatctctagctaaagagagaaagaatgggagatattaatttttgaagaagaaagaagtgtggctgaaatcaaagtgcaaatgggctaaggaaggagatgcaaattcaaggtttttgcataaccttctttttttttgaaaaaggagaagagatccatatgtcacaggatcctccccgatatatattaaaagtctcccttatggtggaagaaaaccataattacaaataataacaaaa

SEQ ID NO: 298212 - DNA, 2437 bp, Cannabis indica
taaattttttttctgaatgccgaaacaagtcaaaaggtgtatcagtacatcccttttaagagggtgcattgttgcattaccccaaaatatttaatcttataaagtacaggtgcatatgtttttccatagttgtagatatagcatgtagatttatgttttggttaatattgtatatttaaaagttcaatggtacaacaataggagctggtgggatggtcttctgtaaaggtgagcagttccatccatttttcttgctataagacacattaaaatatttcggaacccaagtttcagacttggattttctttctttttgaagcactctctgattcttctcgatttctttctttgcttctctagctttttcccaatttttgctcatgattccttggctcacctcactccaaaccatagctgattcactttgacataccccctaacaaaataaataaataaataaataaataataagaaaaataagaaatgcacacgaataaatggaaataatggaatgactatgtaatgttgttattacatttagatctttcacaatgggagttttaagtcctgaagtgatttcttttgcattgtacaaaactttgacctcgccatttcttaaatccttcagcgtgacacttctgcatcaagaattaaaaatacaaagcaatagttatgatcatgatattattttaaatgataatgagaaacaagatactaatagttgaaaacaactatttatacacacttatcccattgcccattgatctcaaatagttgtctattagaagaggaatcaaatatcttcctttgattgttctaggagttcctctaagtcctaaaaatgattttcctccaaaggttaactcagcttcaagacctgtttcatggcatcttagctcactacctccccactcaactcctggtggaaagaatttgaataaaaggcttggggagttcatcacataagtctctccatgattcataagcttcacctctctttgtcctcgcatcttagcttctattaaagtacctgcaaccaaattcattattcattgtaaaagcattttccttctaatagatcttcccaaatatgttcaatttgtatattataattaacaaaaagtattaatgaaatttataatatatttttataaaaataatatcactcatgattttattaaaattctacttaaaaataataaaacgaaaaaaaagcatgtattaacaaatttatttaaaaattcgataaacttgttaaaaatacaaataaagaaacatgatctattatttaattttaataaagactaaattaaagtaacactttttgttttattttgttatttttttttgttttaaatttaatgcacacaagttagtgttttattataaattttatacatatatatatagtatttttcaatggataatactaattgatgagaattttttaaaaataactattttaaaaatattaatttttagaatgagattttaatctaataactgataaaaaatgaaaaattaatatcacagatacaaacaaacttgaggagaaaaccacgatcctaaagccctgggaacttagcccaacgcctagggtgccctggtgctgggtcgagcacgcaagttaacaatcaacctagtgcactggttttgatcattcaaatgtaaataatgctccaagcattctcatcaaaatggttaaaaatgaggtaggagacctcttcttgaagttctagaactttggaagaatcaaaacgacatcccaaaagctctgaagtaagcaccaagcacccaggttgacaaatggcctagtgcgctgggttctgcttctaattttgtttcaattgttcgtcttgtttttttacaataactgagagacatgaagtcagaatagccaaattcaacacttcatattttcacatttttaataaggtgatttactcaaaaattgagtagttttgagtctcttgttttcgcagaataacaacatctttgagagttgatgaccagcttcgccaaaatacaaaaatggactaagtgatatcaaaatatcacttagacatcaaaaaatacataccctgcacgttataccactcacccaacatccaagtcaacatcacatgtcaacctaggcactaggatgtcaacctgggcattgagcccagaacaactttcagtaaaatggccataactccctcaataattattcgatggacactattcaacttgagttttgaagctatttcaatgctttatctagtcatgtctcagatatcaattgtaattctgaagttatctactctaaattttacccccaagggagttacaaatttaagctacaccttacccagagcgagttccgccatcgcaactcaaactcaaaaaattgttgataaacgtcaaaagttattttttaccattagattatcatcta

SEQ ID NO: 298213 - DNA, 2567 bp, Cannabis indica
ttaaataaaactaacactacatggcttggcacgtaacaatcacctagtatatatatatttctcaaaaaaaatttaagaggcgactaccctctcgctttttctgtatgaatctgtccatacatgtatctgttacactaaaaaaaatgaagtagttttgtcccaataatatctttttaagtatttatcgaacttacaaaattttgagtagtttctcaagtgcatgtataaatatataaggtgggaagataatgaaaatgttaaattagaaaaactattccttttaatagaataaattctttaattagaaactcaaaagaatactataaaaaaaatagacataaaacagacttcttttaaataggggaaataaataaattattttgtacattttgatcttaacgttgtcacatgcaagtgcatgtgaagggattattcctgtctaatttgttgttctttcaagaaaaaaaaaaaaaagattttaaccgaggctgtaaaaaagtgaaaactactttgttattggtaacatgaagattcacatggtgacaaagttgagtaatttaaggaagatggtacgactttaaggtgttaaaccaagattaatgtgacttgattttgcgttacatttgcttattaaactatcccaacacaacttaaacttaagatatatgttatatacaattagggccgcatttggaagtatctagaattgagtttaattgagagttattaccaggtttaacttcaattaagtaattacacactaattatataattggaagtaattaagaggtttcaattacactctctaattcttatgacctatataaaaattgaatataattatataacattactatttttaaattattaatattattacaccatgtaattactaatttatttacaaataaaaattcatatgtaattattgcatgacatctaaataaatattatattttaaaatattgtaaagactaattaggatttttgacccctaactttaacatgtactaaatcatgcctcttggacttttaaagttattaaaaatgtcccatgaactattgagattgttggatttaatgatttttttttcttctatttttagtaaaaaaatctaacatggatgaaagttcaaaggccataatttagtacatgtcaaagttcgagtgtcatgatttggtagatatcaaaatatggggagcatgatttagcatataaacaattactgaaatagtaaaattgaataaaattagaaaaaagtccttaaatccaataatttcaatagtttaggagtattttaacgaccttaaaagttcagggatatgatttagtacatgttaaagttcaggggacaaaaatcttaattagccattgtataattattaccctgataattatactatcttataagtaaacacttgcttccaaacacaatttcataattttaacctactctcaattaggttttccatatggaataggggattgatgattcatggtggcttgctcttctcatctttttgaccgtttgctttggtggtggcacattttccttgttctcgatctttccaatggtgggcttgatatattttcattcggaagcccaattttagatgcttatttagacttttagactaggttggttgaaattgttcttttgtattttatgcttaaatagattatgtcaattcacataacaatcaaatattttatttttttaccaaattattgtgtttattttgagagtgtgtaaaataaatgcgtgttatgtattgtatttcttttgtcacctttagactaatttaaagtttagttttctaatttttatttaaaaattaagatagcatttagtaacacttttattttttaatattttaatcacaaaaaagaaaatagaatttttatttttaaaaaacaaaattgtattttataactacttttgttttttaattttaaaaacaaaactatattccataactacttttaatttttaattttaacaacaaaaataaaaaatgtgtttcataactattatattacgggtctaggttcaggtctgggatttggatttggggttcggattcagggctgggtttgagtctaggtccagggtcaggttccaggtttgggtctgggtttaggtctggctcgtcggtctggggttcggggtctaagtccagggtttgagtcgaggatcgaggacgaggatcagggtccagtctataggacaagggtctgtgtccgtgtccggtgatgcgcttgggtctgggtcagagtttagggtcccgatccaaatcgggggttcgggtcccaattgagggttaaggtacgagttgaggggctaggtttggccatggtccaagttaggggtttgggtccgggttcgagtcgtggtccgtggctaggatccaggatcgaattcggtgccgggaccaggttcgagttcaagttcgggtccgagtctgaggttagggtctactctagttctaaaatattaatgatagaaaatacaaatatattataattaaataaaaaaaaactatttaaataaatttgaaaaatattt

SEQ ID NO: 298214 - DNA, 2475 bp, Cannabis indica
aataataataataataagaatagggccttgcaccaaattagttgaggcttttatataactttaatcaatcttgaaatgtgaactttaatgtaattgtaagtcaattaattaatgatatgaacgtgtaagaaactcattaatttgctttttcaaaaaaggccaaactcgtcccacttcaactcaccttgtctttttatcaactcacattgagatcaacatatgtattgcattgcattgcatgattgaaaaggtgatgagaacatctatgcatgcatggaattccagtcaaactttcttatcaagtggtagtccaacaatcaaagggtccaaagagattgaacatatatatataaatataaatatagtatgttttagacatttcaagaaattattataattatagtaaatatttcactttgaaaaattctaaataagttataatgtaaaaaatagagtagttggacatatgaattaaaaaatttaaacgttattttcgacattataaattattttaaatattttgaaaacagatagattatcttttataactacaacatacatataattttaaagaattacatcatatactattttttatttttattttttttaaatttacaatttgggttgctaggctagtttctatgtaaattttaattacgatttaagttgctttataggttgctatgtagattttcgtaaaaatacaaaaaaaaattattttaaactgtaaaaatgaaaaaacgcttctaatttttctaaatgctataaatagacctatcagtatgaacaaaagtgatgtccctattataaaactttcctatatatatatatatataagcacattccagaagttaccaagtaaatactaaatatctcagcaacaactacccccaccattaccattaggagctgctagtcaaaagcatatatcagatcaaaaattattgctgctttctacttcatacacctccctttataaaaccccatcaaaccttaactcttcttccttagccttgttaacctcctcatctctattccctcttctctcttctctctttctctccatctgcaaatgtctataatatctgtaaaatctcctaaacactgtggcaaacaaggagtgaacgttgaaaaggcttacaagaagcttgtctgtgctggctctgctctattcactacaatcctctccataatactcttagtttggctaatccttcacccaacaaagcctgagttttcactcaaagaagctgatatttacctcttaaacctctcaaatgttaatctcctcaactcatcaatccaactcactctattctctaaaaacccgaatcagaaaattggtatttactacgacgagttacaagtttatgccacttacaaaggccaacagattactctttacacttctcttcctcctttctaccaaggacatgaagatactaatctcttatcagcttctctggtgggaattggcttacctgttgcaccttccttcggttatgaagtagagcgcgataagaatgttggaagattagttctgaatcttaaactcaatgcccgtcttcggtggaaggtaggaacttgggtctctggtaaataccggttgaatgtgaattgtgtcgctgttatggcttttggaccttctctttcgaccggtaagcaagggactcaatgttctacttcggtttgaaactaagaaaactaacttatagcaatcttcttcagtgagttttagtatgaattgtatattgttgttactagaaaagtgttcttgtgaattattattagtaactatttgatataacaaaagatagtaacaaaaaatattgtaagttaagaagaaagtttggttggattgtgacttttgtttttttatttcttctgactgaggataatgaaggatataggattgttttatgctttgttgagttttgctttggttttttggctatgaagatatgaaagagtgagtcaataagtgaaaggtttaatgatgaaagtgagattctaaagagaaaagttgataaaaaggaagaagattggttgctttcttggcaatgaaaattgttcaattttgcagttatatccctcatcttttcaataattaaaaagaaaagttttcttagtacctgcatcatgaccagattccttttgtatcaaaatattgcaacttgaatctttctctctttttcttgcctgttttgaaccacacccagaaaatgaaacttggtcatgtcatgatatgaatatactgaaatatactattctgttatatgttatactgatatagataagactcaaagttcaaatcaggatataaccatttctaattgtctttgaagaaaagtacagatgatcccatgttttaaatgaatgtttttcatcattacttgaaattcacaaataaaatatatggttagacttagaggtacacctgcaaacttctccacttagattcatttcatattt

SEQ ID NO: 298215 - DNA, 4283 bp, Cannabis indica
aatgcttgtgtttaggaaaattcacaaattccctttcccaaaagcctctgaaacatgctacactaagccacttcagcttattgtctcagatttatggggcccctccttcacaacatctcacaatggatataaatattacatccatttcatggatgcctactctaggtttacatggttatatctcttaaaatccaaatctgatgctgtcaaaacttttcagatttttaaaactgaagttgaattacagttaggtaccaaaatccaatcctttcaatccgattggggaggagaatatagggccttcactgactgtctaagagaagcaggaattgtccatagaaaaccttgtcccaccactcatgaacaaaacggtttagccgaaagaaaacaccgccatattgttgagaatggtctcactcttctagctcaagctaatctaccattacgattttgggatgaagcttttaggaccactgtctatatccacaacagacttcccaccacggttctttctttaaaatctcctattgaagtgctttttaacatatcacccgattactctaaattcaaggtctttggttgtgtttgttaccccaacattagaccttacaacaagcataagcttgaatttcggtctacaccatgcactttcataggatatagcttgaaccacaaaggctacaaatgccttgactcttcgggcagattgtatatctctcgtgatgtcatatttgatgagtctcagttcccaaatcttcacacagatcctataccaattgagtcatctgaatctcacacacttagccaaattccaatagccaataacaactatactgctgagtatctcttcccacatgatctccctactgtctctgctcaaaataatgctacaatccccactcacacacataccaaccctgctactcttccctctgtaactcagcaagtgtacaaccctgtaccaactcccacttctgcaatctcaccagaccctcctacaccatgtacagcagctacatcacctccctgccccacccagtcagccccaataatccctgctccacttgtttccctccctaataataacacacatcagatgcaaactcgcagtaaaagtggtattagaaagccaaaagctttccttgcaactcaggttccaacatctctcaaacaagctcttcaacaactaaaatggaacaatgccatggcagaggaaatccttgcactcaaacgaaacaaaacatacactctagtcaagttacctcctggcagaacagcaattgggtgcaagtgggtctatagaatcaaagaggactcagagggcaatgttactaaactcaaagcaaggcttgtagctaaaggcttccatcaacaaccagggtttgatttcacagaaacctttagcccagtggtgaagcctgtcactattagagttgttctcactcttgctttgtacaaaggttgggatatcaagcaattggatgtgaataatgcctttttgaatggggatttgcaagaggaagtgtacatgctccaaccacctgggtttgaagatcctaatgctcctgatttggtctgtaaattacacaaggccttgtatggcctcaaacaagcccctagagcctggtttgggaagcttcaccactgcctattatctcttggttttacctcatctaagtctgaccacagtctctttattagatacactcctctctctgtgacaatcattttagtgtatgttgatgatataatcatcacgggtagtgatccatctctaatctcttactacaccactgctttgaatgagaaattctctcttaaagacttaggacagctccacttctttcttggtattgaggtacaaaccacaccaacaggccttcatctgtctcaagggaaatatgttcgtgatttacttcataaagctgatatgacagatgcaaaaccctgcaatacacccatggtaagtggccttaaactctcagcttttggcagtcctcctgttgacaatgctctacaatatcgatccatagttggtgctctccaataccttgtcatcactagacctgaaataagtttcagtgtcaacaaggtatgccaattcatggctaatcccttacaaacacactggctggcagtcaaatgcatcttgcgttatctcagtggcacaatcgactatggaatccatctcaccaaaccagaatctcttgagcttactgcgttttgtgatgccgattgggccacggatcctgatgattgaagatccacctcgggttttgccatttttcttggtccaaatatcattgcttggcaatgcaaaaagcaacacacagtttctcgaagcagtactgaggcagagtttcgaagccttgcactcactgtaactgaactcacatggcttcactcactgctcactgaacttcacctcactctgcctcgaccaccaactgtatggtgcgataatctgagcacagttcttctcactgctaatccaattttacatgcccgcaccaaacacatagaattggatctctattttgttcgtgagaagatacttcagcaactggtacaagtgaaacatgtcccagctattgatcaagttgctgatggcctaacaaagtctatctccagccaacggttctcatcttttcgtcacaaacttaccattggtgatcctacctatgctaagtttgagggggcgtgttgggacaagactgttaggagttagttaggatggtagttattttcggttgctacctaccattctgttattcccacatgttgtatctctttctctagtgttttacacatgtatataaactttgtactgctcagatttatcaataagagatttctttctctcttctctctttctctcttttcctctgcctttctttgtctttcttgttcctctgttttcttgttcatgttttcatggctaagaggttgaatacctctcacacagattgactatctgaatacataattgccttgcctttcatcaaactcggttcttttaaaattcatttgatctaaacagctttcttgaatgcttcaattattgtcatgaactctgcttctattgttgataaggctaccactaattgaaattgagatttccaactaatgtagcatgtatataattacaacagtagcttgttatagaccttttggcgtctttgtttaattccaaaggattttatcttttctgtcaaggattttcactggttgcttctcataactcaacatatgtgggggatggaggtgtatttctgtagcatagaaatataaaatacattatgaactactggcaatgctgaaggcaaggctagacgataagcaactaatccaaccttatcgagaatctcaaaaggccttgtaaatctaggacataacttgcccttctttccgaaatatttaaccccattcatagaagaaacctgcaagaatacatgatctcctacctaaaactctatatttctgtgtttcaaatctgcataactctttttcctactctgggaggcaagcatcctgactttgatcttctctaatgtctcattagtctgctgaactgattctggacccagatactttcgttttccagtttcatcccagtgaattagagatctacattttataccatacaatatttcgtaaggaaccatccctatggtactctgatagctattattgtatgaaaattttatcagtggcaaatacttactccagtagtcttcaaaatctatcacacaggctcgtaacatatcttctaatatcttgattgtcctctcggactgaccatctgtctgagaatagaaagttgtactgaacttcaagttcgtacccatttctcgctggagacttgcccagaactttagcttcaacccgttcaaggtgaacgagcaagtttgcatgacgttctacatgtggtcgggttcgagtctaacccgacccacctggaccttttttcatttatatatatttatctaaactttaataataatacaagtttacactttacatacattgaacctcaaatatattaatattaatatgtattaattattccaaaaaaagaaaaagttacattatataatatatactatacgagcattcagtttttgcatgtgttgaaagcttatatgtatatttcattaaattaaatggtttagttatatatttataaataagggtgattattcaatggttacatttttattgtaaccatgtggttacatttttttttttacctataatagaaagttaccaataagtaaaaattc

SEQ ID NO: 298216 - DNA, 2968 bp, Cannabis indica
tgtaattaattaattaataactaaagtaatattacttttgtgaaagaaaaccttggacatgcgcataaaaattagccttaggtgggtggatcatgatatatatacatatcactattaattgtcaatgtttagaataacaattaaataataatagtacattgaaaatgattaattaattaattaattaattaattattagtttaattatagtactggtagaacgtggtggtgggtacctctctctcggatttgatctcaacattagagtactgttaattacttttcttgtgcccgtagatgactttaaatttagtcgttgatcttatcgttgttgaaataatcaaattcaatatttaccattattatattttaatctcaattaaaaggccaacgaaagacgacaaactttgcacgggtttattaattagctaaactaggtttccgttggagttaatcatttataatttaatatatatttattttaaagatgccaagtaattattatcattaattaattgattataataattagtcaaatcttaagccaaatcaattgtttaggttatgtcatacatatatatatataatatatatatatatttatatagcttagtagctagctagcaattggctcgatgaagtttgaatactaattaagcgttttgagagagccaaattggattgatatttatagacaatgtataggtcaactttaattgtatatgtatttatgagtataattattaacttgccttagatattaaattaattgagtagtaagtatttgatttggtcatgttggacttgaattaattgttgtaggtggtgacctatttatgttttgattgagttggcaatttaaggttagatattgtcggttcttcacaatccgtgtgaaaggtctttatatcttaaattattaaaaattatgtgatcaataattattagagtaaaaagtggaaatgtataagcttaattcttttatttttatattttttttttactttgttgataattcttttaaataataatttaagtttgaagtttttaataaactgactgaaattcttgattaattattgtctgaaactcttgatggggctggtagagagtgtgtcggacgctattttgcaaaatattatgaaaattaggacaaagtgtagaataattttttattaataaataaatatataaaaaatatatattctactcaaagcacaatatgagaaatctacctataatttacctttgactaaatatgcatatttgagagggtcgattatatataaattcaagttcaattgaaaattaatataaaattgaagttattgatctaatcatgattgaccaaagacttttaattaatttgttaatatattgagatatattttggtcaaattgaagtcatataatatcatcggagagtgcaatggagacataagtttaattgttcatttatttattcctcaatttttatctagttggaaaacgtatttttatatataattagttaattcatataaattaaaggtctactaaaattatttaaaaagatattaatatatctattatctttctgttatgttcttacctactcgtccatttgtatgcaaccaaaagttgaatccgtattggtcaagcttccttagcacaatttgtaaaaagagcaaagttaagaagatattatcaaaggggggggatcctaagcctattgaaggtctttgttgaaaattttctattcacaatacagtacatatcataggctcaagatttaaagggaaatacattaaagtaaaactaatgataaatcagcattgatatatagataatagaatcagtgttgataataacactttaaatttcttgtacataaaattaaaagaggtatttgtattagatttcttatttaatttcaaaaggagaaaacaagtatagaagacatagagtagttggataacagtataacttgttagttgtactatgattgttatcagttgcaaaaagtgaaatatttgtaataaaattctattacttatcaaaaaaaaaaaagtaaaaataacttaataatagattcgccagaagaaataatgttaatttggggcaacatttttatcgcaaaaaatcaaaaattttatcattaaaggtatttgtaccaacattttgtcgctaaaaatttgtggaaaatacattagtgttgttatgttatttgtggcaatagttatgttgctaataagatactaaaagtatgtcgttgttaatatgtcattttatgataacttttattgtcgctgcaaaaaagcctagtatttatggtgactaattggggcgacttctcgcaagttgcagccaaaaaaaggtccttttaccgtacgtactccttttttcaaatggaatatttgaatttgacgctgcaaatagtcctcatgtcgtcaaaaataaataactcttagtcgtatttgctacttattaatttgtggcgacatatttgaagttatctcgcaaaaaaaaaaaaaaagaattaccacctgcaaacagaaaaaaaagggtgaaatcgtagaaaataaagggggaggagagagagagagagaggaaaggaaaacaaaagagcttctagggctagcgatgggcgagacaaaaaaagagagagagaagaaaaaatcataccttctagtgctgacggtgggcaagacaaagaaagataagaagagaaacatagaggttttttagattagtgaggtggctatgtataagttaggattttatagggttttattaaggatattgtaataaatggccttaaatctcacattgatgaaagttaatgtctctttgtttttaaaaatgaagtaaatagccttttataaatgttaatacctaaaatgcctttggttatatagatgaagctcaactccattattttcaatttgttttactgtttgcgcggtaaaaaaaaaataatataccacca

SEQ ID NO: 298217 - DNA, 2412 bp, Cannabis indica
aaaaaatagtttaggtgtgtttggataaagtcctttttctaatttaaaagtcatttttgaagaagctatgacttttagcttcttccaaaaagacttttgagaaactacttttaaaattaaaataatctatataattcttaatttactcagaaaagattttttttaatgatatccaaatattttaaaaattaatatttattaaaaaaagatatttatataataattatacaaaaacggtaaaaaaataaaataaaacttatacttatcttatacttctagatataaacaaaagtaaaagcttaatcaaacagggtcaatatgccaagcacatgttagagggtagttttataaaaggattaaaggaggtcataaggtggacctacataaagcccagggaggacttaagcccttcctcaatttttaaacaaattatataaaattagaggtagaaataatatataatttttagatatcataattggtgtaagtgttcattctttacttggtaggtatggttttgaatataattcactcaactctatcttctgtttttatttatatataaatatattattttgaagaaaaaaaaaattacaaagtattgagatagagtattcaaactacaaataattttctataggaaaaaacttattatataataaattattttaaattacatttgatctataattaatatatacaagtttcaaaaaaaattaaataaaaaaaagaattgtagaatctcatattattatttagatgctaaaatttgttccaatctatataataacttcatttaagaaaatttaattaacccgcactaaaattatatcgtgggtctaccactaaagtggggatcttcacatcctttaacttgtgagtttggcttccacaatagtgcattttctctcatattctcttatttattacgtgttgtcgtaacatattgatataaaaatccctatcaaagtttttggaataaaaaaaatcatcaaaattgacaagttcataatggctaataattttacgtacctatggagaatcaatatgattgcatgtaagcaataaataaaactattgggaactcagagatgacatgaacaaactatgcaaatatgaggttgaggcaacaactctcactgcaatcttgcttattagttagggagatgaagtgttgagagaagattaactcagagatgacatgaacaaactatgcaaatatgaggttgaggcaacaactctcactgcaatcttgcttattagttagggagatgaagtgttgagagaagatttgaaggagaagacactcatgaattgtggaacaattgtaagcttccatttacatgatgaaatccttgttgtaagaagctacatttaaagaataaattatacactacaaataaatggcacaaaagagttttgcaaacatctcgatgactttaaaaaaaaaatctttgatcgaaataacattggtgtataattaattaacttgaggatgactattaaaaaattatctttggtgaaaaaactttagtcacaatataattttttgtgattaaatatgacttttagtcacaacaaaaaattacttgtggctaaaatattgtattttgatacaggttgtcactaatttagtttagtcaaaaaaaatattatgataaaaaaatacatttagcaacaacaatttgtgatttttgtgattaatatctctagcgacaaaccttttagtcagaaatatgaatgataatttataattagtcataattttttaatttttagtccacaaattttattgtgactaaaactaaaaaaatttatagtgccgaactattaacttatataggtgtaaaaacattttctttctaaacaatgaaatttgtgtataagctttttgtggacataatacttctgaaaaatatatacatacacacattattatgtccctactttcatatccatctatttacttttatatcttatcaaaaatcttaaggaattcacaatgattattacacctcattaaaccatcaccattacaataagttagaaattaagagataaaaaaaaggataatcccacattaaaagttcgattataaaagacaactttgattatgtattaataacgggatcagctagagctactaactagctagaaatctaatgctgcatacgtataactgatgcaagccaagccaattttcttgctccaaaaataaatggctatacaaaaataaacacatgcatggaagcaagcacatttagtggtgtgtagtcatatttatgtcatatgtataagagattcatggttaaagccaccataaattattattaatgtaatcataattaatatatgtgagaaattgagctttctataagattttaagtaggggtggacatcatccaatccaat

SEQ ID NO: 298218 - DNA, 3062 bp, Cannabis indica
ccaaagtacagttgagtcccacttattttttttatttaagagagcttttagattagtgaaaaaaaggaatagaactgaagtaaaagctcagccatacacaattgaaaaaaaaacagtgtcagctaagccattgttatcagagcttaagaagatgccaaacaccaggttctccggttctgtttcgagccccgatgtgtctgttaccatcgatatggggcacccttttctcaatcacaccgttgatggatttttgaagatcggagccgtatgcacatacatgtcattttgattttaatttttgagaataatgtttttggattatttgatgtttgggtttgattggtgtttttttttgttttgtgtgttagattgcagctaccagagctgtagctgaggatgttttccatgtcgtcaagaaaggtatatccctatctaatgctatctttttcaatttttattgtcttacattttttcttttttatgtttttccatgataaaatgtgagcaaaattacatctttggaaaagtaattatgaaaacgaactggtgtttttgggttcgaaattcacatcactagtggcttagtgtactgattgattttgggatgaatgataaaagttcgagcttttttgtgcagggagtatttccaagggaaatgttgagcacactgtaagtactttttatcccgtaattcatatcatgtattatatatattttgtcaaaaaattgtaactttctaaatctaggttttccgaggattctcatttattttttaaaatttagttgccaaataaagctttttaacttgttttcagccattcaagtttggtgtctttctatccttttctttcaaaatccaaacctataacggcttgtctagattcgactgagcactttcaataatgccaaaataattttcacttaaagaaagaataattattcctaatatgttgattattaatttcgatttgcatgttagtaaactagtagttttattggtcaaatagtcaaaaacacaaagtcatacttgtacaatattctctccttcaattaataatactactaatactttggttgcagttgaagaaaatgtgtaaagaaggagcatactggggtaagtcaaaagtgtttaattacataattatagtttgcattagaaaataatattttcgactactattaaagaagttgacaaattctttcaccccactcacaggaactgtagctggagtttatgtgggaatggattatggtatagagagagtccgtggcactagagactgggtacttatcttcatggatagctatttcttatcatttttggaatagtcttttcttctattttaaaatagaatagtcattccactgaaatggtagaatggccattttattggaatttccattccatttcattagtctttgcccttggctgcaaactcttcagttcataattctacttatatatgaatctttgctaatgataagagcttcaacattcagattatgtcatttcaattttcgggtatgaacttttgtcctcatcagtcccttttttttctcctttgaatattgcagaagaatgccatgattggaggggcactaacaggagctttagtatccatagccaccagtcaagacaaggacaaaattgttattaatgccataacaggaggtgctatagcaactgcttcagaatttatcaactacctcacctgaaatattggaagccatacgctatccggtctttatgttatgattctgaagaacaatgttgttattttgtttaatttttcaggttcaacaagaataagtagtgtgttgaattctggatgttgaatgtaaacattgtcgtatctgacccaatttgatatctagatattcttccctgcaaaacagctatttttatggtatgaaaatctctagttatatatatgatcataaaatgaggattttatccaccaaggtaaacatttaaaactcaaattagagaaattaaactcaagtcacagaacagagaacaagaagaagaagaaaaaaatatcatatgctagaagaaatatctgtactccgatattatggaaatattgaagaaattttctattattctgtatcgactgaaatttctagaaaatccttctatactacagacatttgccaaaatacaaaaaaatctgaaaaaatacaaaagcattcattacgttcttttaggtatttatcgatatagatatagataaattacttcccaaactttgtagtaatagtaaaatacagtatatgtaaaatatgtataaatgataaaaatatttttaaaagaagatattcatctattatttctgagatttctttttatatagctgtttatttgttttttttcattgctgtttgtatcactatcaatccaaccgatatagtagatgcatcgataacattatccatattcgagatttttcttgacaatcaatttgatatttggttgaatttgaaaggtatttttttttttctttctcatggtattttagagaaaatttgatcgaaagtaacaatattttaatgctcgcatacgattattaagttgatgaaattgttgtagggatcttacataaatagtcatgttttcacatctttaaaataagtagacaaactattctaaaacaacttaacaaaaacatgaaaattactataaaataacaaaaaagcaatagaaaaataacaaaacattgatctaattgcaatatgcaaaacaatatcaatttttttttgtattacgatttttttacttaatttttatttttttttcatgaaatttgtttttacaaattcatactttcaatatgtttttttgtttaattttgaactagtcacagttaaaatgataatttattttgtaaagttaaataaatagttacattaataatagaaataataaaattttataatttcaaaatagatatataatataatgactaatatataattaataggggctttttcatttttacatttcaaaacaattttttttgtatttttacgtaattctacatgaaaacccttattgcaactag

SEQ ID NO: 298219 - DNA, 4688 bp, Cannabis indica
gagagaaaaagagctaaagatcttgagaggaataggcaaaggagtttagaaaattatcagacaggattttatgactttgatgtgtacaatgatttgggaaacccagataagtcaactgaattagctcgtcctaaacttggtggtaaagaaatcccatatcctagacggtgtcgtactggtcgtctccctactgatactggtaaccatattaacacatgttttcatttttcataatgaatgaattaatatattcacttgtttagtcttggccaaaatgtgaaacttataattataacattggccttgtagatttgcaagcagagagtagaatcgagaagccattccctttgtatgtgccaagagatgaacaatttgaggagtcaaaacaggccagtttctcatttgggagactgaaagcagtgttgcataatttaataccttccttaaaggctagcttttcagctgaaaaccaagaattcagtggttttgctgacattgataacctttatagtgaaggtatactactcaaattgggtgtgcaagaagaacttctcaagaagctacctttgaatttggttacccgaatccaacaaaataaaggcatactcaaatatgacactcctaaaattatttcaagtgagtgtaacaaacaaaagccaaagcactattactgttgaataaaatgttcatatgggtactaactagttcttcttgatttacagaggataaatttgcttggctgagggacgatgaatttgctcgtcaagcgatcgcgggggttaatccggtctccatagagagaatgactgtttttccaccagtgagcaagcttgaccctgaaatttatggaccccaagagtctgctcttaaagatgagcatattcttggccatctcaatggcatgacagtccagcaggtacattaatatattttatttattttttttctaattaatatcaccttttacattatattcttcctttgctaattaatatttttgttctcgacacaggccttggatgaaaagaagctattcatggtggattatcatgacatattccttccattccttgacaagatcaactcactcgatggtcgaagaacctacgctactcgaaccatttatttcctatcaccccaaggcacccttaagcctgtagccatagagcttagcctcccacaaaccggaccaagttcccggtctaagcgtgtggtgacaccacctgtggatgccacctccaattgggtgtggcagcttgccaaggctcacgtttgcactaacgatgccggagtccatcaactagtaaaccattggtgagcactacttccatagtcagaccttcacttgtgttgtttttatttggtcaaagctatcgataatttataaacgacaatgtgttatgttatgttacaggttacgtacgcatgctagccttgaaccgtttatattgtccgcacataggcaaatgagcgcaatgcatcccatatacaagcttttggatcctcacatgagatatactctggagatcaatgctttggcacgacagaatcttatcaacgccgatggcgtcattgaggcttgtttcacagccggtcgctacggcatggaaatcagtgctgctgcttacaaaagcatgtggcgttttgaccaggaaaatctccctgccgatttggttcgaaggtatatatttatcattctcacaaaaaacttgtatatttttcttaataaagcgtaggacgtaattagtgtggttgttggaacagagtactaaaacagagatattgaaacatggtcattttcgaaaaacaaaactgggacccttatctatgatgatgtagtaaaaggtgtagaccaaacaatagtcatacaatgaatctaatttaagatctgttttgtttctttttgcagaggaatggctgttcctgaccccacacagccacatggtgtgaaggttgtaatagaagattacccatatgccaacgacggactcttgatatggggcgcaattgagaactgggtcagcacctatgtcaaccgatactacccaaattcaagcgtggtttgtaacgacttggagttgcagaactggtacagtgagtccatcaatgtgggccacgccgatgttaggaatgaaagttggtggcccaagctagagactcctgaggatctaacttctatcctcactaccctcatttggcttgcctcagcccaacatgcagcccttaattttgggcagtacccatatggtggctacgttcctaaccgcccaccactaatgaggagattgatccctgaagagaatgatccagagtatgccacttttgttgctgaccctcagaaatacttccttttagcattgccttctgtgttacaatccacaaaatttatggctgtggttgacactctctctactcattcgcctgacgaggagtacattggggagcgacaacagccatcgatttggtctggtgatcccgagattgtggaggcgttttacgagttctcagctcaggtgaaaaatattgaaaaggaaattgagagaaggaacaatgatccaagccttagaaataggtgtggagctggggtgttaccttatgaactacttgcccctagctctgaacctggtgtaacatgtagaggtgtgccaaacagtgtttccatatgatcatatcttccaagactggagcatcttttcagtgaaaacaatatttagtaaagaattgtttatggggagatacctcaaaatctgtatgaagattaattgagtttgctctttgatctggttattacttaggggttttgtatagggtgtagtatagagatcagtttaatggagattcaagtacatagtaatgaaacttgacggtcgtctttttgtaatcccgtgaacttttttttttttctcacactcctttctttgctatattcattttctgtagttaatataacatgaaattccagtatagttgtatgcaaattatatggtaagcaagattgtactggattatgcagagaggattggacttgtaaacaatgttatgtttttggtaaattatgggattaagtactaaacacgtaatgttatatttggtgaatgaataataggaacaaaaagctgtagaaaaaataaattcaataaacatacagagtcatattgggagaagatggtgaacaacattttagaaagaaggggtaggagaacaagatattattattaggcacttattgtcactagtaaattagtaaactaatttgatgtgttcaatatacattttttttatggaataattgatctaattttatttcattcttctcaattgtggacatagtcctacatggaataaatgctcaaaattcacatagatcttggggatctgttgaaacaacagtgtgggagaaaaaaatttctatcaccacagaacaaatctttggttgggttttaataattggggattataaaagcaaattaaggtatgagtcgtttttcctcacctttaatttataaattaaagtcttaaggttcgagctcatatatatatggtgttcttgaatttgagcttttatgatcatgtttatggtgaattgaatttagagtagtgttttaaagcatgaaatctgaattgaagtatttagctttttcttttgagcattatttgagcttgttaacagctgatgcttgtgtttcaagctcttgaaatatgaaaaataatatttgtgtaataagtttgattggatagtttaaagctttaatttttttgtgtgctaataagtgtagttatcttcatgctctaataagtttgattattggagcatgaagataactactatattttatgtgagcattatactttttttgggcttagaaactatgcataacaaatttaattgagtgagattgatattgtattttgggtgtagagtttggtacttttttggagctcaaaatctgatttattggatttttaatttaggagccgcaacccaatacgtttagcaatgccaaaattttatgaaacttgctttggccataattttgactccgaactctattttggacatttttatactgttatttattttaattaataaatgttgaaattcaatagtgtgatacaattataatcactgatatgtttcctttgtacacctaattaattaagtaccacaaaattaacactggggtcccgattcaagactgatcgagaccgaggcctgaaacttgggccagagctgactccgagtccaaatgtggggtccgtggtcaaggcttggttttaagtccgtgttgagggccggatctaaaatattgatgaaataaaatgcaaacatatcataaatcaaaaaatatatataacttttggcgactaaaaaacctcttaactatcattctacattcattttaccttctaagtttattagaattactataatttaaatattttactaataatttatgaaaatattgttgaagctctgcaatatatatatatatatatatatattagtaattaactcaaaaataaatatgaaaaaaaaaataaaaatgaattcgagctcgaatattaaaacgggccagaatgagtaaagtactacatgaatttgagcacggctcgaaaacactaggcctacgaggcggagccaggacctaattactaggggggccaactattaatttttatttgaaaaa

SEQ ID NO: 298220 - DNA, 1900 bp, Cannabis indica
ttttaaactagttggtttatgtgtgtctgattctaatgtctaactccaataacgactctaacgttcaataccgttgacaagtctgatgtctaactacggtgactttacggtagcgacaacaattttgaagacttttttaatgaatgataataattccaacaaatattctcattctattttctatctttttgttgctaatattttattttcgtaaatagtgaatgttttgggtggtaagttaatgttaaaatctaggagcttctcaaaagtagtttgtagctaattttagttttaattgtattggttttagttttaatagagggttgaaagtcgggatttaaagtttttaagaagaatataaaatttatatataagttttggtacgtaattggttttttattgaaaaactgatttttccattaaataattgatgttgattatataactagtttattaatttattatctaccaaaattgcttttattattgtttaattttttgtagttttacgtcaaaaaaaaattataatttgtttttgttatataaaaaaacagtggttacctttgaaattattttttctttattttagtgtttaatatttttttcaaaaaaaaaaggaagaagaaaaggacacaattttaatattttttatggcattcctcttcatttttatttgtaatgatttttcttatatttttaatcatattaagtgcaattaaatttacaacttatatatattaaaatttattttttttatactttaaaaagagatataaagtatattattaaaaagtcgatttctaatactctctttgttagggtttgtttttcctcccttggtctctcttagggtttctctgttactgtgggagccgccggccagatctgggctggtggcgccccggtaccttgcctctttccgttctcatgcaaagttgaaggtcccaaaggttggggttcgtggttggatggtgtatgtcagtgttaggttacgcatcttgggttcagttctgtcgtacctggttttttaggcgagtggtcaccgttcttggtggctgggcatctctggtgagatgcctattgtccttggtcggggattgtaaatggagtcaacttttcgtgctgcaagctagctatggcggtggccttttggcagccatcttcctctcacttttggggttggcattctacgatgttcttttttaggcatgtgctttggccttggtggggtgctgctcttccttttctcttagttctcgggttacttccttgggttactttttaggcgtccttgctctggtacacaatggcttgttatgagctttcagagtcttgtagatgtagaagggggattggggtttaccccaaagggatgtgttttccttgtcccatcactttcactgttcagaaccattataggaggtcgagtgtggttgtttctcgtcgaatgttggcagtgctccgaggcttgtgttttgccttctcgggcttgcattttgcctcctgtgtgttaggaggatggttgttgaggttgttctatctttgttcttgttttttttttttgagttttaagtttgtttaagttgtttcggtgtgatgcaccttatgtccttaataggtctttttggggtgtttgtctctttttatgttcttgcgtgagctttgagcttaatgctcctttcgaatcggtgtagttggccgacagttgttatcttctagtgagatcgcgatttatctgctggacttgttaaataaagttttcatttaaaaaaaaaagcatatttttttttcaattttttttaaatagcccttattattaagtgaatgccgttgtaacaccctaactaacataggcgtattacgtgatttttaaacatgttgtgcagctcgttgctaatca

SEQ ID NO: 298221 - DNA, 1882 bp, Cannabis indica
gatgctatggtatgacattcttttgtggcattttttttcatttcaatggtaaaatatcaattaaaaaatactaaaaatatattcatctcataagtattcttcattgcatctctattggagatgctcttagtatgtacaaaaagaaaaagcaatgctcgactaataaacttgttcttctctaatttcaaaaataaaaaaaaaactttttcgtctctattatttttaatgatatatatttttcacataagttattattagtttaaaatatgctaccataatactatttttttttttttgctaggatactaataataatatttacaactacctgttactttctaatgagttttaaatgaataattctctactctccatcgtcctctcaaagtcggacttaaaattattcgtactatgtggtcaatttggatggacagggaaccaagtggtacatggacacaaaccaaaaaaatgcttgtttctcataatctttttctgatccagttcgatatgtagctcggaatcttattctagtagtacgagtttttttggaagccaccaaacgctgaaggactgatgctacttagtataggacattctcacatcttggagcttggtcaattgttctcgaccacactaaacatgtagttagttgtggcactgtcaaggttgggcttgggcgcgagctagacctgcacgtaagcccacccaatctagagggtgaaaacaaaaaatatatattatttttacaataaaagaaaaaatctcattaaatcaaccaacaccattacaaccaaagtttaaataagctcaaatcaaagaaattttactatttacaacattaattatgtatttatttttgggggataatttccttctaactaagcaacccaatctaacttttatagtatacttaattaagtcatttacatgcttaacagtataagaactaagctaaaaaacacataaaattctattaatctagatgaaatagacaatcgtgccataacaaccatcaaaacctattgttgtaagctagaaccaagttgcccaatccaattcttccaatctgaaaagacaattggccaggtggtgaaaccaagccacttatgaaccttgcacatcaacccaacagagaaccggtaaagaaaaaaaataaatgatcatgactctctaaagaattcatgaaaaatttgacataatggagtagggatggagagatgcaccctataaagcttatctctatttatcaattgagagttaccatctcttacagaatgaatctgtatttggaaattgaaaaaataaaatattttctttttaaaaaatatatatatattttaatagtttttgaaaataccacattttttttttaaaaataaagtacttaataaattttttttcttaaaactcacccaatctcaaagtcggtcttaggcattatcaaagccttttattggatgctatcaccctcatgaaatggaagctaaaatattgtttcacaatctcaattgggctcgttagtcgatcggtttagtcaggttataatatatatttaccaacccaatataaatatcgggttacaaatatttaattgtaacacattcaattaaaaaattagaaaaagtttaacccgcccaatgattttatcggtttggtcgggttaatccgtccaaaccgttcttcactttttttttacaattattattcttagtttctaatttaaaaaattaaatttaaaaaaataaaatagattatttatatttcaagttaaaaaatgctgtagtctaaattaattttaaaaactttaatataagataaatataattgagtaaacacgaaataattgaataaaataataaaaaaaaagtaaataatattgtat

SEQ ID NO: 298222 - DNA, 4131 bp, Cannabis indica
acttcttcacttgaattttattagttgttagtgtcaaaggttttttgtaaggaattatccaaactaggtgaaagtgcaaaatgacttcaaaaaaagaggttatatgtactcacacagtctaagactaattagtgaaaataaatctcctttttaaatatgaggaaattacacattttatatgtttctatacaatatgtgtaaaaaacatgaccttttttttttttttaaaaaaaaacatatatatgggaaaaattagaaaaaaatttagccttaatttttttaaaaaaaattctcataaaataactttttttgaggaaaagctacatttgtgcaaccttgcctcaaaaaccataaaatccaattaatatctctttgcaaaataatttcttttgtaaatgacatttcaagataggtttttgagtgtgtgtggatggtcattttgtaaaaaaattatcaaaaagagactattatgcaaaatggttataaaaagaagcttttttttttttgggtcaaacacccctacaaaccaataggaatgtagatatttagttacatgttagatgaggagttggctagaatttctgctgagatttcaaccacaacctcttcccatccaagtggaattggttgatcctccaaaaaaggatagctgcaatgaaaacatagttaccccatataagttgaatcaatctaaattaatggctaaatttaacaaacttattatttaattatatgagtcacagtacttgtgagccttgcatgcttcaagggccatgattgcttttctaagattctgttttgatttgataccaatcttagctgcaaactccatagaaagatcaaattcttcctttcttgctatctgaatcagtacttccatgatctgacaaagtcaaaggaacataacacacaattagccttaattattagacaacaacatagttgttctgatatgatacttaacctcatgagttacaggagcattgactttgatagttttgcattgacttttgactgactcaattatctctgtatcatcttcacagcaaaggatgagtttacatgaatgtgagtaacagtcaaaaatccattttataagatgttggatggtgttatctgctgctttgtcaacatcataaagaactattactgagaacaaaaatggtaaaaaaaacatgttagtaataattacttgagaataataaatattagagaacaaagactactaccataaaagactaaaatatccctaaataattatttaacattcattcttaaactctgtgatgctgcagcaagaaacatcaaaagttcgcctacaagagaacgaaaaatgagtaattgtatgcgacttagtaaaaaaatcagtaagctgcaacgaagaaggaacaaaaggcaaaataatagtgcccaactttagattgtgatgagtaaaatgaaaattaatttcaatatgcttagtacattcatggaaaaccgagttatcagcaatttaaatgacgggcaaaagactaaaataaatttaaataattatttaacagttagaactaaaatttgtgttaaggggccaacttttctaagggaattgatcatttttctttcttcttcaaaagatcagacctttataatttgagctgagattagcaatgctgatttcgggtgcaactgtataatctttgacaatttctttaactaatcccatcagagcatacttagcatttgattccaagttcacattgagttccaaatggtgaggacttgatgttattggaacagccacttgcattggcctgttttcctatagacatatgatatgtactttatttaatgtcaaaccagttcaacataaaaaagcaatatatgaagtttttagtgtgttacctgaatctgaaagtatcttaaatcatgtgaaatctgcaaaacatgattagaaaatgaactcatcttagccattgaaaggttaaacagtggaaatttgattataaagaacatacattccaactctcatcgccatataattcgcgcagaagagccattgctaatgctttttttccagaaccagatggccccttcagcaaaatatggggacatatttcatctgacacctaaaatctcaaaagggaaaaaagttattcataagtaattttgataaaatatgccaaagggtaaatatcattttttttttcctctaaattatgactcttataaattgatgcaaataacccctgcaattacattttgcttattttcttaaaataatttatgcatgtaatattaatatgacgttaatctggttcaattaaagagtccaaacaaaaaatatatacataaataagagtcaattaatgagttatgataatatgtatgtgtaatcttagaactaatgattgtaggtttaatgctaataaactagatttcaactacaacatttaagcaaattgatttaaaaaatgagtagaatgtaactaaataagactatttgcattgatttttatatagttcattgagaatttttgcaataaataaaagttgggttgacaaaacatgggaaaatgtagagatatggtgagtggatcaatgaactgacttacaagttgtttgagaatttgagcttcttgtttatgcaaagtgaatccattcaatgaagcaggttgatacttatcagcccagaactgtctgagattttcaaccacataagctctctcaatgaataaggtctcattgaaagtagttcttggagttttgtcaggtgactttgaagtcctacaaggccctttcttcatacaaccaaaccatgtctccttctccttctgatgtttcttcttcctattagcagtgaaatttttcatgctctcagttgttttctcactcacatcactcagtttactactctcactactaaacttaccatttcctcctggcctacttgcagatgaagtagtaaagattgtagttgatgatgacttattatgatggtcaataacattattatttgctcttctcaagtgaggcacagaatctgatctttgagatactattttcggttttggacaaaaatggtttcctgaaccacctttctttttaggcaatgccaacacattccattctctagaaaagaatatatcacctggtgaaattgagtcagtactctcaaaatttgcagtgtgaagctttgcatagccagctctttcattgatttcgcctattgaaggcgccaccaccactttcgcttgatcaggaggaggaggaggaggagcttgtcttggtttcgaaaatggtgagattgttctctccttatctctctgccttactcttggagcacttactgatcttttgctcatgtaaattggtttcttattaacttcaacaaccttattagtttgctttctatatggatacataaacaactcatcatcatcatcatctttatccaaattatgctctaaatccaagacttgttcttctcttcttgatggcttataaggtgacttactgttgtgttgtcttctcttctctgcagcaccgaattcatacctcgaagagtgtcttcggcttagctttaaagggctaatgttgttccttggcttaacaaactccaaatgatcttcttcatcttttggcttattatgttcacgccatggactttcattgaaatctgtctcggtatcagacggttcataaccgctacgcctttgcttggacaacacgttattattagaattgttttgaaaatgaaaggccactctgctcccaccatgtaatctaggtgagttttgcatagttgcattacaaaaaaaaccaaatcaatataagttgaagtactatatactatatatagtcaaaacaaacacaaccccacttgatcaaaaatggttttgagatggatttaaacattggaaaagctcaaaagattgaacccttttaactttggtggattagactaaggctagctaacgatggttacaaagaaggagcattgttgtttgttacaaatgacagtgaaatttgagtaaaacgacaacgttttgtgctattatatctaagtaatccagctaatcataataaatttagaagaagtgaaaatttgtttttccagtgatttgtaagctggctttcgaggacttttttgtc

SEQ ID NO: 298223 - DNA, 3733 bp, Cannabis indica
tcaaagattgtttatgtattaaagtatgctcccaaactttgacatctaccaaatcatgctgctcgaactttgacatgtactaaatttttccctctaaactttcatccatgttagatttttttactaaaatagaaaaaaaaaaatccttaaatctaacaatctcaatagttcaggggacatttttaatgatcttaaagtttaggggacatgatttggtatatgtcaaagttcaggtggcaaaaatcctaattagtctaattttttttttaattactattacaaagtataatagtaatttttatttttatttaaatcactattatgccttcaaatttaaatgattatcactaaattgaatattattaattttaaaaatataatattataaaaaactaaaaattaaaataaaattaacaataagaacaagtaacatctatctacggtcactaattactaattagtatcctctttaactttaactactcttttttttccctcatcacttttggtagttatgtggaaattttcgaattgtttccttacccaacatatcgtctactggtgcactttgtgtgcagggcacctaagaaaggatgcactcacctttttttcctttttcttttcagaaaacactcactttacatctgaacaaatttagtcagtgaggctcctttttatcacactctcgactgtatattttttaatttcagctaatttgaaccttaccaaaaagaaaaagaaaaagaaaaaaaaaaagaagaagctaatttgaataacatattaaacaaaacctcacactgagtctgagtcaactcaaattaaacctcgcaaaatccccaacaccaaaaaaaaaaaaaaaatggaacccacgccaataaccattgtcaatcacgggcttgactctcaaacccatgacctctacgatgtccaggtcggcccgatcaccgtccgaaccctagtcaccatctccgcttccatggttgactcctggatcgaggacatcaagcgtatcaacaatcagagcctcggccatctcatcgttggcctcgacgtcgagtggcgaccttccttcaaccgctacgtcgagaaccccgtcgccataatacagctctgcgttggtccacgctgccttatctttcagctccttcacgccgattctgttccgagttctctggccgagttcctcggaaacgccgattacagcttcgtcggagtcggggttggagccgatgtagagaagctacttgtggactaccaattatctgtgcgaaagccggttgaattaggaaatctagcggcgaataagtacggggatcgaagtctgaagaatgcggggctgaaaaggttagctagttttgtgctgggaatgcagatcgagaagccgaagaggatcaccatgagtaggtgggataatccttatctgaattcttctcaagttcagtacgcatgcgttgatgcttacctttcgtttgaaattggtaaagtgttaatgactgaagctgagactcaggttccggttgcgggtcaggttcgggctcgggcttagtatttcgtttatgggtttttcttttagttttagtgattgatgaagatagttcttttagtttattggaatgtgttttgcttttaagttattaacatgtacatttaacaatctgcaacctttgttaaaaactcatcaataattacaggtctgcgcttgaatttaagggtttctttttgcttcatgaaaatgaagaatttggtattaaaatggtccatatgaaaaatcacctagttttggctaataactcaacacccagtccatatttatatgaacgaacgagttaattggtaattttttttaggaaaattcaattcattaccaaattttgatttgacttagatagctttacttattgaagacagaaaaaaaaaaccatggaaataaattacacacttggagagagtggatgccgccttgtcactcatgctagagtgagtaagccaagtggaattttgtcaaggaaatccatagcccatgacacaatcgtatgcacctaatattctcatgaattttcttattttgacgatcacaaaatcaatttctccatttctagagcacttaaacatcaaaatgaaaattcataaaagttacatggttgtgataaggaaagcttcctctgctatagccagctcctcacaaccccatggggtttgactcttcataaaagtcgaccatactatgttattgtgcacaccacgcctaaccaagttggcccattcctttcaaaagaatatcctgacaaatttagtacatttggaatggctttgttcagggtaaaggcggccccccgaatagctgctgatgtggtggaatggctggggaatgttgatgacagttttccctgcccccaatgcttcgaggtgaatgtcgatgccttgtatttcagaggtgaatggctgctgcagcttcagagttgttattcgtgatcatgagggaaggtggtggcgtctcaatccaaattaaaaaacctgtctctcactccaatcactactgaaattcaagcgattagtgatggtgaaatttccttctcaccaaacaaaaatcattctaaaaaaagaagtggtattattttattctttttgtagggataagtaatagagtttaaagacaaccggtaacaaaaatcagtgtagcttccatgtaaaaagttcatagtctccttaagtgcatgtttagctgaatgtctgccttcaattttaaatgagataagttgtagaatatttcttgttttgtatctattaatcaaaatatctttatattatattttattaaaatataatttttgagtgggttgtcgaatatatttttactctacacttaagtttagcaagcacataatttacattaatttaagggtataatgcagacatcatttataaaagtggatatatcttaaagaatataaaaataaaagtaaaaattaaaacatgtaaaatacagtggatatacaatgtaaagtatgagtattattgggcatcttttcacacaagtttacaaaattatcattatttttaattcaaaaaaatatactatataaaaattttggactctgagtttaagtgggcactaaatcgagcctaactcaccttagctcaagaccctatctcttagattgaaatatgtaattatatcactgtttggttagattattagaaactaaaagatatattagtagtaattcttttaataagattctattttaattttttttcgtgaaattaattattaatttttggtcggatttttcattttccctttgattgtgcaagatgttatttcaaacttataataaatatattattctttaagaaatttatacaatacacttcaaaacaaaattttcttataattttttcaaacgttttatttatttacatttttatgaatttgtgtttttttaatgttatttttatgttgtcgtaacattatactatatttctacaaataacatataaatatttgttttaaaatattaaaaaactatcatcggtgaaaaagaaaaaaaaaagttggtacaaaaataaatatataaaaaagactcagaattctgtaaaacgtaaacgttgtttagtttttgggtatttttaagattatctcttattcttttcataaaaactaaattttacatttatttttaacattattatattaatattatatattttttttatcataataactaatttt

SEQ ID NO: 298224 - DNA, 1342 bp, Cannabis indica
taataccacatatagttttacataaaaatattgcataaaatacaattcaatataatacaatacaatacaatacgacttaatacgacgttccaaacgaacccaaaatgtatatttttatgtaataagttttcaaaatgtataaatttttcaaataattttattttgtatattttttgtaattattttatttttgctgtacatttatgaaaaaaatccaatattttaggacgccacaaagaagtctaccatttcgtctttgtagaatcagactgaatcaattactctctcatggtagcaatcgtcttgtacccactccttaccgaatactccccatttttattgtagtgccacatgactttgacttcaattcctcaatcactacttggaatactcaaaaacactataaaacaataatcataaataatataaactcgcagagtatataagtttacaaaactacctaaaaatttattttagttttatttaaaaggcttcatataggtgatggaagtaatgtgggtgggtgtgcttttcgtgacccttggttgccaagaccatgatcgttactccattagaacaaaaatgataggattaccttagtgagtgagtttatgtctgagttaggcttttgggatttggctaagcttaatatgcattttctacctatggatattgaagtaattttgagcatccctctaactagcagtgggtatagagatcgatgatgttggcattataatactaatggatgctatagtatcaaaactgactatgatttagcattggaacttaagtgggaaaatgtgggtagctcttccctaagtttagctaagtggtagaatggatatacctctagtggaaatacaattacaaaaaaggaaagtacatgtttcgttggtgtgttctgctctcatttgatccatttatgggttctattggggatttaggagaagttggtgagacatcaaaatggaccaagtcgaagctattgttagaattgtttgaagtgttgccaaaagaaacttttgaattcatggctatggtatggtggtccgtggtggatttagtatgacagaaactcttctctatttggggagaaatgatgttcttaatgagttggcttgggtggcgatggaagagttgcaaggggtggttaatcgggagctaacgatggtgggtagtgttcgtagtcgtccccgagagcaacgctgagagtgtggtgcttctctttgtgctcagatgggttaagtgggtggtccgtgatgatatgggtgtggtgtgtgctgcgtgggcatttggagagggaaatttacaaaaatactgtaatttgggttaactttta

SEQ ID NO: 298225 - DNA, 1944 bp, Cannabis indica
tttactaatccacattactagagcggtcattacacaaaatagttgtaacaagaaaataaaactgacactacggatctgatggatacagatccaaacatgcagacacccgcgaaccgcaaagatctagtcaagatggaccccgatctagctaatcctcaacaaccaacatgcccacaaataatagggcaagaagtgactacccctctggctgggttcactctgggcgtgtaagaaactggaaccactagtactcagaccgagcaaacttccctcggtacttgaatcctagctactacaaagtctcaaaggctgattggtgatgatgtcaaactacacaactttcaagctgcactagggcaaatataaggccacaataacattgttcattatggtcagcaagatactagagtagctataaactttgcatttgaagaacaaagatgccaattcaaagagtggagggatcaagagatggaaagaatgagagcccaaaaagaagtgattgacaattgttccagggaggctgccatactgttcacgagagcctatcaagtcaccagccaacaaccaacaacagataattaaattcccattgggccatagcatgggccagaagggcgtctagctaaacacacatagcaaagtaaagttaattggttgtgcaatctgaggccatagagtcaaattgtgggccacacattagacaagaaagttttgccaactcattacttgggagggaatgatcagcataacatatgtcattagaaggaaatacttagttaaccccttgctcataatagccaggcacaaaggcctccaagcgaatcagtccttgacttgtacagctgaagctccaattggtacaaagaccaccaccaattgagtagctagggtagaatttgaaattttggcagccttaggcaagaatatggctaaaccaaagcaaatggagtatgagaaggacagagagtggagctttccactctctgccatagtcaaagccttggaaattccctctaagtcataaaacccagcgtgccacctatgcgttggtaaagaaggccaactatcccatataaataactttggagtgcaaactaacatttagggtatccaagggaatgctgagtgtcaaatatttctagccacattatctgaccggcacaaagatcgtatatcaagctgaccccaggttcaatagatttcaagagtgagcttatagaggtcttctacaatcattttccccatcccaccattgacagatcgagcctaatgatctagtaaaaatcaagcaataggatgaggaatgcctcaaggattacatcaaaagattctaggatttcgttactaagatcaaaatccttagtgtagatgcaaaggtcatggacatagtagtcaagatcaagtagatgagtcctctgtggtcagaaaatagactgaaataagtctacactatgcacgagtttctcgatagatcagacgactttatcaaactcaacaaagttgttgttgggattttattccctaaacaaaacccattttaatataatcttatttactattaatagaagattcgaagtaatttaggttaacatgtagttttcatgattatggatttagtttatggagattttcaaaaaacaaattataataaattacaattgaagaaaaaataattcaaacaaagaattagaacaacacacaaactttttacgtggttggggtgttaatgagcttttgtccacaggtcgataaaattatgtatcttttgcgaaaaaagcctttgggaatacaatgagcacaagttctctagttttcctaagtaaatattgcaagagagttcaacccttaatctaaaggatttgttgggtattgatagtgttaagagaattatacttagtttccctttttccttctaattgggagtttacatgaaattacata

SEQ ID NO: 298226 - DNA, 2931 bp, Cannabis indica
tttataagaaaaataaattattcttgttatttggtatatttgctagtaaaattgattgttccaagatctccagaagtttccagactgttagaaagcctttggttgtacaatttataatttactctgtttcgatctattccatgagtggatcttacattgtattttttaaattttaatttttttctccaatatttgtttaattcttttcagatattgcgtttgttcagcgaatccacagaatgtattggtgtcttaaaggttgatttggctgacgcgaaaaagtgtcttagtgctcgtaataaacagcttcatcagttatggtatcggtcggttacattgcgtcacataatttccttattagatcaaattgagggcatagctaaggtttgtttaccatcttcttttaaatattggtcgacaagagtatttaaatcttgtttatttatcatggcatgcacgtaatctacttgaaaattcattcattttaaggtttgttacttgaaaatgtaacattattgcatgactgctgacatgcctcaggttccagctcgcattgagaagctgattgctgacaagcagttttatgctgctgtacaattgcatgttcattctacattgatgcttgagcgagaaggacttcagacagtaagtaatccaatgtttgtgggtgtaagcgcttctttttttggtggggaggatatagaacttgcattctgctcaatattgatttgaccttaccatcctcttcatgtcatcactctgtttactgctggaagatattttaattttgaactactacttttacaatatattgggaactgttttgatcatatttcaattacctgttgatgcaaagtctcaactcttcctttcttatgatgtttgcttaagaactgccatgcagagcttgtaaaagaaacaatcaatataatatagttgattacttttttttctctcccctttatgcccctcattatgataccttcattgtaatgcctgacttgtggcaagaatacttttatgtgaactgtatccatagtaataactttggctatcccccttgctctaggtcggtgcccttcaagatgttcgatcagagttgttgaagctgagaggaatattattttataaagttttggaggatttgcatgcacatctttacaacaagggagaatataggtactagttttgaattttcaattgttgttataattttatatactaagacttgaagtggtactaccttagtgacaccaaaataattaaactttaggtgaaaaggctgtactctaagtatttttgttattctatagtataagaggtttttcttacctaagacaatactctagccaccattaagctattaaaacctaaaactgatagaagctcatcttagcttttcattttcttatgttattgttggtatagctgtttgtattataactttctgagacacaattaaccggcttatttcattgaaatatactgcattttgagaagtagaaagttggttctttatttttgtaagtgaattgtttctgagttgattctttctgcagctcagcttccttaggcatagatgaaaaagatgatgatgtaccaaccaccacagctgttgcattttcaatgaataattcacaatccttatctcgaaggaccaggttactgaaaggcgataatcatgttaatgctcatggagatggatcatatagggcagcttctattgatggggggtgagttttgaatgtattttgtaacctcctaaaaattctagatacctctctcagcatcccttgtatgtggttctttagttgtttagaaataaacttattctactaggttttatggttgcttaattcatgtttaatcatcagttgtctgaaatattgtgcactgtgtttttttttttttttgctaattagtgattgctaaactctaaatttcacaaagttctttatgtgtcacatatagatttcgagtgttcaataaaaagcgtatagattgacatatctgacatgcaccagtgcattggaacatgcaaggtttttatatggatgtcataattttcttcttaattttgatgtttgaatatgcatttcagttcatcttttgatggccatgatgaggatggtgctttggaactacatgatgaagttacctcagatgggcatacaactttagttagggttaatggtggtgaaggtttcccaaaagacgtcaaaactatttctcgtccaatgccaacctggcttttgaattccaccccagatgaatttcttgtatgaaaagctcttactatattctcatattaattttttatgaattatttcagcttccggattgacattttggggtgatacttgatttcaggaaacaatgaaaaagagtgatgccccacttcatgtaaagtatctccagaccatggttgagtgcctttgcatacttggcaaagttgctgctgctggtgctatgatctggtttgttttctaactgttcactactctttgttcttgaagcatctgtttgattgaatctgcacactctacttttctttgtatattcttatatttgagtgacactatcctatcttgcatgctgaattagaacttgaaaatctttacattgtgtcatatgtttgttagaatctgtataatctacttttgtttatatattgttgttatatttgatgatggtttcctatcttgcatactgaatgaataggtaaaatttcttaccttgcgtcatctgtttgatagaatctgtattctctctcttctttatatattggttgctatatttaaatgttggttttcttcttgcacgctgaattaattagtacgtgaaatatcttactatttgttagcttgtttattggaatctgtttttcttttaattttttttgttattactttttattattttaattgacgg

SEQ ID NO: 298227 - DNA, 8361 bp, Cannabis indica
tactctctaataaatgcaacctttatgtacatccaaattcaaatactaggagaatgtgcacaataatagtcctaaactttatataagactattgctaatgtatatcagtgttgactaatatttttataggtggtgattcataattggttaacaatattttttaaaagttacttttttaagttacatgagacacaatatttaattatactaatagcagtatgataccaaaaatgttattaagcaccagtagtgcttttagcaattctttaaactattattcttaatttgactaattagaatttttgcctcttgaaatatgtactaaatcatacccttaaacttttttagctattaaaaacccccttgaacttcattaattctgtaattatccacataataaatcatattttctaaactttaatgtctatcaaatcatatcactcaaactttaacatgtaatacatcaagtctctaaattttcatccatattagattttttttttactaaaattgaataaaattttttaaatctaataatcttgatagttcttaacagaattttaaaggctttaaaaatacaagaggcatgattggcaaaaatcctaattaattattattattattttatttttttttttttttgctgtttatgtaaatatagcatgcaaattacaaccatgccaatacaatcgaacagggagaaaaaaaaaacatcatataaacagtaatttatggaaacaagtaaacgaccctagcatatattcattattcaataataccttttatgtatatttattttatatgttacgtatacattgtgttgtgcgtatgtaaactgctatactattctttctctcatagatatcagaatacaggcaaagcaaatcaaagtaataaagcaaaaaaaataacaaaactagaagagcaactggaaaatttaggcgaagtcgtcgtcatgttgcaaagtatgaggagacaatgtttcatgaggctttactactgggtgttctataggacttaaagtacgtgttacacattccacagttacctttgacataggcctgtagaaggaagataaggtgcttcttttaaaattttgattggaaacgacagattccgcgagtttcctacgttgaggcaacaccatagttttcttgttcagatttcgatttaatttgttgggacaattctcatttccttcagctccttgcatatttggacgtaccattgactcaataggtacaagtttcccatcaatttggttcgtaaaaacaaatgacacctgtatgtatgtatgtattgtttctttttggttagaagaataaatatttgggaaaagcgtagatcttggtaacagaacaaaagttggaactaatgacaaacacaaaggatgaaataaaataaagtttgttcaacctcatcgccagctgaagcttggaaaatagcatcgggtactgttgttgggtaaaaatgatgcccccaactacccaagtcttcctccagaggtgtccctacctgaaaaaggttactcaaaataataataataatctactttgacattacatggtaattagaaactatcaaatcttaatcaaccaaacgccacccacctgtttctctgagctctttaacttgtctaagcatccagcaatttctgcaaatcctccaatatcagaggtgtcttgatcagactcacggcttttgttcattgatttgttctcggtttcgggcatattatcttcactttggcaacggatgcagttcattttttcatgaatttcagacctatggatatacaggaatgaagacattaaaatggggtggaagaaaatttccatgctgtaagactattgaaatattaatcattgtaaccaaggtccttgctcctttcaaaataacttagatttatcattagcagttaatttattgtttaattgtttttttctacaggttcactatatgttaagcttatcacgttaatatgaatcgtattttgttttttacattgtgatagatctgttcctttcttattccttctaccggtttatgtgccagcaaattgacagaaccataaaggcataaagtccaaaagtttaatctactgaagatgaaggaaagagccatatactttgacaaagaatccagaaacataaaaacaatagcctcttgttctgtacaacaagaaagctaaatactatagatgcacaaaaacaagaaatttgctatttgttcatttagcaaatgattaacaatgaagcagaaaaaatggcaatcatattccaggacagcatttaacatctgttaaggagggtagggaagggaaaaggaaacccttacctcacattttcatggaagctgaacagatcacggagatcttctatggaaagcgaattcccctgaaattggatattgctcacatacaatgaaaaacttgcattataaatcatgaaagaaacacgattcaaacctgtgttgtaaggctatcagtttgctccttttggataactttttggagcccttcttttgacatctgacgctgatatacctatggaggattaataaagcttaagtagaagtgggtgacatactattccataatttatggagaaacaaaaactattgattactgaatcactgccacattaaaccttttcttcaattgtgcctgtggtcaaaaatctgtaaatatacactctcttcttttgtccatctctccagactctagcagcagcctataaataaattgaaaaaagaaatgttagctgattacagaaataaaaaggatagtgaataagcatttactttatggagcaatgcatgttttttataaatcagatgaccgcttgcagcttctacataaaataacaagacaattacttgtttgtcattggcaggattccaatcaggatcaaacaaaacaagtcgatttccaccgatcaaattgagaccacaaccaccagctttactgcttaagagaaacacaaattcatcctgcatgtggagtaagcatggttagtacacagacaagaccagagaaatagacgagaccccaaacaagagggtaccctcttaaggctttgaaattaaaaagtgacacacctttgatgggtcattaaaatgatttactagcttttgtcttttgctgatggatgtggttccatcaagtctcaaatatggatatcttctttcgcgacacaattgagcaaaaaggtctagtgtctgatagatcacaattatgtaaagttaaacaaatcgtaacatctgcagtaggacttttttaagaatgcataatgaaataagaatagttgacatatgagaatgtaatactcaaagagcccgtgttacagagcctttttctttatttgttatttgttattaatacaacacacactggtggtcaatgcaaatggcaaagtttggcatgccaaatcaacacattttcatctttgttcttacatgaatgcataacagccatgatatcacatgatcctaactagttgaataactagtaagaatccatacatttagccctaactagataacaattattgagtggagaacatataaatataacacgactagtttacattgttgggggaaaggatgggattcttgtaatgctattaataatagaatggtgaaaaaaataaaacagaaattgcaaaacctgaataagataaatctgtaaaactgtaaattattgtgaatcttacaaacgacaagaactatgcacaaattacctgagtatagtttgaaacaaggacaatccgatcatctgttttttgacgcaagtgacccagtaaccttgctaagacatgcatttttccagacagttcgacccaagccccatccccaccagtccatgacccagatctattgaatgtgggacaaatatttataaaagtaagactattgaagataatatatagctaactatgtatttaaaaagaaatgaatgcttctgacaaaaagaaaatgaagactaaccttccagaaaacatctcaggagggaaaaaacgcatacagtcctcaaaacctgaagttcctgaacccccacttttaacagtatcatagatgagctacaatatgttatatcatatgtgagatgaatctagaaaataacatgcaacttgaacattagtttcaacctgaaagtgttgaactagaataccaaatgagaaaaagttaaagaagaagaaatagactagaattagttcatagctaggtgatctgaaattccacaatggatttggatatgactgggataaaagcggcatctcaccttagggtgattgcaaagcttcttgagtgcagttatgtaggctaaaatctttgcttgctttacatcttcggaaattgcccgtttaacctgttaatgaggacaattaaaaagcaacctcaacttgtcagacaatgttattataaagtagcaaataccgcaactgtatcgagtaacttaataggtaagagagaacatacatttttggaatgtataaaatggttatacaaatctgactggagaggagtcaacttgcaacaaacaacttcgataatctgtgcaggagaaaatttccaaagtaaaataaatttatagatttaatttctttaaagaacaaaaactagtatgcaatcagaacaagatttaatttcagctataaagttgcttgaaaataaatatttgcatattacaacttcaaaatagaatttaaactccacaattccccttttctacataaatctggtatctggataaccttgtcagtgacagacatgcagagcaagatatgttttatacctttggtggcagatggtttgataatagtgcatttgtccttcgtaatataaactgaaaaagtacattgaaatattaattgtcaggatattaagcagaaaaatatatgtatgagtaaaacttctggttgcgtagtttcgtttattatttacattattcctgattaaaaatatagttgcagctttattagtcaattcaagctacagttttccatatacatatttttaacatagcaagaactatttgattctacagccaagaaatctgttctctggaagataaaacaatgggaatttacagctacaactgtaagttgtaacctgacctgattaacttttgcacttaattctccagagcgctcaccactcaacttcctttcctcttcagtagcattaggttctcgtccacatataatgggagcctaaataaaacatgtgtgtcaacatttgatgaacatgcactcacagaacagtaagaaaaggaagataaatcactttgagcaaaagtacaatataaaattagctcaagttcaggagaaagatattgatgttccttcatgcaaacagtccagagattattgccccatatgtcagtaatctgtactctatcatctaaatgtcaatgcaaccaaaatacgtagtccaactaacgtttatctggcattgtcattaggcaaaaagctttaataaattgtgttactttacaagctgaaatcaggcataagacaaatatcattaaaacgaggctcttattttatctccgcagcaacttgagtcttgatataaatatgacataatgatacaattaataaactagaatgtatgcataataattagcagcaaactcggtttgttagcatcacgattacattgaaagataaaaatgaaccaaaaagagttgtaggaaaggaaccattgggatctatctgatcttaacaaaccaatcaaagaggaagagaaaagacgaactggaaagaaaaaggaactaatgagcttatgtgcagctttatatttttacgttttttcagaaaagaaaagaaaactaaaaaaaaggtaactaaattacctcatagtatcggcggaaatgagtagcatcacccaaaattcccggattagtaaaattaaccattgcatagaactcttccaggtcattctgcagggtaaaagagagacgttagcaaaaactgaagatgttggaatcacaagacttcataggcaccaggcaggtgtctgtcttttcacctgcattggagttccagacagcaaaatacgacgtttgcatgaaagaccagccaatgcctaagaaaagaaaagaaaagtttataaataatatcagaacaataacaaaccatatctcaagaacaaaatatcgttaaataggtcaatgcctgaacataatacccgattcgttatggtttgatcattctttaacctgtgagcctcatcacaaatcaaaaggtcacaagattcactgtggctaaattttgatgaatgcatccgaaatgtctcgtacgaaacaataaggacctggaaaagcatgaatgtaagtgtatctttcataggaaaatacacaagattagttgcagagacttgcctgtagagagctgcgaggacttgtgaacctatcaataccagaaatgacatcatctctggtactttcacatagagcaatgagatgaaccctttctccaacccacttcttgatctcagcttcccaattgcttacaagactagttggagtgactataattgcttttttaaccattggtttctcaccaaacccttgataaagaagagtataaagtaatgtgattgactgcaatgtctttcccaaactgccaacaaattaaaatcaataatatatccaattaagagtaatagcataaccataaaaggaaaaaataatagaaagataaagactcaccccatatcatctgccagaatgcatccaaatatgtttgaagagctacatagccctgagacacattcaaacataaactgaacgccctctctgcattataattacatcttatcaattcaagagtccatgtttggtaaatcttgtgcttttaccattgaatgaagcttaacaacaagatctcaaagttatggcacataagtttggcaaatgttctaatgatacatacatgaaacttgtagtaaggtgcatacgaattagaagttaatatgctctttccaaatcacacggtccaacactttaaaaatatctaaattgcatattcctaaagtacctttgatgcggtcgtaggaaacgaacaagcaatggatccactactatttgcttcatgtcagtagctaattcatcagactgccacaagaccagaggatcaatctctgggggcagagttacaatctcctcctccacttcatgtttcaaaacagtttcaggtgtatttagaagattggtaattggcactaatactggagttgaagatccccagggaacaaatcgtttgcgagcgcagagacgccgggatagctgatcattttgaccagagtagccattagagcatggtggcttaaaaggcttcctgcaaactgctgatccttcagtcaccgatagaactcgtggaagcagtgattgtctggtcacgataagattacctctggaattttgaaatcagaaataattccaaattagctgaatctaaaaagcggaatacaagaacaattgcacaatgccagatttctaattgcatatatgcattcgcagactctgattactgaaaataataataataaattaaagtgcgagcgtgtaatcgttggcttcattttccttttaatttctcaattttctcagcaaccaaacgggagctcaaattccaaaaaattaaataagctcacagattaaaaacaatcacggttaatgaagaatcgaaaccctaaatataaaatcaagaggatagcaaatgctccatttctggaagcagattcgcagacacagaaaagttaaaccaacctgagaagagcatcgacgttcttcgatttcctatcttcatcggacggtggttgttgagccttggttggtggctgattattctcagaaacatcatcgacgttttcttcatcttcttcgtcggtgccagcagagaagtcctcgccagaatcggaataggaagattcagaatcagagagaatttcgtcttcgtcgtccatagtgaaggttgaaccttcgtgcgtcttcgtctctgcgttctcttctctattcaaatttcaggttttggcggtaaatggcgggcacggcggcgttgtagtcgttttgcttattccttgtgtagtttatgtattattgtcgttcatgatgtaaattttatttatttattttgaaaaaaaaaagattcattaaataattaaatcattcattattatagaaataaaataagtagatctcaatgggaagtgaactacattgtttacaaatcgtttaataaattttataaaaatttagagaaatttacatgttatactaacttttgatatttttttacaaaaatactgccagacgatattttttacatttttactgtgtttttttataagtttcat

SEQ ID NO: 298228 - DNA, 4353 bp, Cannabis indica
aaagaaagaaaaaaaagaaaaataaactcaataatgaaaagatataatactgtgataaaataagacaaggcattaagaaacacagtgtcttcacatgtaccaaaaagtagaataacaggattgagatgataagcgataaaattaataacggaaggcaagttaccaatggtgtttctccctccccttcatcagagattacatggccggtgattaataacaatgagtatatttcttccagagtttcagtttgatcatcaattcccctaccctacaaataaagtaaaatagtttgaggaataagcaactgcaatatggaaaaaactctagcttatgcctttcaaagataagagcaaaataaaagacaccaaaagaataagatagcctccaagaaacacatttgtggtttctaagtacaagcagtaaactccttgtgcattaatgacaaagcaaggagccagtgaaagtgactaataacaataagtatgtttcttccaaagtttcagtgtgatcacaatactaattacttctcccaatccagtctaaaatagaaaaaggaaaaagctctcactttcacactaaacaagcacaaaataagcctaatgcatgagatcttattatatcatgtgaaataaatacaattgctgcatagacttaagaggaacagagtagaaaaaaactcaaaaccaatagatggtactgaacttcatatatcaaaagtaaagaacaccttagtaagccgtgcaaagcgctcagagaagagcgtagtgagcaaagggattgtgacgtcaattgctgctcttgcaatcagagcataggagcccaatctttcatccatggctgcaatcgttaaacaatgaaaatcaaagacaacaagatggattgagatgatgtcgtaataagtaatacactagttattatcatctcaacttatttttaatatgccaactgataaaaaatttatcaatgccataatttgagttttccatagcattttcccgtaccagaaatggaagcctgaaggtaactggaatctacatcatcattgaatgctgatgcggcagcaactatatggtaaaaaagggagcagctgtcattagtgatgatacaagaagatgaaaaatggaggttgtttaaatatagcctaacaaagtgacatgccaaaatcacctgttagctcacactccacaatcaaggcaaagagtttggctgcagcaattctcccttcaggtggaagcaatgtaattccgccatccttattcaatggctgaaggagatgacaaaaacattttaccccagttggctaatgattagaaaggttagggaagaaaatgcagaccattcaatcaaactctaataaaaggaattcaaaataagaagattgctaataatatacaacaaggtcctaagcacaccaagcagaaaatatcctagcactacgattaaataaactttatcatctcacacttatggaatctgataaagcctagaacgaaggtttaaacaatccaagcagataacattcttagggaactttacaaatgacaagacacaatacaaaaagctgcattatcccaccttgacgagtctggaaatataaacacagggaaattattaggggcaatgcatagagtaaagagaacttaatggagcttggaatgaagattaaaaaaatggattgaactaatgagattattgtaatattacatagataattcatgtaaaaggttttctcctcgaacattataatataaatggacagttaaagtttatgtcaagttctcaatcatacactgtagtttaataataataataaataaaaagtgcatcagaaacaaataccacaagaagggcagtccaagtatctaataaaatgtcacgcgcttcccagctccaggtttcctcttcagagttattagtcgtgaggttcttaacaacttcactcatcaaggtggatagcagggtcagagtaccaaagggcctgaatacagaagcaagattatgaactaacttctaaacaagatgtttttaagaaggaattcagaaattaaagttgcatagagacactcttatgcacattatttgccttaaatagatagtattatgagttaataatcactctgccactaaccttactgatttcaatagctggtcaaacacagagggatttgtaatagttgcaatagacaataatccacgacaaccatcaagcatctcactgaacagtgaaaaataaaataagtgtgagagaatttgaaatgtagatgcgaaatgcgaataataaatataatcattaaagatggtcatgagggacataacctttcactctttccattttctattgcttttgaaacaacatcaggaggatcgatccactgtattatcccagaaagcaattgaagcagatggtgctcatgcatttgcacattatctaaaccatttacaatttactaagttaacggttactcttttttgataaaggatctcaaaataataagatggacatagaaactttactaagagtacatgataattaaagatttcaaaaatgtttattattttttttatggcttaacaacaaagttgaaattcctttcaaaacttaaaagttaaccttgagttttcagcaacagaaaaacacatcatgctgacttcttggcacaaattgacatccgtgatgacatcgacagtttgttaacaacattcattaaccaaaccaaacaaaagagaatttcaaatgaaaatatttagtgttcacagatgtgatcaaatgattgcatctaataatttcctgtacacgattcctcccgggtatctacagtcactattatagtttgttggtccccaactattgtaggtctaggcgtgggggagcctagtttcaagaaaaaaaatctcatacaaagaaagtatgtaaacatcttttctttaaagcccttgcaaaaaacaaattcacaaaactgttgatcaagtaggcaaggaaaaattgtaccagatggaaatattgttcctgtcaaggagcagaattggacaattaactttcgggcagagacagcgagaggacagtctagccagtagccttcacacgaaaacttctgtctcaatgctgcatataagctcaagagccatccaatatgactgctagtaaccaaaacctcacgccatgcaggaccaggctaaacaacatcgaagagaacaagaagaaaaagttaatcctaagcataatgattgaaaggtctaataatgccacataatatcaatgatctatacatgaatattaggttgtctcagttaaaacctaatgtaatctatcaggaaagctcaataacttgcccatcatactcacattcgatttcaatatttaatacttcataaatcactatgctgcattagcaattgtttacaaaatgaaattcatactatagacaaggaattccatagaaaaattgatacctgcaccaagttacactcagatctcttagatgaatcactatcttccctaactccaaccgagaatgcactaactgctgcacgacggctgttggtcgagaaatcccagttcaggatttgaagcataagccgaatcgcaccagaacaaactttaacctccggtacttcagagtctgactcgattattctatttgtgacacttaaagcagcatcccgtacccagcagtagaaagtctattttatacgtagaatagaagacaattgaaaaaggcaaagactgtctcagatgaaacttcagagtataaacactcaaaacttattgcaaacatatcaaggaaaagtggagaaacctttaagtggtccttctccaatgattttcggcatagctcatgaaactccctaggaaggcccattgcactagatgttgaaggagaaaattcagatacctattacaattaatacttagtccacaaactaccaatgttagaaccaatataaagtaagaaaaaaaaatctaagaagcaattcaaaactttgcaaagaccagttcataactaggatatattaaaggcttaccaaagaaagacatataccagagattccaggaaattgattccataaaattgcacatctacaccgtgaattccagaaacagcctggtttacctgcatcttttaaatcgttagaaatggaaagcagagacactgaaggtaaggctacaagaaaattggacagaatttcaagatcgagtattcgctgttatggttaataatgcatttaagaatgggacaggccaagatgcaatcattaattcccccaagcaaatataaatatttagggctcgtttggagcgtcatattaggtcgtattgtattgtattatattgaattggattatatatcatat

SEQ ID NO: 298229 - DNA, 5170 bp, Cannabis indica
tttttaaaaaaaaaaaaagagaataaatcataatatagttaaatatgtatgtaaggaacatttttgtattatccctaaaataatttatcatggtttcatataataaaaatgtttaaataataaaaaattaattgtgttaaataacaattaaaattaatcatttaatttatcacaaatattatttttgtaaaacttagatataaatatttttgataatttaaagagaatataaaattgtagtattatatttttaataatttaaggagaatatataattttatagtattatattgtttctcctataatcaattgagtgtattgtttaataaataagttttttattaaacaaaagctaaaaaaaaattgtaaattatttcatttaaattccttttaaatttaaaatatatttaaaaaattaaaaattaaagaaatgattaaaaaaatcacatgcatgggattatttctcacactgctcgatgggataaataatcctagacaagggggattaactagataagttatccagatctccagcctgaccaaatataagactggacaaattatacagtctaatccaatcgaatcatgcgtgccaaatgggcctttacgtaaaaaaaatctcaaaatacctcatccataagtgcttgaaatgtagctagcgcattagtaagaccaaggcaaagagcattagtaggaagtcgtaatgactcataagttcgaaaagctactttctccacatcttgggcagcgacttaaatctgatggtaacctaatttcaagtccagctttataaataccatagcaccatgcaattctcccaacaactagttcataacttgaaggggaaactagttcgccattgattccttatccaaagcttaatagtccacacgaaattgcctaactaccattttttttcaccaaacgaaccagtctagagaaaggacttgtactttggcaaataatgccacctgcaacatctctatgaccaacctttcgatcttatctttctaaatctgagcatagcagtaagatcgaactaaaagagttacagacccttctctaaggataagaatgtgctcacgggtttgtgatggcggtgaaccaaggggcatttcaagcatagagtcacaatggagcaataaattcaaaatctcctcgcatggatgactgtcaaaagcttgtcgttgcaacaataaggcattcagctccacccaatacccatacccttcttgctccactgttcgaagcatagattgcagcgatgttgtaagttacaaagactccaatccccctgcaaaaaagtttccaatcatctaataccgaaaaccaaaccaacaccacacaactccaggggaagaaaatcaataagaccttgaaccacccttatgtcaaattccacttgagcgcatatacctttcgtacatactttaactcagtaccaaataaaatttcacaataagaagtggcagtattttgcaacttggcagcattaacaagttccatagaatagaaatgaaattatgagtagctccactatccatcaacaccattaccacctgatcaccaatcttaccaacaagtttcatggtgttagccaaattcagcccaaccattgaattcaaaaacagagtagccaatgtttcctcaatacccacttcaattgaagaatctagagaagttggtggagtacctatatgaatcaagccctcatcatccatcacaagtattacctacaaagttttttactcacaaacatggcccctgtgatatttcttatcacccttaaaacaaacaccccttgttcatttaccttggtattcttccttgacattcacttcgtcattggtgtagtagtggctagaactggtttgccactattaggagaaggtcgtgtggaagatgaagaaactatggtgaacaagtatggtgtcaagcttattgttgagaacgaggtgaaagaattcttaggaatagaattgggcttgggacagtttatggtttggtgatttaggaaatgggtcatggccaataattgatgactttcctccaccctttgggtggggttcatcatttggggcaagcccactggttggaggatatgcaaagcactcctaatctcttctttgaggcctttaactaaacttccctctagtatgtgctctggtacccatacaacatgagaagccagagattcccacttgattctatagtccttcactatggtgtcttaagtcactgagagcaactcctccattatggaccaactggaatggctcataatcgcaatagcaacaaatgcttctaagcaacccatgacgtgatcgatctccgttgattctcccattgaaactatgtcaatgcatccccatccagcccaatgacaacagcctcaaacatatgagctttcagtgaggcgactcaacaaaaaatacctaatcctctggattatcacccgtgaagaatggcagctccattctcgaaggactgtggttgcgattgaaaatcgattctgggtattgctacaagtctccaatctgcatttggcagtgcaaagcagatcatgagtctgacgcaattggaggaggtgtccacgacgcctccacctccaatattgactgtgtggaagcttgcaagagcaacgccaactgccccgacatcagttccatgcacttagccaaatcgaatcgcatctctcccatctcagttcatatgttacccaactcctaggaaaacagattggaatccatcaatatgatcatcgatagcttcgataacttctttctttgggcccatgaaggaatcgatgtctctaataccaattgatagggtattcctacaacaattagtaaggcgagatgaagaagagattcttgagcttggcctctccttacaagaaaaatagcaaaaacttagacaaatgatcccctaattccaacacacactaactacattaactaaggtgcactatagtcctatactacatgcactcttccccacaccctaatagagctcaaataactaacatgccacatcactacccttagttgaacgccctcccttggctcgccttgagtaaacaaatgtgagaggtggggcctatcatgtttctaggattgtacgattctgtgaaaatgctattttccaaaccccaaaatgagaataacatcactttgatcgtagaaaacgaaactctcaatctattgaaatgttatatatcaataaagttttggtaatacataatcatgtttttgatgcacaaaccatggtggtactaatacatacttggagactttgactccacaacacacacacttcctcatccaattagttgtgagctagccccaagtcaaaatgtacacatttacatgatagccatccattagatttcataaaaagcacatctaaacatcttaatcttccaagagtatcatattgacatatacttggtttccatactttccaacaaatgaaaaaagacattatcataagttctattaggtaattttaatatggtacagtatgcttctttctttttcatttgaacccttcccctatacattcatatacccagctgctcaccacttgagctagccccaaatggctactgtatgctgttatctgtttaaatcaatgcattagagtgggacaattgagcaacttcagttacattttgtttacacatagtaagcaaacattagagcaagaaaaaaatacgaacagccatttacttcccgctggggaatgatttttttttcatttttgtacaatggcacccagccaacatgaaccatgaattatataaagttgatccacactaaaattctcgattacattaattcatctatagcaatgttcataaagaatatttaaaattagaagtctgccataatatgtggtgtaatatacagaataagaaactgattacacagaacagttttgcagtaatcacaacatgcacaagcaagtttttcaagttttccactgagatacttttggtgtgatagtgatataatggttttcttcacccttaattcgagttacatttaaataaataaggaaataaaggattatattattatttatataatgcttcaataaaattataaaaaatcacctttagttttcttctgttgagctttataagaatgcttagctgaatactttggcttatgtttctttcgagagttatctgatttatctacttgtgcaccaggtctccacattgggtcatcatcctaggtaagagtggaaacaagcacttatcaatactcatgaggggacttatatttgcatcccaaaaatgtacaagtacaccccatttatctcctaaaatattagattttatagatacgcccacctttatctattcacaaaagtgggtcatcattgaaaagaaagtacactccaagtatattcaacatatattggactaatcttctattttcttctcgatctcatataatgtatcagtgagttatagactaatttttaggacttaaagatgcttaattcaagtgggtgtatttactaaacttaaagtttataaatagaattaatatttaaaattgtgtattttattctttttgcataaggataaatatgtcattaagttttctaaaaaaaggggtgtatttataatttttttgctgtgtaaataagaatcccccactcaaaaacgtgaaaattaataatgcaaaaataaattgcagaaacagcaaacttcataataaaagtttacatatgacatgtaatggaatggagtttagtaacggaaaaaactgcaaatagttcacctgaaatgaaaatttagaggccccgcttttgttcagaagatctttcaatgctttcttagcatcagctcgcttttgacgtgttgcatatctgatataattctgaattcaatatttccgtagtgagaaatacaacaatataaaagggaagccaaactaaaatcatgcagatacatggtataaactgttaaggtgtcaagctacacatatgtatgcaaccaaatacttatggcatagtgtctttttccattccactacagaatggtaattacggtaaataatcagccaaacattctaattcaaccatgaaccaaataaaggcaatatttatcacctgatctcacttactaggatccccgcctaaccctacaatattt

SEQ ID NO: 298230 - DNA, 3183 bp, Cannabis indica
taaatactagatccactaaataaaataaatacaaaaaatgagatagtaacaaagatgtaaaatcacttgtggaaaagcctctaaagctttccaaaaggattggttttcagtttccactagtgcccaaactcatcctaaacaagacatttaatgaacgctaatcaagatggtcaaataccgtgcatcattgtatatcctcatgaaaaattttcaaaatcgtacacatctacctactattttaacttttaataataactatgaatcttataaaattcacttcccaccactaaaaaaaggtattaagagatcccaaagcacttacctaatctttggaactaaaagtaatatcgttagccaagaaaaccatattttttggccacttgctgatattgtagacaaagtgcttattaaaggccaagaagaccatatttttttgccacttgctgatatagtagacaaagtgtgcttattaaaggcctcaaggccctagaatttcatctcaatcaatttgatcacgttcattcaaaaatatttgcctattaaaaactaatatgctcataagttacttttcctcaattatagaaaaaggaaaatagactacacccaaaattccgttcctccaatgattattacaaatagaaaatttcgaagagcattacactcttgcattttcctaaatggacacctcttgagttatcatttacttcaacacaaaggtaaaacaaactaagcatctcagcatgtcttccataatccatctcagactttatatttacttatctatagaatgtatcatttactgaccagtaggtgttgcaaacaaagagaagtggtggaaacccaagacaaaacaaaaaactaagatcccatctcacactttaaaaatttcagactgttgttcagcggtcaaaactaatcaaaatgcttaccactttaacatcattttgtgttaaattcatcatattgagaaaaacaaaattatcttaaaccccactgtaagtagacaactcctgtatagcttattactgttggcaggcagacaaactccactatgactgatgcagggtattaatatacatatgacttttcatgtagataatgatggcaaatttcagaaaaccatatttttttttaacctaaaatcaataagtatatgttgtgtacatctttcccaaacttaaatgcaagaaacaaagaatgttcgaagtaagttttacccggtgaatagagaagtcgttataacttttgagttctgcaattactttgtctactgtacattcaaagccaaacgcacccatcgggtgtaactttctagcaaaacgaacaacatcttcatcactgtaaatacgcctcaccaataaagggtgatttgcaatctagaacaatggaaacaaaaggggaaaaagtcaataacaggagtatctaacataagctcaattatgcgtaataatgttcaagcaaaactagatgcttaatatttataataacaccttacggaactgaacaaagtagttggatatttgccttctgggaagaactccaaatatactgtttttttgattctctgaacttttttccaaacgagcccgagaagctgcacgatactcctcaatggcttctttgtaagcctcatcttgttgctttctcattgccacatattcaacctgcacacaaattctcaaactcattctaacacaaccaaaaaattagcgtaagagaagggaataaataataacacaccaaataaataataataacaactacatgaaaaatgtaactaaaatcatctaacaaaccttctgtatttttggaacaagttgctgcataacatcagattttaatcgcctcaatatgaatggtcccaaaatggacttcattcggccaatcaaatctctatcttcagcattcagcaattttttcaagtcaacatcctcagtacagaaaagatcaggcagcataaactccaacagagaccacaattcctggaacaaaaaaatcaaatcagcaaaaaagaaaaaccatgaaactgaaactaatcataattaatcaagcttagtacactagaacccattcaattcaaataaaatgtttcaattgtacacaaaaaaagccaggctattcagcatgaatttccaagaggaagcaattgcacattcacaagccccattctgagattgcaatctattgatctaatggtaatctaattttactgcatttgttatgggatataagagctgaaaacataataaacaaattagagcatacatgtaaatcattttgtagcggtgtccctgtcagcattaaacgctgatttgcatttcgagcaacacccattaaatttttccacctatagctgcctttgtcctttaaagcatgggcctcatccatgagcacacagctccattgccaacgtttcaaaattttacgatcatctttctgctgtgcactggaaaatgtgaattataagattcaaaacacagaaaatataatattttattttccaacagttgtattatagcaaaccaaacctgtgtctctcaaaaagcgaatagcacacaagaagaacattaaatggaggtggcaatccagctttggataatgagttcaactgctttgcatatgctgatcgaacagctccatgatactggaggacagaaaacgatgggcaccattttttaagttctctttcccaattttccaaaactgaagcaggacaaacaatcaaatgtggaccaggatcatcgtgtaggtggtttaacaaggtcaaatacgttatagcctgccagacaagaatagtgtcataattatatatcaaagccacattaacgaaaaagtgacaacttaagcagaaaaacaaaaggccaagatacctgaatggttttcccaaggcccatctcatcagccaatatggctgcaacaaaaagaaaaaaaaattaagtaccattgttgacaattgtgattaaacccattctacaaatgtataggcaactgagcttgaaatgctagcacatgatttcaaagtagataagaacaaaaatagaatgcagatagttttgtttcaaataagcatgtttaattacaaagacaataaaataaaagggctttttcatttttacggaattccacatagaaatcattatagcaacttaaatcgcaatcaaaatccgtatagcaacccacata

SEQ ID NO: 298231 - DNA, 2865 bp, Cannabis indica
aatgccctggaaaggacatatcaattatccaaggtgcaactaaactacattttatattatcctatcagctaaactccatgtactgataaatcatagaaatacatttaatcacacaatcttgattattttccactgtgctgactagacaataaacaataatatcaatgtgatatggatttggatgaatttataaatcaaataaacaaataaatgatcacatgaaccaaataacacactaaataaataatgaaaataaatctgtttctttattgataattgaatagaaaagattacattgaaaagagttttatttaaggcacaaagcccaaaaggctatggaaaaacacgataaaatgatatagctaatcggagaaaactagagtagagttatgtcgagtaagctagaacttccacaaaaaatggatgaaggggtagagtggcaccacacgacattaattgctcactaaaagtaacctttccaatacctggttgagaagccctctccctctatctagccatgaacaatcgaaagaatgcattggatggaatgttgaaggtagagctggaaagatcattataagagaatgaatctttaggtacaggcaagttgagaatcactctcttaggaggcctcttggaaggtatacctgtagacataggaaaatggtgataagcacggcctcacatttttggttcctcttgagaattctacaagcgtgagcttttgttctaggtaatctaaggaggaatgaggaaagaatggattcaactccatgtctctaattaaggttggctcaggaatctcacaagaaggtagaggggtgggctcttaagggaaattattctcaaggcatagtagctcactcttaatttcagttagtgacatcctaagcctatacaagtacaagtcagagtcagcaactcggctatcctgctgtccactcaaaactaaatgaattttgttttgaggtctccaaatgctccatgcagctaatgatgcaccctaaatggtccttcctctcagaaaataacctaatatatctctcacaaggatcctttggggactctcagaatctgagatgaaatataaacaaagtcggccctaaggggtattttgctcgaattcctcataaacatgaggtgagatgaaaaatatcaacaaggtattaccacacaacaccctcacctaagaggtagaagaaaaattactaaataaaagaggaatatagagataaagaacctatgagagcggtatgttgatcaactctcaagcaaaatgaggagtaagaccaacatacataaatctataaaaagataacaaatgaatcaaatgaagaaggaatgatactagataaaagatgggcaacgagttacataccttaagatggtggaggagagtcactagaatgcaagactcaaaaaatgaagagcaaagcaccttcaacaaaaaggagagagatgtcaaaaggttgtctaaccaagggtcactcaaccatgactaagaccaagggtcacttgaccaaccccaaaggtcactcagtcatgaccaaggccaagacccaagcaaaaggtgacttagccatgaccaaggccaagggtcactcggccatagcccaggcctaaggtcactcagccaggaccaaccctaaaggtaattcggccaagacacctcaaagaaaaaaattatttatcttgaaaaattaacaaaaaagaaaagaaaaaaaaaagaagaagacttgctaggattcaaacctatcacctcttagaatagagacttcaagcccaccactaggccaagaagatggtcttgaaatgaagttgaagggcagagagatccctttaagtgttttctttaagtgtgtgccaaaggataagctcataattcagctaagtgaactaggagaagaaattagaggtattagtcaataagaacacttaaaataattcttatagactagagcaagcgttaatcccaaaattaacacttttaacccaccaaattagccaactactaatcaagagattggtggggacacgctcaaagactctttctagatgcataattgtatttgcttctctaagtgcttgaaagtgactcgacatgcaccaaggggtgtcactcgaccatgcatgctcgaggactagtcactcaacatgcactaagaaaggtcactttgtaagcatgctcgagggctagtcactcagcatgcataatgcatgtcactaggcatgcatgtcactcgatatcatgcttgagaactagtcactcgacatgcattagagaatgtcactcggccatgcatgctcgaggactagtcactcagcatgcacctaaggaatgtcactcgaccatgcaagctcgaggactaattactcggcatgcaccaaggaaggtcactcgatctgcatgtcacttgacatgcattggaggatgtcactcggccatacatgctcgaggactagtcacttgacatgcaccaaggaaattcactcggccaagacggcatgtaagtcactcgatcaagacttgcatgcatgctactcggccaaagtagcatgcaagtcacgatcacgacttgcatgcatgtcactcgaccaaagtagcatgcaagtcactcagccaaggcttacattcatgccacttgaccagatttgcatgcatattgcttgggcatgcaagtaagattctgttgggttttgtgccctaaataaaacccatttcaatacaatcagatttactaataaagatcataaataaaattttatgttgcatggttcacatgatttatttcatgattatatataatgtataaattctattaagtccataacatatgtatttgttaatgattatagtgttgttag

SEQ ID NO: 298232 - DNA, 1434 bp, Cannabis indica
tgtttgcccttcgtactaacatctttagagacgaataacatttttcacaaagggattgttcaaaccacgtgttgaattttgtattagcaagtttgcccttatttttcaagaaactttctaggaatagactgtaccgttccttgtatagttcaaattctccaagttgttagtcaactatgtattctataaataactacgtacattctcagttcaatatcaatgaagaaaatattcttcctccaaactattagtgactaaatgattttcctttcattatcaatactcatctttgtaggtattttatgtgacccacttttagaccctttttattttctttttttcttttatgtatatatatatatatataattattgatttagaaatacatagagaagaaaaaaaaaaaggtgtagtaataattgaccatttcaatgtctaccttctaacacttttcttctagaagatggtgctttgcaagcacgcaattgacgacatagtgtttcttcaacagcatttagcacagttaagcacttatcatctccatccccattcaaaggaaggccataactcattgtaaaaaggtcctcttcctaccatagatgttaaatcattatcagaactgtaaccatatcgtttcatctgaagatatgatcagataaagtttcctgcataaagtttatataataataataactttataatgcagctaaatttagtggcatctcacagtcgaaaataaatgatacttttctacacttatagaaaatgaagcccttgcttacaaaaaaaaaaagtgaagccctttataaagcccccagtgtagattttttaccatcactctatcagccctaggaactacgtattgaaaatagtcataactacaagtatcaactcattaactaactcttctcaatcttccccaagatatactcagggcagataattttgaaaacatgcatttattttatcttcataaactttctactttcctaattattggaactaaacaagtaataactaataagatactgaagtagtggtgagatgtaaattagctagcctaaggcaatccctaaagtctaaacagcatataccaaaaaagttatgggaatactttacttcatgtgtgcgtgcattagaaacaactgaaataacttccttgcaggttgctcgtatgactctgcaaaaggaatgcaacaacgcatgtgaagatgtcctatcaggcctcaaaagatatatgcaagagaaaacagtttgcgacaatgaatgacccttgtgccatgttgcctgccatgaaaacagtaatttagatgaaaaaaaacacacacacacaatgacttttatatatacataaatttacacatttctttgtactttatgtaataatgttttagtataaaagacaacatgctatgtttattagattatagtttt

SEQ ID NO: 298233 - DNA, 2153 bp, Cannabis indica
tgtagtttcttttattgcacttaaattcttatataattttttagtggtaaaaattcttatgtagttcatctttggcaacaaaatggttacacatttgaagcaacatttatctctgaaataaatgagtacatagggattttttttgctaaaaaatttacattgaaatttaagtgtgacaaaattactatttaaggaattttgccactaaacaattaacataagaattttaaatacaacaatgtcaattatataagtatttataccgcaaataatatccctatatataatactggtcagcaagtgtatttaaattttgtgcttaatttgattactttatagtttcattaacataaagacagtcgtaattattaagactttattataaagtaatgatcagaaattgtcgatattaaattatacacaaaaagatgcatagtttcattaagaatacccacttactgtactcatcctttttctatttaaggaacggctaattaatcgaatcaaacacaagcatagtagcacaagcaaacacacacacaactaatgtgctaactttctcatctctctctctataaatacatatttagatatataacattcatttattttgttaatttgaaaatgacatacttagatgaagtgtgtatgaagagattattagtggtgtgggttttggtggtgggattattttcatgctcagctttgggtcacgaccaaataaatcttaatgcggatcagccactctctaaaattgccattctcaactgcaagcttgctcttaataacaactcctcttctatttatgctaaaattattgatcttcaacccaaaaaggtatttctaaatactatatatttatacaaaaattgcagagttctcattgtttgtagtcactataaatatgtcaaaattagaatttaaacagctaattgcgcatttattttgactatattggtacgtgcgtattatttatttttaataattattactttattaacacatagttcataaaaacaagtaattattcatttagttaccaaaacatgtaactttagaagttttttctgaactaaattttcaaatttcaagccccgattttccttgaaatttctaatgcaaagattagtatactataattttacacaaaattttccagaattttgaatgaattgtttgaagcatgagtttagtatcttaaattattcaaaaaaaaaattataaataataaaaattacaacttgttcactgacaatataaaaaatatgtatttattataggtagtaattacaaattaaatacttgtatagaggtactttatataatattaagtaatcaattaattaatgttgtgggtatactgcataattagggtaaaaataataatggtattgaagaagatgcaaaatgggtgagtgtgactcttaagaattcaaaaccagccaacgatgattgggttggtgttttctctccagcaaaatttgagtaagtgtattcataataatctaatgtattgtgtcgttttttaattagtagtaccttttgctttttatatatgtgactgaacatataagtcatcatagatcgaggcataaatgacttgatgataataaatgaaattaaaattaaatgatcatttttaatatatgtatgaatgtatatataatatttatgaagatgatcatgaaatcatgtatatgcagctcctcaacatgcccaccaaatggagccaaggatagcgaagttgaaaaaccttacatatgctctgctcctattaaggtttgtgttttgtattactttttttattttacacattttgtctctatttcaattattcttttttttttaaaaaaaataataataaaataaaataaattgagtgccttcaattaatggttcttgtatgatttacttttttgggcaatgtgtatttatttttttttaattttttgaagagtgcaatgagtagtttagtcaactatattatatatatataatctttgatcggaaaaactatattatataatctaataaattagactaattaagttttttactcatcaattttgacagttattaaattatgtacctgaatttttaaggtcattaaaaatgcctcttgaactattgaaattattagatttaaagatttt

SEQ ID NO: 298234 - DNA, 1539 bp, Cannabis indica
agaagcataggctattacctttagagatatagttgtaacactcattctcttttgtttacattagtatcatatttgtttttattgaatggggtggtacatggtgacttggttcctagtcgaggtatacgacaaggtgatcctctttcaccttatttatttttagtttgtgcttaaggtctctcttgattattatagcacaaggaaaacattagttctttccaaggtctaaaagtatccaggttagctccaccagtgtcacactttttctttgttgatgacggtgtactcttttattgtgctactaaataatcaacatgggccatcaaatgatctcttgatctatatagcaatgcttcaggctaagttatcaacctcgataaatgtgttctctcttacatggataacattagagagcaagacaaaactaaaaggaagttctcttaatggcgatagtacaagccattcctacctacgccatgagttgttttaggttgccagtaactttatgtcgccaaattgaaagcatgatggctagattttggtggggttctatgacatcaggtaattcaattcattggaagaattagaatttcctttgcaaatgcaaagatccatggtggcttaggctttcaaaatttcatacattttaatcaagctcttttggccaaacaagcttggcatcttttggaatttccacactcccttcttagcaaatttctttagcacaagtattactcaaatgatcaatttcttgctacttgaacttggtaattccccatctttgatctagagaagtattatttgggataaagagttattactaaaaggtttaagatggaaagttagatttgttaataattttatctgcaaaacttacccttggatcccagggcacacttgtttcaccccttttttatttaaaggatctaatccaattttagtagttgtttatttgataaaccagaataggtagtgggatttggttgccttgcaatcaaacttttgccaagttgatgttgatataattattagcatttctcttaatctgtttccaatagaagatacattgatatggcataactcattcacaagatgtaacattgtttaatcgagatatcactttgctgtaagcctagctaaataggaggacgcaagtagctccacctccattgagcgttggtggacaactttttcgaagctaaatcttccatcaaagattcgaatttttgtgtggagaacttttcacacggcactactagttactgttgggcttcatcaaagacacatccctgcggactctctatgtcctctctgtagatctcatcttgaaacaataaatcatggtttattttttgcaaaagagcaagggaagtatggcatctcttgggattacaaaatgattttaatagtgcttattcgacatcatgtgaagatttcttgatgcatctttcagcaagccttcctacaacacattttgagcagttcattttaatttgctagtgtatctagtttgaaagaaatgttgaataccatagaaaa

SEQ ID NO: 298235 - DNA, 2510 bp, Cannabis indica
ttttttttctaaaaattatgtgtgtaatagtcaaattaaagatttatattctgttttaaaaaagtaaagcaataatgaatgtatatatatatcattcttctatatatatgtatatagttataaagtcaatctttaattcctgttgttgttatattttctgcaagtctttctattatgtccactttgaccgcagataccgcatttgttttgttttttttggcattttgttttttttttctctcatccaggcttgaatcttctcttctttgctctacctactcttactcttccttttggagggtctactttccaatttttaatttcatcaagtgtttcccacatgtctttgcttccaataggatatacaacttccccataagtagcaaccattgcttccttcatgtaatatgctgaacaatattgataagggtcttcattatttgctttcaaaacagcaattgcatgtttacatggtatttgatccatttgaaacctattgaatcattatgaatttattgattaatataatgaatcatcaagtatatgcaacaacattatatattaatgattaaacatatatggtttaagtgtttaacctgttgcatgaacaagttatccaagttaaatcaactattgctctttctccatcatcacaaacttcgtacaaagtgtgagttggtgggtgcacctgtttattataatgataaaattagtataccatgtgtagttatgatagaaaaaaaaaagaaagtttgtatttgaatttcataataataccgtcaatgacaatgaggatatgtagttgtcattcaaaatttcttcatatttactggtcaactttgttgtgatagcatttgcgatgtttctattattctaactctattgttgaaccaatcctctaaaacattctaacatcgtacaaattggtagctctcttatagctagaattgctgaattcaaagattctacaatattagatgtcatgatggagtatctgttgtttagtgaatgaactcttgcccatttgtgatatccaatctcttgtaggtaaggttgtagcctcttgtcaatcttatcaagttctctcatgtggtactcaaactcattgacagtgtatgcatatgcagctaaaaagaatgtactcttcacctttttggatccttttttgaatttgcttttcatgttcttcaacaaatgtaggcgcaagccccatgtggtacttttgggtatactgtgttgactgcttttatgatgctttcatgtcgatctgaaatgattatcatatcttctcttactccatatgctttcctgaatttatcaaagaagaactcccaagaatcatcattctccgagtcaactacaccatatgctaagggaaaacttttaccttctccattgtgagttgctgcagctagtaatattcctccatatgctgacttcataaaagttccatcaactattacacatggtatgcaatggggccaaccttttatagaagcattcaacactacgaaagcatataggaatatcccattatcatctgttttgagatcaactctagatcctggatttgtaaggtggaacctgtgaagataacttggtaattcaacataagattgggctgcatttcctagaactttttccttggccttttctctagatctccaagctttgctatacttcactttcactccatgatcatgcttcatgtcattcattatatcaacaactttgtacattgttttgatatcattgaatttgtgtttgatcatatctccaataattgttgaagttgcttgtcgtttgcctttgtaccttatttcaagcgcacaagtgtgaatttgctgaaagctcttgattataaattgatttgtctttccatttcgtaatgctcgtaatgtccacttgcaatttttgtcaaggcaaacaactagatactcttttgtacaagacttttgcacacaatactggaaattgtttttgatagcataatgactcaaaacattcttcaaggtcttcttgtctttgtatatctgagacacaacaatttcttcttcatttttgttgcagatcactgattcttcatttatgtcgctctcttcttctttctcgaagttcgtttcatttgcatcttctataattttttttgacataagattgacatagtcaatatagtctgcaatgtcttctgtgccagttttatcaatgtttgatgcattttcttctacttttccaacttcattatatagtaggtatgatgaagttattgcactccttgttgaaaagaaagttggtctgttggggctgatgtcaattgtaaggcataatggatactttgtaaaatcaggttctcttttcttcatcttcatataaactttaagttgtgtatcatcagctacattcaggcccgaccctgagcataggcgggctaggctgtgcctagggcccacctagcccaggggcccaaaaaaaaattcctttaaaaattataccattttttattttgaaaa

SEQ ID NO: 298236 - DNA, 10164 bp, Cannabis indica
gaaaaaccaaatcgaaccaaggtgaggaaacaaatatcccagaagaagagaattataagaacttggtctccaacctccattctgaatgaaaaaaaacctataacttaaattagcgaaaagtttataacctttttgtcaagagcacgagtcaactcagaaagtgctcgtatatctgcttccctagcttggttgttttccacgataagagattgactgtaagctattggttgggtactactaacaatgtcaatagctgctgctttcatatgagaaacagcatgggttatatccccctgcacatattacatttaaataaattaaattaatcgatttaccgtgcagcaattagtttaagggttttctttttctttttttttttaatctaaattcgtttaagggtttcttgtagataaaactcctaaattgctccttcttatgcactttcaagtccctgagcttaaatttttagcatcctaaagtgactaattctttgcatccgttcatccctgctcataatccgtctaaaatttcagtttgaaacttcccagatgagaaaatactagggctatcaccactacaaggaagaaatgctacagcaagtgataaaaattcattgttggttgtgtttactacagcaagcactacagaggataagcatgacatcaacaaacttcacacactgaagtacggctggctgtaataaacgtagtacaagtttttgaattctatgttatagccttgttcttaaactagcaagtgaataaattcccctgaatcaaagatccctacaatcttcagagcccattaggaattgggccccagacatcacggaagcaaaccatacggcaatgtatactgacagctaaacatgcataaattaaacatacagagataggatctaactcatgatgcccagttaaattctttaaataattaaaaagaagtgctaaatgtttcactatctgtaaaaataaaataaaaagaactgtcaacttctaaatgtcacgaactaatgttaatcctgaagataaaaagctacataacaaaactaagtcaacacataaagagaaaagaataaacacatgcaatggattgataacataaagttaaagattcatgaaatcaaatttctttgattagtattctgacctttccatgctttcccaaggtattgatagatgtaggtcctttctccatgtgcccacttgaagcaaacatcaaaggccctccaaagttcagattcccattcggtagtggctctttagatgtaagagaaaaattgtcaatcgtactgttctgtctcctaagagattctggcatattctccattgggtttgaaggcatgcagtcaacatcctacaaataagactttagttaccctcccaaaagtgcttctattaaattgtcactctccctaaattcttcgcttaataaaagaaaagtgaataaaatagtaacttcaactaaaatatgaacaacttgacactcttatcacaatctactaaacaagctatatatatttacaactactcctaggcatcgtatgttgtttatgcatgatactctatgaatcaataaatcgaatctcttctcagtatatataggtaaatgattcgcataaaacctatgtattttctaagaattagcctacatactcattatcttctgaaattggaaaatcaaattaaatgttcaagtacctaaactcaatgttacttcagaaaacgacaggttagaaaacactttcagacctgctcggaatggaattataactttcaccatcacaaaaagatcataaaattatatccagaatttctctattgcttgtacccaatgttggcaaattaaaatccaaaagccatccccagaattaaacatgaacttcatgaacaaaatatgaagagaaaagttaaaaagagcccagtaccatgacaaattcaacacctatgtcaggatggtcaaactgaatcctgcacttgtcatgatcaactgtaagcacacttccatcgtgaacttctctagtttttggatgtatagcaatcacccgttgtccaactgtaagaggtctcgctaaatctgtagggagaccttccctaactccattgcggagttcagtataatgctctctaacagattctcgatattgtttaagtttcttcctttcttcacgaagaaagagttcagaaaacctccgaggttttccaagggaactgcattaaaaagcaatcacattccatgttttatttttcatagaacttttttagctaattgatcatacatgcataaagctttgtttggaagtgtaccttctaatgacaccccattcaacccgagttagccttgggatgtgccccaatccaacatggtttaagtactcctcaaattccctcttggcaaaccaagggtaatctatcgcactataaaaccactcaaatgtgcaccatctccgtaccatagttgatgataggaaacaagaaagtttctcctacaaataaaacaagaaaacatcagttgatcgttaacttcagatagttttataattcaaagcaaaacaaccaaataaacaaaaggttaaaatttacctctggcaaagtgaaatttttgttaaccttccgtttaacaatattctgcgtagactttatgtctttggtgggcaatgtttggggtagatacattttgcgcttacttctttgcttagttggtaagttaacttggctggcagcaggaacttgagtagtagatacagctaaatcagtgccacttccagttcttttaaattcaccactcaaagaaccttcagatgatcctactgatttccactgttttgaaggagtagaagattggctactccgtttacctttaatcactggtttactctcctcttcacaaataacctaaaacaagtagatcacaaagatgataataattagtcaaacaaattatttaaggaatccattgctgtcagtaaaactcaatgaaatccataaaaatttagattcctatttggatatgcctagcatatgtttgagtgcacatgtaagcgtatgagggtggttgtaggaaaattattttctgagttgaggtggtactgagtattttctgggaggtccaagctcctcgaagaatttgtctatcctttggtattttagccatttatcaattcaagggtaagttttgaatgttattttaagtatgaccaccatgaaagtgaaagactaccgccaatgatatgagaccttggtcttggctttaagcaatatacagaggctgatggaagcgactttcatcaataagctgaaagatgatattcgatcagaggtgaaattatttaatccgattggcttggaccacatgatgaccacaatctaacgggctgaggtccataatctcttctggaagttaaatgaaggacccaatgttactgtgctttcattcaaacattatttcggacattggctctttgttctcttcaacctccaccaggccaatgtcgacaccaaacaaataattgctcctcacctaaagaccatcacaataattgataaaaagatctacatagattcttccttgtctaattcgaggggattagtcataccaaagaaggctctttattgtgcaagcaaaaaaaaattcagagaaggtctaagttggggaaaattggaaacaaccaatggaggattgtaaggtagagctttagatgaatgttgtggtttgattaccatccttcaaatctatgaaaagcctactacatgcctaatctttttgtgcacgatggcatgtgacttcatggttttcccaattccattgtctgaaataagcaatttttcttcacttgttttgaaaaggccttttaggctcattagatgatgtgcagtatgccaaaaggagatcaagttatttggggcttcaaccttatcaccaatgttccttcaatgttgaaatgaaatgcttgctccttgcttcttcgatactcattaagtgttggcaggtgtcgcagttgtaacctatcagcaaagccacctaaagaggcagttatccaccttgttttccttgtctacctgcttcgacctactctaagagttgactaggacactccacttccaacccatctcaccgttgaatttaagtgggaggtggaaccataatcaatgttagatgttcatagaattggggatgcatttgcagaccctactcatttgagaccatcaataaacaattttctcaattccactttgagggcaaggtgaaagtttggatgatcaatattgatccgaccttgaaccaagcctctaaccaaattaatccatgctaggaagaggttgaaaagagaatagttgttgtagcagcctctgagtggaatagtaagttaaaggatgcttggtaagttttcctaggagagtgatgtaggaaacattgttaatagttgggtgtgtgtaagggtattacattttgtattgtggtgcttcatatgacatactgagttttcagcgccccctcaaagagtacttatctttggatgtatttcaaccattatcaagacattaagaccaactttggtccgtgcttccttagaattgtactttggattgttgtcgtttgatagctcaatacttatcacaagacagcataagttgtccgtaaaattgactcaaataaagaaatataaatctaatgtttatacatataaatatttatataagctacatacctcggtcttaaaagttccctttaaaatagcatctaaacgagcttctacttttgacatctagaatgtgaataaaaaataacattagcattaaaccaaacaatgtgctgacgacatcaattcatgaggcagagagagaagctatctattagttcttttaatgagataagaatgattttgaattcacctttggtatcgaggacttccgcctccttttcaataatttgttctcagaaagaagttgtcccgttgttgaatcattaataatatcaccatttgcatcccttccaagtgtggactttttggaaattgtagggggtgccttttgtttagcacctgagagtttatttttgtttctaacttggcttgtcgcttcaggtacactgcttttttcttctgcatctagtgttgttctttcttccttcaattggacagacgattctagatacacaagaatatgacataagataataaactaccataagaaaacaaggaccaaatcatttcaatacacatagcaaaaataagacagatatcaaaatagctgcaccaaaacaacaatgatccctgagaacaagttataattttagatgtagatccaactttaaaaccttttaaatttattagatgtaaataaatattaaatcaatcggaaactaaaatgaaaacataacattccagataagttagagcataacaattcaaacaactgaaaggtgcttaccagattccacggtacatggaggcatcatgagcgacaaattagccaacgtttgaagagcatcaatggcagagctttcatctggggtatgaaaatcatgaattattagaagaaagctagctttgaaagtaagaagcaaaaaattgaacagtatgcaaatcagtaactgctaggtacactaaattggatatggtatttacatatagaattattttcatctgagtttagctaatatggaatatgatgtagctagataccatacttgaatttttgtttaagaaaatttttgttgataggaaattgtttttaatcttgttttatttaaattaatacatgtttaattgatttatttttaaaaatacaaaattaaacttcattcgacacttgttcaaattttcatcttttttaattttagtttttgtttcatgaataaaattaaataataaataatttaaacttatatttaatgaactaaaacaaagtaaaaggaatttaattaaaaaaatgactaaattatgtaaaacaaatagttatcataaacattttcaaaatcaaggatcaaatgtgtgatttaactaaaatgcagggatcaaaataataggatagagtaataatatgtgcagacaaaatttaaaccaaaacattacacacctatggaatttggtgaggattcattttttccaatttggttagggtaaaggtttttgccaatatgcaaattgacaaaaatagtgttttggttaataaaaaaaaaagttggacgaattaattaaaactcaatttatttttttgttttcccaatttatttttgttctcattgcatgaaaacaagattttctaaattgtacagcattatgatacacaattttatattgcaacgttcactatatttgaaaaatattataaggtggtcataggcatagcctagtggtttcacacttttcttcacaaagaggaagcctcaagttcaaatcctatctcttccaatatcattatatataaatatatttatatattataagattactaacggatattttacaagaattttatttccatatataatttctttttttcttttaatacacatatcaatttaattccattcataatcttttaactaatattcactcatcattctaataacctaatttgttgtcatattcaacatcaaaatgcagctctcattttatgattcattcatttataattatagaatagtgggtgtatttgagagtaaaataccatgttgatttaaaaggtacgcagttgtatattttgttctgttcactcaaggataaatgtgtgcttacaattagaaaaaatatgtgtgtattcttatattttgttttagaaaagtacaacaaagaaccagatataaacttttgaaaatgtgaaaaaaatacctccaaaaaataactttttgcttttcttccgttgactttgcggagaaactcgctcaactttcgcatttgaaaattcaacaccaattattcccttcaaaccgctgatacttttcccttcttctgtgccactacatgcttccccaccatcatcatcctcaactttctctttttttccataaaacttcttccccttttgatgaacctcaactgtaccaacgccttccatagccatcaaggagctagtatccttcccataatctccattttcagctcccctgcttccaacactaccttcaaaccaatcgtcatccacagaagtatcacggagtctttgtgagctctatgttaaaatagaaagaaaaaaaaaaacagttattttcacatacaaagaaatagatgcactgccataacataagaacttcactacatactagtgctaatctttcccagctttgagcaggagaagagctgatatgcttgtatggtgtagaaacttgaggggaacctactctttgagaagcctcagtcaatgccaatgctgctacatgtgcatcatcattatcattctcagcctttttgcccttcctattgggtgacatttgattttctctataatctctcttatgtgagtatgaaactggaaagcgtggtgtccgctttccaactacacgaggctggctacctgatataatgttaaagcacatttaaactcatgtttcactttagagtagatatcaaaaactaatgaactttaatgatgcagaattgtcatgagattaaactatcttctgtcaaatattgtacagaaattaagtctcttacatattttacaaatctctctataacaattttgaatctaattaaaaatccacccaaattttaactctatctaacaacttatcaaaaacttcttcaaagtcttcaaagattgttccatttctacatgatttgcgttattttacaaaaaataatagcatagagaaagacttttgatatgaatctgagacaacacctagttgtttcagtacacatattcatttgttattattttgtcctgtctttaattgataaaaatattccatttttacccaattccctcacttcacaaatagttataacacacaaggcaaatattaagatccaacatacaactgttacttttttttatagtcttatccctgcataattccgtacaccatcaacatcgctacacactttaacctcagtgtcattaatttacaaacgaatcacaacagattagaagaaaaaaacttaatatagataaatgcaaacaaaatgatcttcataaattatataaaacagcatgtaattttaccatcactgcgtttccttttgagtaatgataagcatccatcagtagaagcaactgagtgagattggaaaagatcctttgaggtgttaaaattatctctgccacgcttgcggtttggaagttttcgagaaattcctgaaccatcattgctctcttggtcactatcgctcccttcctatcaatttgagtatgaaaagagaagccaaagtcaaatgtgaattctcagcaaagaaaaatgacgatagcattaccctgaaaaatcagatgcaacttaatctagcttttaccagaacattatagtgatctgtcatcattgctataaggccaacaacagaagctgttccttctggcagcgacaagtatgccttaaaaaccaaaaccgcacaaatcagaattaataaattacttaacaaagataataatgaaatcatggcactattagaaaacatgtacccgattcatactgtaaagagcctcaaccatttcgacagttctgttgcgcactgcagcagcaacctagaatccacagaaatcaataatctaaattcaaaaaaggaaaacagagtgcgtagaatctaatagttcaaaacaggtggagaacaccctctaatgtgcgtaagaagaaagacagtcgaaatgcctcgatatatctttgccaagcatcagagagaacaagctctagtttatctcctctaatttatcaaaataaaaaagaaaataattccaaatgagggaactgtttcaaaaaataagatatggcacaccttcctccagtcttttccatacttccgataagcatcataaaaacgctcaagctctcccttgctccactgagaccccaacttatctgatagttttttcttctgtacacaaagattgcaagcaagaaatcgaccaaaattacacttccataatttccacaaatcaaataatagaaaaataaaaaaaaaactaataattactctttgaaggcttttgttggagttcccgccatcaggagaaaaggaaattgaaccgcgttgcttgttcttagccgaatttcctacctctttctccggagaataagaaattgcacttccataccgcttgttcacccgagatttcttggttggagccattaagcgctacaccaaatctgaaaattgttccattatgatcatcaacaagtttacgaaactcaaaacaaaatactcacactctatattacctaaatttcacttgaagagaaaaaataatagacaaaatatataccatataaaatcccctaattcttacccaagaaaaaaaattaaaaaactcaattccacaagaaataaaagttaaacgcaagatgaatttggcataacaggtcaggacataaacctcagtgaatcgtctgagaaaaaccttctttttttttttctagtttcacattttccattaattcaaaaagaagttgaaggaaagcagtaatttcgtattcactcaattacgactaaaaaaaactaacaaacgaattttcaaatttgaaatgaaaataaaatttcattttaatatacttttttgtaaatatatatatatttatatataaatacctcgaaatgccgaaaaaaatgctgaaaaacttatgcaagaaaatcaccaaaaatcttcatcagcaatttgactatcgaaacaagcaacatcaaataaaaaaccaaagccaaaccagaaaatttaaaaaacaaaactttaagaaattcaatgcaactaaaaaaatatttaaaaaaaataaatatatatataaataaatgaataaagaagacagaaataaaatttaaaagcactatcacaaaattcaaatgtctgtacctttccaaaccctaaagtcatagatcgaagggcattagcagtgatagggtttatcagaatctaaatttgaacaaattacagaggagaaaacaaaaaaaacaaaaatgataatgttgagagagcgattctgttgaagcaactttgagcagaggagagagagagagagaga

SEQ ID NO: 298237 - DNA, 3314 bp, Cannabis indica
tcgaatcaccaccttaaaacactgtcaagggtatgggtaaagagtagtataaagatgttcaaaaaaatttattttgaattggagaaatagtaattatttatttttgtaataaataaataatttttcaaattaattagatagggaaaagacaaaaattgctaaaacaaaatttgtcaagacaagatttatcaagttaaaagtacttgtcaagacaaaagacaccaaccttgtcttaaacaacaagggtaggtgcctagcttatgtcctgtccctatggggtttatctttttagattaattaattatttaattaattaaattcgataaatatttgaatttgaaaagtggttaaagatatttcaaagttgttgaaatatcctctcaagtagttgagagattatctcataaatatctttaactaaattcagctatagatatttatttatttaagcaattaaatttgatttaattgaagagatttaacagctataaatagaagtaacactttgacatcactttaacactatgatttttgaaattatagaggagaaaagaaaattgttttctccctcaattgttcttgctcatgtgttgagaactcaacaagaacaaaatttatacactttatcctaatagtccatactattccttgtgtgtggtagatcgatttggaagacactggtgtgagtccaattgcaattcctcatcatctggattaaggggtacaacgtatgagaagtttcgaggataccttgataggcttcaagaaatatactctaaacttattatttttattattttgatttaatgtacacccatatggagatctattgggatatggtacaatgataatcagataatacgaaactctttcgctgcttacccaatttagtaccataaaaaccaacacctaaaacttttgaagaagttataaagtgcaatgatgcaaagaagtggaactatgcaatgaatgaggagacagactctttgaggaagaacaagactatggtttgtgttccaagacccaagggaaagagtattgtaaaatgtatgtggcccattaaacagaacgaaagatgtcatatgttagagaaggagaaagaggatatgagctagatcccctactctaatgcagttggtttgaggatgtatcgtatggagagtaccataccagatactgcatatattgtaagtgctcttagcaagtatatggaaatgcctgacaagatacactaggtggctatgaaatggattttttggtacttaaaagggacaatagatgttggacttgtgtttagacagtcacaaaattaaactttggtggaagggttttgtgacccaaacaatgcaggggatagagttagaaggaagtctactttagcttactattttatgattagatgtaattgtgtgagttggaaagtccaacaactggtggtggccccatcaaccattaaagtagagtatatctcagcaatagaagcaataaaagaggtggtgtggattaaaggagtgctaaaagagttaaacttgctgagtagtgtgcctatagtgtatgctgacaaccagagttgtgttcatctctgtaaaaatcatgtctttcatgacataaacaaacatgtggagattaaataccactttataagagacaaagtgacatagggagaggtcgcaatggaaaaggttctcactagatataaccctgcagacatgggacctaaggtggtaaccctagctaagtttaaacattgcatgaacttgctaaggatagagaaaggaagctgaccctagtggtcattaaagctaagaccctcagagcatcatcaacaatcattggttgcttaacagaagctaggtggaataatacagttaaccagagtattaaattactaatcattgagtatgaaatgacatttttatccacaacacattacaacttacaacaggaaaaaaaaacagaacacaagagataaagacaattacaaagacatactctaccaagatcaagaaacaaatagttacaaaatcaattacaataaatatcactggtggctcaacctaaccagatcagttcacagacgtagatatatttaaaggatacattttttggttggaaacagagccaagaaagagccaaagagagtgcttcagtttaagataagccttgagagagagtttcctctgagagagctttgtatagctcggtttatttgttcatgtaaagaaaaaaacaaaagagagatatgttagttatcaagagagaaaataagagagaaatcaagagataaatcaaagttgtaaatcatacttttgtaacctgttgctgatgaatagattcaagctctgaggtagcatgatggagaagtatccggtaacattgggtgaactctgagatcaatttggtgtctttatctttatcatttttatgtttttatttctcatattaatctctataatttttgatattgtgtatttgtgtttgtatgttcttagtttaagttttggagctttggtctcgtgtttgagtggttgaatttttctgggttcgtgtttgagaaattaggcaaaaaaaagcttgagtttttctgggtttagagaagagtaaaaccctttagaacgtacaaccctaaccacgattgttgtttcgggtagaagaaagaagaagaatagaaatcgaaaccaattagaacccttagaaccctacccgccaatagaagagaagaagaagaagcaaagaacataaccctagaacccttaaacctagatgttgtcgtgagtagaaaagataagtgtttttgagcagatttgaattttgtttagaagaaaaaggaatgattgaagtaggtttagggttagaaagtttaccttttatactagcgttagtatttagggtttgttgacttgtcttttggctgatcttggtgcggctcgaaccattaagtgaaaagagagtcttttgactcttgatttactttgtctttgattggtgagagaaacttgacttttgggctaggattattggacctgaaagtagataacaaagtttgtgagtttataaaaataacactttttattatggatgcataatataaagtaaagattagaaaaataccccttttgtactgtggaaaaattatgactaacaatgcagaatcaaaacaactaaacttaaacaatcaaattattagcaatgacaagactatcaaattaagaacaacaatcagatggaaaataggagcaaacagagtatataagaccaaaaacactaaatgaataaaataaagaaatcaacactaagatatatactggttcaag

SEQ ID NO: 298238 - DNA, 2333 bp, Cannabis indica
aacatacttgtgagtagatctaagatcctggtaaaataaattccaacattaacatcatatatagccggatactggtttcctctcacaaaattcaactgggatacaatctacctcttgcatccataaagtgcttgtaccaaatgtcaaaaaaatgtcctccaatgttgtgaatttcaaagctatccctagaatgagagtcaccttccaaattctcacacatcagtcttttccattggtcatgagatctctccagctgaacacattgaagcaatcttcaatgaactcactagtgactacaatgtgttcatcacctctgtgaatatacgaactaataaccaatatactgtccctgaaattgaagctttactcatggcttaagaagttcgttttgaaaagtcagctcaagaattggatttctcaaagcctgaagcaaatcttactcacacgaaaccattcactggtggcaaaggtaccttttcttctccctattttcctaattcgactaatcgtggctctcattttgtgtctcgaggtcatcaaatgcagaatagcaaatgtgctatactcagctcatcctcctcctcctggctttggccaacaacctactcaaattacaaccagaggaagtcaatctcgtggatcacatccaccttcaaaaggagcttttacatatggcagcggccaataatcaccatggggacaaaaggttcaatgtcagctgtgtcataaacttggtgatacattggccaaatgcttttatagatttgataaatcatttcaaggaccagaaaccttgcaagcatttgttggcagtgccaacattgttgaagcttctcaattgtatgcttcaccagaaatcattagggacaccaactggtgtccagatataggtgctactcgccacttgactgccaatgcacataatctttcctacacatgactgccaaggtgatcaacaaattcaaatgggtgatggttcaggtttgcccattcacacagtagcaaaaacatcttttctttcttcctttcactcaaaaaatctggtgcttaacaatttgttgcatgtaccttccgtcactaagaacttgttgattgtctctcaatttgctaatgataacagtgtttgctttgaattttatccctcttgctgtcttgtcaaggatttggatacaacgaagatcttgctggttggaggcttgatcaaggtctatacaagtttgatgccattcaactccactctctcactcaaatagagcagcctaatacatcttcatatactttgtaacctagcttaataagttcaaatcctcaatgtaacactcatgttgtccctgttgttaatgctaaatatttattttggcataacagattaggacaccctacaattaggattgtacaacatgctttatcctcttgtaatatcaaaattaacaacaaaacaactgatgggttttcaaatttatgtcatgattgttgcttaggaaaatatcacaaactttcctttcccacatccactactatttactctaaaccactacaattcttgcactctgatttatgggaggccttggtcgtattttggctcattttccttcaagtatgacacgagatcttaccaaatgccttttcgtactcgcccaacaccttactttcttaaacctatgcgaaatcttgacacatgggagtgtcttggtcgcatatggcacgctcttttcttctagccccaatgatgttatcttgttctttgtacttcattatttcaacaagttaagtctttagtgccttgttgaaattcttggttttgaagtgaactggctcgagtttctattcagacttaactttattagaaatattaaagaaactagcctagagtgaaaccctaggtatacgaaaattaacattttctcaaggaattagtctcatatggcctttttcttgccatgtggcattcaaacaaggtgtcatttagtactgtagtcgagtttagtctgtcttttgtctttttcgctttttggtcaaagtcatgaagttgattttttaattttttaaaaatcaagtataaaaattttaaaatcaaaggagattattaaaggcgacaacacataattgacaatgaatcttgatagttagacttaacttcaatgttctttcattgctttaattactttgctttgtatctatttatgtgctacattagttatttgttctaacattgttttgacatgtttgaactttaagtgtttatgtaattgtagatgttatgggatttttttattttaggttaatattactttaaataaacatttatagtactacaagcaaaaataaacatt

SEQ ID NO: 298239 - DNA, 1274 bp, Cannabis indica
ctcaaatacggagacattgcattgtaacttaatcgcaatatcggcaaattttttacctttcaaggtgcttatcaaggatttttgcaactggtttaaactaggcgagttacttgtaacattactattgccagttgcatctataagaatatcttttactattttaaacacattgaaatccaaagagacacatacccaaattcttaaatcaaacttttctttaatttcatcatcattgtatactattttgataagtgtggtcttacctaaacctccaatcccaattacagatataacaaagatttgattatcactttcttgagttttgtcctttaatactatatctacaaactccctcttttcacgatctctaccaataacgtctgaaaggttaacaaaggagtgagtttctctgaaactttgtgccacattcaatggggttttaatcaattgaaactgtctcatattcttatcaacctcatctaacttcttccttatctctttaattggatgagctacactaaaacgataggcaagtgggttggaatacgaaaagaaacgacgtacctttctattgaaagaggcatattgttggacaacgtttctcctttgtagttcgcactcaaattcatccaatacatccactgcatcgtcgaatatatctttaagctgagtgtgattagcttaagcttttcgaggtcatctttcatgccatgtgccaagctaattttgttgtaagcaatggagcctaacctgtccaacacatttgcagctaaaatgtaagctagatatctgccattttctcaatcttgttgggaattgaatttagaagactaatgactaacacgcaaaggagttaagacttgaaaattgagactgagagagagtgtataaagtataagagcattgccattttcttttgctgacttgttcttattattgcattggaaataagtgggttactgtggcaccatgtacaataatgtgcactcgattgtggacagcactaatgtgttgtggttggtttagtggtcatctttctcttattttcttcttacaaacactcgtatctttctttcttttcacatctttatgcattaaactacgtgaaaaactcatgctaagcacgagcggatccttagaaaaattaaggtaagcaattgttcccctaaaaaagttagtaaatactattttggaccatctgttttacaaaaattattaattggactttgtgttttgttaaataacaaaatagaccttttattttctaaaatagt

SEQ ID NO: 298240 - DNA, 3078 bp, Cannabis indica
tgttgtattacctctcttacccagtttagaggccttaggcctagatttcctttgggccacagcaccaaatggatccaggagtcccttaaacaccatggccaattgtttcacgtaaccattatccacccctagacacgtgtcacccgcatcagtcccgggtccactcaatgaaacattctccgtactgactcctgcacccacgatctctgctgtacccgaggcaccatgcacaatggacgtcccttccccactaacatcatggaccaagataccctccatagtaccattctccccggcgacagtcgcaccatcagtcatggccaccggctcctccctcaactcacggccaaccgcctcttggacctctcggtaaatctcagtgccaaccaaggcctgttcaaagttttcaacaatggggaggaccctctccctttcctcttccatattctcagcttcttgctcctcgcgccgaagtcggtggagctcgtgatactcgtagtcagagaagcaatccttaatccgcgaacctaaccgcatccacgcaccatacatagggacttttttcccgaaatcgtctgaaattagcctcctttccgactgacattcatcttcatcatgtcctatcagtccacatttgtaacacaacatcaggaggttctcatacttgaaataacaccatatgtccaccccctcctccgtctggaggaagtgccctactgaaaaaggtttattcagctgaaccaacaccctgaatcggataaactcattggtggggaagccgttgcgccacaaacggtcaataagcttgacttcacctagccttccagccatttttgacacattttccttagtccagaaacggacagggacttcatacactcgcacccataacggaacagcttgaaggttcgccgaggaccagtccccatcagccggcattggcttcgcaaataaaaaaccatcacaaatcttccaggagccctgtctcaccacatactcaacttcctgtcgaagcatgaaccgcataatgaaggtctgtcgagccacctccgtaagctgccaccctcgcttaagatgccatttttgagtaaggatcgaacgtaacaaaccattaaaaattatctttttggatatcacgaaccaccacagacctctccaccatgtctttccccaactccgccgatggcacgagcgaaatggtcatatccctcatgctcaggctaatgtcgttcacatcccccttggacccagactccacctctttacctttatccgccataagaccagcacacagggaacaatcaaagaaagagcaatggacagtagagaaaacgaagaacaaacgagagaataccacgatacagggtttaataaaaccctagatcactcgaaggaggatcaaaacaacgagaaaggaacagtacggattagggtatcctacactgtacggagagcaaatttgaaaattgttcagggtttttaaagaatattgttaactaatcctaaagcgcgacctataaaaggtgttgggaaccactgatacctactagtgatattctatatttaattgaatttttatacactttcaatcaaaatttaatacatttgttgacttttttacgtagtttatcaaatatataagtaatttatacctaatgcattgaaataaaattgtaaaatttgggataaatataatgtttttttaagccaaatttaacttaaaatttacaccatccattggagatggtcaagagatgtgtgaaactattaaactatgtctatgacaataagacttccaattagggatgtacacggagcgagaaattggcagggagtgctcccaccgtccccatccccgttaagaattttaatccctattcttgcttattcccccgatgggatggggcaaaaaattccctaatgggggcgggggcgggggcggggacgggaacggggcagaaaattccctaataaaaaaataaaatttataaaaatattaaattacttaaaaattaaaatattacacattaattattactcaataaactaatcattattcaaaacacaacttaaaattcataaaaataatactaatatactaaaaaaatacaaacataaattataaaatattactacaaatataaaatataatattaaatgggtcctcgacaaggcgaagagtgtgattcccgtgttcgccctctttaacatttagacaaaaagtaatcctcattcctattttgtttctcattcaaacgggaattcccaccccattaagagaggcagtggcggaactatgttattgtatggggtggccatggccccccctaatattttggggaatcattttttatatatatataatttataaaaattaaatttagttattaaagaaatatagttagtttagtttacctcaatgtacataaatagatggtgtattattatatacgggttgtataggtgtattctatttcttatattaatttaaaggctatgtgtaggatttgtccctcaaattaatacgattatcaaatcgtcttttaaatttatttactattccctttgaactatgtcacaatgctgaaatataagacttctaataagttttatccaatgtggctaataaaatagtaatgagacttgtgtgtcattgtcacataagtgccacatgtataatttaaataaaaaataatttaaaatttaagaaatttcttttcttatcaataattaataagaaaatttaagattaatttatttttattcatataatttagggtaaatactattggatcttgtattttgcaaaaagttactaattggaatctatattttattaaatgacaaaatggaccctgtatttttgaaaaatgtacaaataggaccctgaattgattttttgtcaaaataaaacttaataataatttgatctaaagatataacaaatctagttacattttctgtatctgtttgtgttagaaattatcttaaagttagttatattaaaaaataaaattgttaaaaattgagttcagggtcctatttttaccattttggaaaatatagagtctattttgt

SEQ ID NO: 298241 - DNA, 2479 bp, Cannabis indica
attggtattccacatagtttgtgaaaggtcctttctgaccttcgtttagttagtgtagatgcatttttagcttaaatttaccttacactgtaaaacaagagaatttatctatgcaaatctatgaggacacaatttcagagaatgaatcataagactttgcgaaagtcagcaagtcttgaattgaagcatattatatatagcgaggagattacagagttagttacaagaccttgaaaagaaaaaagaaataacaaaaaagtaacagcaacaaaactaacaaccttgagctaacaactaactgttattaactgtcaaaactaactcagtacactgcttatcatacacttattagtttatttggaatctatttatgaattggtaatgtactcactttattttagttgtaaggatcaaatttatttgatccggcaaagacaaaggctgatgattttcatgtgagcatttatcgatcaaaatgtgaagtggccatctgtacaaatcttctcagtttcactttctcgaaccatatattcagtaatagtcagaacacatgtccatgcatgtgtgatatatatatatatatctctataatacatatattgctgcacatattttctttcttcaattttatatacacatatttgacccttttcctcatgcacactatatatacatagcacattataaattaatatatatcaacagctcaaagttgaaaaagactaattatatacaaattataaatatatataaacctaagagaaatatttgatgagtaggattagtcttgtcaaaaaaatcttcatacatattcttgtcaaattaataatgatattaattagtagttattgagctgtatcaacaaagaaggtccaaatcaatatatgctattgtcaaatataatacatataatattctaatattcgatcgagtagttattatatatatttaataactataaagcctaattcatctatataaaatattttatgcaaactatatatatattgattatgggttgtcttatcttagattaaattgcttataaaaggttaatattaatttgcaatcaattaatttccaaatcacatatataatatagtgataagaagttggagaggatttctcactctcatcattcgaaaatgttctctaattatttcttcattagtacctacaacattcatttaatgtagtagataatagtacctttctgtatgattgattatatatatatttatatatattattctctaaagggtctaccatttttataaacaaggttagtggtgtggggtactagagtgtgtgcttattttatccattgactattatttgggtacttagagacaataccatgtgatattgtattccaacttactataaatatgagcatctttagttgtgtcaaccaacaactcaactactcatccaatagccaaaaaaaatctccaattctttcccttttgctataatcttttctttgtacaaatttcttctccaatattcataatgggtttttctttgccaggagtagcaccaactaagaaatttctacgacgatctttgtcaaactcgagcagaggagcatcaaatgttttcgatgtcccgaaaggccatttcgcagtttatgttgggaagaatgaaaagaaacggtttgtgattcccttgtcgattttgaatcattcttcgtttcaagaattgctagttcaagttgaagacgaatatggatatgatcatccaatgggaggcctaacaattccatgcagagaggatacatttatggatctcatatcaaatctaaattaatgcttcataaaaatgaggcacatatattcgttcatttacaatattttgtaaaacaagaaataggtagaaagattcttttattattattgtatcattctctttacttgtggagtcaaaatgcagctcccagaatgagaattaataatgtataattgagatccaatatttgcattaattgttataagaaattttattgtttaatcatatatatttatgatttcgtaaaataatgttgatattatgtatatattaatattatatatttgaaatagataaaatataattttttttaagaaataaagttttagtgtgatgtattttaagcaacttgatatatggtgtaatgtaaaagtgtgttgtaaaatagagaaattaaagattttagtgatgtatagtagctaacgtatgcatcttacacattgttaatatacaagattttctactattataaaaaatcttacttttagttacaataaaatttgcgactaaaagtaaaaattagttgtaagttattataaattatgatttttatgttgtaattaaaatgttcgtcactaaaagtataattagtcacaaaattataagttgttataactaattaaatgtgtttttagtcataatacttattgtgattaaaattaaattaatttagtcacaaataaatttttat

SEQ ID NO: 298242 - DNA, 3456 bp, Cannabis indica
aaaaaaataaaatattatataaaacaagtttttacatatttgtgattataataaactaaattataacattatcattataatagatcttaacaactcacattactttaaaatttataatttaccaaacactcaactcagctttttctacagttttactacagctgttttttctcacagcacagctacagctgttttttcccacaacacagctgtgccaaacaggccctttgtttgctgcttctccaagtcattaagttttcccaaaaaaacgtgcaacaccctaaagttgacttcctatctgtgattgaacctgcccaatcaacatcagtaaatgcttctacaattctgttattactcttcttgaagagaagacctttaccagggctaccttttaaagaccttaggatacgataagcaacttcacgatgttccttgtaagggcgatgcatgaactaatttatcatagtcatagtaaaagcaatatcgggtcgagtatgagacatatagataagcctccctataagtctttgatagtgttccacatctactaatcttccttgatgaatctcaccaagcttcttgttcggatcaataggattatctattggacaacactcgctcactcctaaatctttcaacaagtcaagaacatattttcattgagaaataacaatcccctgtttcgatcgtgccacttccataacccaaaaatacttcatctcttctagatctttgatttcaaataccttagagtatctgtttctcatgccttctaattcttcaaattcgtctcccgtaagaagaatatcatcaacatagataattaaaattgtaattttccactatttgagtgacgagtgaacaaggtatgatcagattgtgcttgtgaataaccttggtttttttaccacttgagtaatcctttcaaaccacactcttggtgactgtttcaacccataaagagctttttctaacttacaaacttttgtgccaaactatttttcaaaacctggtggtggaagcatatacgcaacctcttccaaccttctgttcaaaaaagcattcttcacatcaaatggttgcaaaggccattccaaattggcagcaatagacaacaaaattcgaatagtatttagcttgacaataggagcaaacgtctcagtatagtcaataccgtaagtttgtgtaaattccttggccacaagccgagctttgagtcattctagagtccaatcactgttaaattttggtgtacagagccacttacaccccacgattggagttcttttaggtagatttttgtgcttccatgtttgattcttctccagagcactcatctcctcattaacagcttccttccatttgagaacaagtaaagcttcttgtatattatttggaatctgaacactggaaacattattggtgaacgtaacaaaagatgatgagagtttagaagttgacacaaactgagacataggatatttgacacaagatcactttccttttcttatagctattgggagatctattccgagaatagaatgagaagagatttgatcaaaaaaataggattagagttattacttggctcaagatctgatctcagttcagatggttgacagggtgttggtaatgttgtgactttagcttttcgataagggaattttcgtgcataaacctgaccatatttacctctgatttggtcgttgcacccttgtttatcaagctgatgagaattatcatatgacacaatatattcaacatttttattttcagtatttatgagattttcttgctgatttttctgcctattttcttgctaattttctctcacatgaacctctccaacatgaattatatttttgtttcctaagtcatatcctagaaaatctaagtctaatgtaggatcacaaaaattattggcaatattcctaagattatgatgtggattaaatctattcttggtaactttaaaatccaaatcttatttttcccttgattctccccctgaagatcgagattataatataaaatattttcaaaaagcttgacatccatggtgataaatatttttttttggattaggatcaaagcactcgtatccttttttatttggagcaataccaataaaaatatatttttttgctcttgggtcaagtttactagtagccctacttagatttcgaataaaaatagtgcaaccaaatatttttatagatatttcataaagtaaacagagtttggaaaacacttctaaagaacagaaataggcgttttaaactataaaagttcagaaggaattctattgattaagtaggtagcatgtaagataaaatccccccaaagatatttaggtacattatttgaaaaaattaaagtacgacttaaatggaggtgcctattttttcttttagcaacgccattctgttgaggagtgttgttacatggactttgctgaacaattcctttttcagtaaaaaaagtacctaaaacttttgaaaaatattctcacccattatcacttcttaaaatctctatgctcgtttaaaattgattttgaatcatgttattaaattttttaaaaataccttctacttctgatttttcttttagcaaataaacccaactcaccctagtatgatcatttataaaagtaataaaccagcatttaccagtacatgtagagacccttgatggcctctgcaggtcactatgaacaagagaaaaaaggttgtgatggtctatacacacgtggaagatatgtgctcttatgatacttggataagatgcaaatttcacattgaaaagaagagggatttttatttcgaaaccaaaaaaaggaaataaaatgttttaaataatgaaaaatttaacatgtacccaaactaaaaatgccacaaataaatctcatcctcattgaaattagatgcaacttgaaggcaagagcttcgtcaggtctctttattcactaacattccctcatctagatcataaagtccaccacactccctagcactgccaatcatcgtctccaagacctgattctgaaagacacaatgagaagaaaaaaatgttgtagtgcattttaatgtagatgttagtttactaatcgagatgaggttacaagacaatttatgaacgtgcaaaacattagtgaaagttagtgtatcagagagttttacatctcttacaccaataatagcagaaaaagaaccatctgctatatgaattttattgttccctgcacatggtttatatgagaaaaaaaacttgaacaactagtcatatgatcagaagctcctaaatcaataatccatgagatcttaggtgttgggttttgtgccctaaataaaactaatttcaatataatcagatttactaattaataaagatcagaaatcgcattctatgttacatggttcacataatttatttcatgattatgtttaatgtata

SEQ ID NO: 298243 - DNA, 3254 bp, Cannabis indica
agatcctggtaaaataaattccaacagctgccaaatgaaatcacgttgaagacaagctcgtagccatttatagtgtgaggtatatatatgattgggtcagaaagggtggagtcaagcatgctatagtcgcagtagattatttcacaaaatggaccgaagtagaaccaatgaactcaattacggcaaaaaagcctagattttgtgataaaaaatcattctttgtcgatatggactgcctcataagatagtctcagataatggtaagcaatttgacagtgacatattcatggagttctgcaaaaagtacagagtcgtaaaaagcttctccgcagttccaagaccataagcaaatggtcaagtagaagtcgtgaataagatattaaaagtcacactcaaaaaaaagctcctagcttgcaaaaaataattgtcctgaagcattgccgcgagtactatgagcttacagaactactacctgaaacaccacaaaacactctttgttttttatggtatacgaatctgaagcaatggtcctagtagaaagaacatttccctcccaaaaaagaaccaactatgatctggtcaccaaccagtcattattgcaagaattgttggatcttgtagaagagctttaagaggagtcacaaattcgacttgctacgtatcagaggaatgtggcaaaacactttaattgtaaagtgaaaaatataaaattctccatagaagtcttggtcttaagaatggtctttcagcttcagaagaacctggaggggggtttgggcccgaaattgggaaggaccttatgatactgaagatgaaatagactttgggacctacaaacttaaatggatggatggttccttaatctcaagagcatggaatattgatcatctccgcaaatactattatacttaggagtttagtatttaattttctttaaattttcaatcaaagaagacctattgtaaattaagaccctttatataatacactatccttttaaactcgtgaaaagtgacaaaaagtaacaaactatttagtcacttaggggagtagtagggtatagagcataaataactcataaaatatacattgctcaaaaaaagagacccttggagacaggccaataaagtgtctcccctaacgtgtaaaagaaagacctcagagatagtctagataaacatcttccaaaagtacaaaaaatcattaattaattaattaagtatagataaatggtggatcagtcaattctgggcggaaggcgaggacccaaggtcttcatgagcttggcttttgatttcacattcttcccacaaaaaggagccggaacagcctcagggtcggataaaaagttgaactaaggctcataattgttggacctccaagtcatgaagacaccgtgctcaaagcgcctcacacaattctcacaagtgacaagagccaggagagctttcttggcagctttgacagcctccaatttagccttctctcaaaagtcatgaagctcctcaagctcaacaaacattttgcatgcggtctcgagatccttctagtggagttcctcaagtttctttaccttgtcctagagttccaagacctcctcttgagccgtcttcaaggactctccgcccacctgctagtcccgcacctgcaaagcattcactgtcaagacctcatccttgagtgcttcctcatgcgtgtccatttcgttgagcttccttagagcctgagcctcatcaacgccaccatattcagccaatgcaaacccgtgatcaatcaaagtcttggatagacgactgacttcaacagtaatctgaccaatttcacgaactaaggttagcaaaaaaagtgttagttgagaagtaaatggaatatgcatgattagggacttactgaggtcaaattcatgctcacgtcctagacctaacaaactaggttggaggaagcacagacggcaaaactcttggttagaagttgaaccaagtccgaagcaaaatcacccatcaactcagaagcgaaaggaactaaggaagaccccacgaagcttgaaaattagtttgtcatgggatccatgttaaggtcatgaattgggccactatactccccccggagcaaaccgtcttggttctccatcaaccactttaacatgacctctacctctgcattctctttggtctgttcatctacaacatagttttgcttagaaatcctaagttactgatccccctcatccggatgaatgagagttaggggaatggatgggacacctggaaaagtatgagcttcaggaggggttcgtgagtccccggtattgtgggaagtaattttagcagccttgagtttctttgaagatgcagagtcaccagcctcattcttcctattttgctcctctaggggtaacttttccttatcatctacacatacgacctctgggcccgaagctcctagagtcattttgactcttgaaaaatcaacaagagagatggtgttgccttttgcgagactcagagcgtccatggagacaaagatggcatccattggtctaactgcaaaaagaaatgaaagaaacgtaaggaatacctaccgaaaggatcatgaagataagacatgcagaaaaaactaatcctacccaggcggcctaattcttccttagcaaactcataaataatgttgctagtatcgtcatcttctaagaaactattcaaaggaaggaaccaacttgtgttggaaaaattttaccaggatctatatttactaacaagtatgtttcattaacatcctaatatgaatttctaaaacaatgaaataaacacataaaggtttaaggaaaccttacattgggtgcagcggaaataatgactccttccgttcagatctctagcccttgattcctttctgtagcagagcattatcaagatcagaacctggatctctttctctccttcttgagctcgattctccttcttgttgattggattcttcacagtcttacgcactatgattgagataccacttgatgtgtgtgggcactcactctatcactcaagggtatgaaaaaattgaagaagaaaagaggaaagatgatttcggcctaaggaatagaataggaggcttaagtttaggctagattatattagcattaaatggtagaaaaataaatggtaaattacactaagtgtggccggccttaggatgttattgggccccacttttcaattttgccattttgtcattttcccatctcattttactcaaaa

SEQ ID NO: 298244 - DNA, 3198 bp, Cannabis indica
ataggaaaaattaatagtttttagtagctaatgtttaatattggaaagtttttagtaattacacagtgtaattacattcaattctcatggggggccatgagaattggagagtgtaattggaacccctcaattacttccaattacacagtttcagtgtaattacatggtcagacaaacatgccaaattgtgtaattaccttcaattacacacaaattcaattacattgtggctttccaaacgcaccctaagttttaatttaacaaaaaattaattcagggtcctatttatacaattttggaaaatacagggtccattttatcatttaataaaacagaaggtccaattaataacttttacaaaacataaagtccaaaatagtatttacccagttgtgattagttcacgtgcggagcacgtattatttcactagtatttatataaaggtgagcttatatttcttctaaagcctgaaccttttaatatgttataatttctttataaatttcttcaccactaaatattattattttttaaccactaaaactaaatattattaatttagtaagatgagcacgtgcaacgcatgtgctactccaactagtataactaaaatgctgttaacaaaaacaaaatttgtacttttaggttttttttttttttttaaaaaaaaaaaaagagagagaaaggtagaaaaacaaaaagggggtcaaatacaaaatgggtgaagaagcaacgagaggaaatcctctctcccagaagagtctgaaagcttgctatgctaagaaatgagcaacccagttgcaatcactaaacataaatgataaaaccattacaaaatctatctttcatctcttccctaatatccaaaaccaggttctcaaactcaccaaaagcttgattgtctgcactcaccatcttcactcccgtttggcagtcttacaacaccttggagtttctcaggtgaactcgtcgagcttccttgatttcttccctgattgcaccgagctcacccgcaagcggagacaatgctacgcacccatggagtccccccaaacatccattaaaagtgaatgattttgtagttctctttgaaaatggttctgttgttgagcctaccctctgtttgttttcctcgaagaccctctttgttacactcgacatcaacaagaatggatctcaaggccccacactccgagatgaacaggtccagagcttctttcccagattttaacaatagaaaacttcccattctcctcttcgacataatggataccattgttcgtgaccctttttaccacgatgttcctgccttcttcaggtaccaaaattatgtctttttagtaataagcttcttttgttttgaaccttattcaatttctgttcatattctcccagatttctttccaatttctttgacagtgttaagctaatgcttgtggttgttttaaattttgaatttttacatctgggtatttaagaattagttcttatctaagtcaaattagtagaatttttaagttttctcgttaatcacatttagattttacaagcagaatgtctatgaaggaactaatcgaatgcaaacacccaactgcgtggctggaattcgaaaaggggacaattgatgaggtgtggaggtgtctcataaactctttaacaatccaaggcttttcaccagtttccatttcttggttttattatagttctttatcatttcatcttttaggtagagctagccagaaagttcttcaaagatgaaaggccattggacttggaaggtctgttttgttcttttatcttaatatctttaatttgtttatctattcttatagttcacatgatttattcgtgttcatttctttgcaggtctcaaaaactgtatgaaaagcggatattcctaccttgaaggagttgaagaattgcttaatgcacttaaaaacaacaactatgagatgcatgcttttaccaactatcccacctggtgagatgagaattctctcataaaagtttccttttctctgaagaattggcacatcattttcaggaataactcttttgcaggtgtgaaatgattgaagacaagttaaaaatctcaagatatatgtcctggacattctgctcatttaagaatggtatgctaaccatttaatttgtaattctctcttagaatttgtgcatatgtttctatatttataagttgaacaatggcccagttccatatttccaagaaagtaatttgagtcaacaactttattgaattctcactatgcttgcaaagaaattctttcttacccaaaattcttgggttgaaaggtgcatgatccttcctagttgctatatctttcaggaaagaggaagcctgatcctgattttatttggaggctgtggaacatcttgaagttgatccagcaaactgcgtatttgtggatgataggtaaatatcttcttattctaagttgtagatagtcattttgccatcttcattatcacacacatctctccaactgtcatataattggcgattatttcctgtacattttgtttggttgatcagttttttttcggttaaacttttcaattatcattccactcacttatctttcaaagtttaaattttgataataaaacctttcaaattacttaaggtgtcaattatttttcatgctaacataaacggtttatttgtgcttttttgtacacgacatgtttattttagtacacctaatattaaatatgccacgtgtacaacagtatacacataagcagtagatggtggcagccggatgatattttaaatttgctacaatttagtagtttgaaaagttttactgttaaaatttaagcttaaatgattaaacgatagttggaagggtttaaccgccaaaaactcttagtgaaataagtttcagtttactgatatgattagagttgtttctccaggatgaaaaatgtggaggctgccatagctgttgggatagttggtcttcattttaagaatgcagaaacactgcgtcaggatctgtctctcatgggcattgacgtttcagataatgaagttaaccaaactgaagacaacttgtattaattcattcacaacaagcaatatatatcattctttgcttgaacactgttgttatcaagcttcaacctcaaaaaagacatgtcgtctattgttttttttttttaaaaagttaaat

SEQ ID NO: 298245 - DNA, 4721 bp, Cannabis indica
acctgtctataaccttaataaaaagaagaaagtaccgctttaagcacaaaaaaggaatgtaaatcgaggaagatataacagtacagaataaagtattagatgagtaccggaatgtcattatcaatggttttagggattcctgcaacagcaactttgagaccgcgtcttctaatttcctgaagaacgacatatttgaataacagctaaactattaaaaacaatattgattccaacaaaatcgttttattttgtcaaattcactgtgaagcaaacatgtcactcaaagaggtcatacaacatttgagctagcattgacacacaacacttccaatcgtgtagattacagaacacttcgtaaataactgtagccatgcgagactcgcttccaccaactccatgaatataaaatggtggaaacaaaggaaataaatgtgcaggaaagcatacaaggaaagaagcaagtttggaaatttagtgttactgatcagccaatacattattcttagtctactagctgaattacctcgaatataacagctgctcctctttgagttccatcacctcctattatgtaaacctggatcgtcataaggaaatgatcataatatacacaagggctatagtaatcatataagcctaaacataaatttataattcaggccaaacacgagcaccttacctgatttatcccacgatcctgaatgctgtcaacaatcttcgaggtgtcatggcctccccttgatgttccaagaatagtaccaccacgtttatggatgtcattgacaaccttcggtgttaaagtaacagtgtttcgggaataaaaacccctgtaccctccctaacaagtcaagcatgaattttctagtcagactacttattcaagcatgtataccaacacactaagcagacgctttttgacttggtacaagaaacaattcactcacatctatcccgagaattctggtgactccatacatgtgataaagaccacaaacaatttccctaatcacagtgttgagtccagggcacagaccaccacatgttactatacaagcgtgcacttcgtcggattcgaaatacacctgagcagcacagatggaagaaacataaatacatcgtaatggaccattttataatcgtacaaacaagaatattttgcataccttctgacgagggcctgctcgccgaaaatgtgtccctcttggactatctttgtgaacaacaatctgtaaaatattggaatgaacatgttaaacaactaatttactagctctacctttctcatacacaattaagtgccattttttctgattcatgaaagaactttccaacagatcgtaagagatctacgatcgttaaagaataaaaacaagaatgttaccttttgaggaacagtatcatctacatgaacaaaatattgcctggcaaaaaaacagaattattctactatatcaaaacataaaaccaaactcacttaatgcagaaaagaataaatgacatacttgaccactgaataagcagggttagatcgcaagggattaggataattctgccatgaaatcaaacactaatcagcaactaataaaactaacaaaggatacataatttgtctacttgctttttctttttctttttttatgaatttctaatcaaatgaatacagttcctccaaataactaaaaatttaacgtaaaaagagaagacagcaatagaaaattacaggcagatcagcaatgtaatcgacgagatgaggaacatcctcaagtacatatccatagtcgcctttaacaatcttcatctgagtgacaggagaatccgccatttttaaagcagaaccagaggatttcttttgggttgggtggtttaagaaaaagttttataacttttgagatgctttttaataaattaaaaacgaaactaatggtaatttgtatatcacttcacaccactcaaaaattcgatgactcccacatttacaggacacacgcgctcctacacaattagcagaaaatggggaaaaaaaattagagtcaaagttgataaaactaataattagcataaaaccaaacaaatggtaaaaacataaattatgtcattgtaaacaaaagataattgaaactggaaattaagggcaaacatcaaagtacatgacctcagaaactctttaatattttaatttcttctattaagtacatttaagaattgcttgaaaaccaagtctctttttgaacacacttttattagtatcaactcaatcaactcaatcattgattcattatcatctcattaaacattttaaacagattctttgttttgtaaggaaaagaccaatggaatcagtattacattatatagtagaattttgtctttttttttttcatccaaaattccacagcacaaaaagtaaccactagcagcaatatagacatcaggagtccattgttgataacttaatatggcgcttgtaattcgaaaaacaataagagtatgcatatagaagaacctacatgttacaatacaagtttttaaatgaaaaagactacttacaagcattgataaagactagcaataaaagacacttttttatttcttcttgattttagataccaaaagaaatcaaataacacaccaaaaatgtaatttacattcacagtaacaagattatagcaacaatgaacatcacaaacaaaactaacgtatcaacacaattgatgaacgcagtggcagagtcaggatttaaagtgaaagagagcgtaatttttttttatgtaaagcagaagaaaaaaaaaagctcttagtgggatttaaacccaagacctctatcctatatgtaatttagcttaatcattacaccaaagctaatattatatttgtacatatcatcttttattacaaatataaatcgtaactaactaaaatgtacatacattattttcccgatttttctttttaagggcgattgcctctcctcgcttctatctgggtccggccttagatgaaaggttccttaagaaaattctagtgtgtgtgtatctactttccaaaagtatgattagatcttagtattggaaaattttctcgtgtgtgagtatccattttcctaagttatgattagatcttactattggaaaatgatgatctaaaagctaataagtttaataagatacaaccagaaaacaaaaacatacaatttggtaccataatattaatatagacaatatatatacataaatatacatcaactttccatgtgtcgagcaataaaattcaaacctttacgcccatctcacgggcaatacataagaaaaaaaaaaagacagaaaatttggttgctttacacagttaagtaagaacacacctaaaacatgaaaagggcattaagcccacaactctgatatgctgaatatttggaatgaaatatgaaaaattgggtaaattgaatgaaaacccagatcttggaatggctctaaattttctaaattttctaattcatcaattttctaacaactaatcaaacaagaataagaaatgaagaaaataaacatgtttataaatgaaagaagaagaagaataaaaaagaaaaagttagtataattcttacaaattgagagggaaaacagtccaaagtctgagctttggtgcctggtggtggctcttctttggcttttctttttgttgttgaggcaaacgactattggtcttggggctgtgttaagggaatcggtggtttttttctttaatattttaatgtgaggaaaagcaggaaatggaatccatgggtttacagagatgaaaaagttaaaaggtttcggttgatggtaaagaatgagaatacgaggttacgaaattacaataaaacccttgtggaaagtacacggagaaggtattatggtaaaaaaatagagatgtgattataaagagttcagagtaacttaacatgtactaaattatattgtaaattttttaaattcttacaaaaaaaattttaaaatattaaaattattagatttaaaaaaatttatttaattatactaaaaaaaatttgacgtgaataaaaaatttaaaaagacataatttaatatatgctaaaatttaaaggatataattttataagatatcaaaagtatgaataaaactaacacaattgaataaaattagacaatcatcatattgttttagcacaattaattaaaattagatacaaaatttcaaattaattttaaataatttaaaaagttaaaaaaatatatataattttgtaaggaacaaaaatttaatttgtattttttaaataatatttgattataataaattggcacgtattattaagggacttttttatttttacacttcaaaacagtttttttttttgtatttttacgaaattctacatagaaactcttattgcaattagtgctgcaacataaatcgtaataaaaatatcagataaaaactcctattgcaattagcgttgcaaccacattagaaagtcaaaccataaatttaaaaaaaaataaaaaataaaaaaagatagtatacgaggataattccactattatttttgattttgtaaaaagaaaaatgtttaattaatgggggtaagttgaaaaatgcctcttttattaatcaattaaccaaatttgcctctaattttatatttatttgaaacatacctttttttatatgtattgtacccaaaataccctgacataagagagtca

SEQ ID NO: 298246 - DNA, 3282 bp, Cannabis indica
ttttttaacttactccaacaaaaaaagatatttttcaacttatccctattagaaggatggaactatgagtccactaggcccaacccaacaaggcccatagtagcccaaaaggagctcaaatttccaaagcaaaacccaaattcgagaagtatcaactgtaatcctcagttccaattccagattcttcttctgagaccaaaatttcaggtgggtcaaaacccttgaaaaatattactatggagacaaaaccctagctttttcatcaaaccctcttcaaccttcaaccatctccaaatcaaagctcgacacccatggctttcttcaccggaggacgattccgtgagcttttaaagaaatacggcaaggtagcaatgggagtacacttttctgtatccgccgcctccatttccggtctctatgtcgccataaacaacaacgtcgacgtcgaatcacttctcgataaattacacatgggcggcgtttcatccaaagaccaggtcgaatcgaatccatccgatgagaaatttgtactcgaagataatgtaaacgggacatcaacgacggtgattgtagagaaagaaaagacgacgaggaatcggacggcggaactggcggcttcgagtggtggtgctcttgcattggctgtgctttgtaacaaggcattgttccccattcgagtgccgataacggtcgcgcttacaccaccgattgctaggttcttggctaggaggaagatcatcaagtctggtatatgatttttctgcccttgtaattttattgttcagtgccaataaataataaactgagaaaagtggctaatttttttttagatttgtggattcattgattttgtttagactttgtagaattcattattggatgagacttaatttccatttttatgagttgctgatgcaaatcattggattagagatatgaggaagattgtaataagaatttttttagggagaaaaaacaactcaacattgaataggtgaactttgttgttgaaattacattatttggtttctaaagtttgttacttgagttcaattgggattttgtggttgatctttttacatagtattaaatatatgctaagttttctaagtacagtaaccgagtttgagggggttgtctttggttaatcatttgttaacttgtgtcttttagtcctatgttactattattaggtatctatattcttcatttgtttaatttgagaagcttgtttgattcatttcatcagggcaggaaggactattatgttctcttcttaggtgagagattacattatgttatagtttaggcttttaggatgtaacccagttagtaagttactattaagatttagtgagtctgctttgtttttaggtctttggttgatttgttgtctggttgcttaaattttgttggtgttccctcttcattgtcgttattcatttgttgttttgtctcatctataaatatttcttattttcccatattgggtttattgtcgttttcactcatatgtctttgtcgttcatatgcattaggtcatcaagtagggtttcaatatgcaccactatagccatttttgtgttactttcttatttttatgtttatcaaaattctattcttttcaatacataaaaaatcaaagttcttcaccattttcgttgagttatttgttgatggtaaaacttcctgttgtttaccgttagcgacatttaatggccaagctctcttccgtcaatcatttgtatggccaaactcctgtcaaaaaatcaggaattagacatcttacgtgcatttcaactcttttgtttgaattcctactttagttttatagagtttatgttttggtatagataatctatgatataatggttttgttactcacaattttgctatggctatgttatgtgttttctaaaggcttttgtgtcatctttggtggctatttttgtgcttttaggtttttacgtgtcatatttgggggccttttttgtgccttttaggttttttatgtgtcatattctatggctgttttgtgccatactcggtggctaatattgtgccttgtagggcttggtgggccataattggtggcaatttggtgcccttctaaatttctcatcaagtttttttatttattattgaaatatttatatatacattatattgcacaacttgagtttcgattccaaaatccccatacacacgcgcaccctctcatacacctatggccacttgagctagcttcaagttgttaaatttctcatcaagtttagttggtgccatctccttttataacaatttattggatttgaaaactcgaaagaagaagaaaaaagatttaagaactttttcttataccttattttattaatctttaatataaaatcttataacataaaatcttaaatatatgatagattcgtacagtactattacaatcccaaaaagttataagtactgaatagttctaaataagggaaacaagaactctttcaagaaatatacaaacggtaaaagtataaccatgcctaaacaacaaattaagttcttttggaatataaagttactttcaatatttctccaatcttgattatcaagaaccaagcaaagccctaatccatttttttggttgtaattaggcttataagtttgtttgtaattcaatgacaatggtatattcaaaattccacactcaaatttcacaccactaattgatctcatctctttcgggatcttttcatcactatatctaagatcacaagtcaacaaaaagtcaacgtacaaaaaccctagtggtggtggtttttgtaaaacaacatctatctctcgaatatatcgaggtgtgacatatggccatgtataggtctttaatgttgtgttttttacccttaaccaagtggttctactttcccctctatcgagttctaaagacattaaagagtttgttgtttttgaatctgctgacaatgacatagtgagttggtcgatgataatcacactctttgcttggttttttatggcaaaagctatatccacatttgcaactatactcgaattatctatgccaatgattgtggatatttcttcaattaagatttcgggtaatcttggcattggaaccgccaagccatagaaaaacaatgtcaaacccaaaattatactaaacatagaccaacaaatccagcaaatcaaacgagcattactatcataatcatcatcattgtcatttaaagttgagtaagagttgcctttcattttttttttaatttttttatatgg

SEQ ID NO: 298247 - DNA, 990 bp, Cannabis indica
tttttttttttttggttaaaaaacgtcttaatgtcatccctaccaaacttaatttactgtgttctgtgttgtaataaatacgtgatcaaatgataaagcagctggaaagatatatatagttttagtacattcatatttatatggagcattgctataaggtaccagtggtacttaacatcttcttgacatgttcgacatgttgcgttgtgtttgactagcgatattctctaaaagttatggtattaaattatatgagattcaatatttagttgaactaatagcgatattaacacatagaaaattgctatcactatcaccagtgccgtttagtatttatcttttatatatttgtttgttatctacatagcgtggactactgacatgcttcttacaactacctataacactgcccatcttttccctattcctctgtccctcgttgctgacataagcaggtgaaaacagggttttatatatatatatcaatattggtcatgctttctttttagagccaattcgtactaccctatgcagctatactacacactacactgttccctagtccctggttttctctgctacttcttctaatctatttagcttttgatctgtctcacactcattatggctacgctttcaatgttaaaatgtatgcagtacagatctgtattgtatctgtatcacattgaattttttaaagccattggtttcgcatgcatgcactactacaaaattggcttttcccaacggtttataactgtcttttatattatttcccaacggttcctaaaaccgttggctatgtgggcgtcataaaaatgcagaactttaaatgacagtttataactgtggcaaaaagttactttaaatgacggttaagaaatgtcagaaaaagtcactttaaatgacagtttataaccgtcgggaaagacttccatcgggtaataactgatggaaaacatctctttaaatgacggtttataactgtgg

SEQ ID NO: 298248 - DNA, 1530 bp, Cannabis indica
gtaaaaacttaacacaatacatacagtaatttttaaaaaaattctgtcccacggtaaaaaaaaaaaaaggtaacaaaagttggaaattctattattattatgattgttggtgcaacattcttgtgcttctttgtgaaggagttaaatggtcaggcccataatagaaaaagcgtgtcttagaaataaaggcccgtgatgataaaatgatataaataattttgatcgtgggctcccacaggccacagggctttaatcaagccttcctaatttgaagctttttagtgttacaaaattagaataatttagtcatattcatcttaaataattttacacttaaaataataaaaataaataacttacctctgatttatttacccaaacaacacctaaaaatatataacttgtgtaccaaatttgaattttttttaccacaaaccacatgacacatcaaagctttataaaatctgccaaataaaagttttaactctattatcagcataagtaattggaaatatgtaatgataagttttaagactgagtatcgatcgatttggtcggtttttttttttttcatattaaaatcgaaattttgattttcggtttagattggtgcaatctgaaaactgaccgactaatccagaaactttcttagaaccaatcgatgtaaaccgcgatttggtcggttcaaacaacctaaaatcgaactttatatttttttaatctataaaataaaggttttttttatttgttgtcaattttttctcttgaatctcctctaatttatgttctgtaaaaaatagaaaaaaatgtgtgagaaatgaatttgattttgtatgaagaaagatgatgaatattgaaagagacatatttactaagattgagtcatggcggagagtggatatctaataatagagatgatttttgaaatttttgaagaagtaagatattattttaatttattgtgagttgtaagattaagatagagaaaaaaaatggcaaagagaatagcaagagtatatatttaatttatattagaaaaagttaattggagagagactagtctatttctttaaaattattaaaagagtaacatatttaatttgttgtacaaaatatatataactttaaatatatatatatatattatgtgatacataatataaaaaacaaatatatataaaaagaaatggtcagttttggtttatttggtcaccttgttatcgaaaaaaaaattgaccatccaatggcaatttaaaccgttggcaatttttttaatttttggtttcggtggtgtttagtacatcagtttgaataatttttttagttttttagattttatgctcagccctaacaagttcactcatggagctaaaaataaagaagctagtacttaaatagataagtcaattttaggatgaatagctaaataattattgaaacaaagatatgttataaattatttggacaaatcactataataagtaccgcaaagtagcttgttgtgcatcttcttctgttgggttttatgcc

SEQ ID NO: 298249 - DNA, 1759 bp, Cannabis indica
taaaacaataaatagtattctattttaaagaaagtttaaaataaagaaaaagtttaaaacatctaatgtagtgtatttttaatttggttctttaaatatttaaagtttttctattttaaagtatttgatctaagtgctctaagaacattttcactggaatgttaaatatgtagtgtactattattttttgacactttttaataaaatacttttccaacagtatgctttgagttgtgtcaaatttaacataagatataacattgtgcagggctgatcctaaactatatggggcacgaaattaaattttaggaccctaaataaatagtttgataattattaaaataataattctagtattttggtgtagtggtaaaaaaaataagttttaaaatttttaaggttcaatcctccaaatatttctaaaaaacaaagtagaaattaaaaattgatccatttacctcattgctcgcctcacctcagggccagtcctgacattatctcaaatttgatacactataaattctacagagatttggagtacaaggaaggcaaacacctttcttgtggctagagggatttggagtacaaggaagttcatttttgataatagtgcgtggatcattactcaagattctaatctcgacctatggaatgctccatggtcttgttgtgatgctgtcacttttaccaatgctgatatcaatctgcttactcagtcaaattgtgtggttgggggaccttataagccttgttaatgctagctggaatacaaagcttattcaaagaatctacaaacctcaagctaccactattatcctcaattgcaacatctcgactcctcctcttattgattccttgctttgtaaatcctcgttgaatggtttcttcattgttaagaatgcttattaggaccttaataagcctacgttcggggcttgcaatgaaatgtgcaagtgtattttgaagtcaaacttccatgagagattgaagttgtgtcctttggaagctattttccgatgctatcccttttggtttgtgactgagttgtatctttggtagtacttttggggcttgtgttctgcgtggtggggagaatagcaactttgctatgcaatttctcaactactgtcttattacaaagtctatttggttcgattcgaattgggacctctgcattgatactctcctgctccagtttggaagagaagttgttagttggatgttggatcctatgcttcctcttgtgaccaatgcttctagtgtatggagttcaccatttttgctagcattctctactataacatttggcattttaggaatgagaacttctataatgatggtagtgtctctctccagaccatcatctctaagatccatcggtgtttcgcgaaatattggtgtgacagtcagagcctcgtgatccgaaggggaaagactgggagctgtgcaatctcacatcatctggggatggtcaagtgtgatgattctgagactgtgtatgtaatgccctaatactaaggtacgctacagtgatttttcaagcgaagtggtatctttgctaatcaaagtatttttttttttgaaaatcgttcaaattaaaacttttagaattaaccatgaaactttataaagtatatataaatatttacaagtgtcgggatctcattattaaaatttttacaaaatattctaaatacaaaagtcatgtcgcacaacgactacaaaatgaaaaccctaaatgtcccgagaccgaacactc

SEQ ID NO: 298250 - DNA, 2336 bp, Cannabis indica
acaactaacgaggattaggctattaccgaactgctcggggctgaacgtctataaaatttctgtgtctttttattattattaatatttgctttattacgtattcttattacgacatatcgtttatcgcttattaaaagactcattgtcgttggctaaaagcgaagtcaacagtgtctttattatccataaaggaaggacacatttttgacaagagcattgctattaggcaatagtggtgcctagcaccttctcgacatgtcacattgcgattggctagagatacttcctaaaatctattatattaaactatgtgggacccgatacttagctggaccaatagcgatactgacacataggagggtgctaggcaccactggtgccatttagcatttctcttttgacaactatcaacatgatgtggcatccacgtcatcagaagatcaatgcctcatgggctgggcttcaccagacggactcgaagtcaatatgttatttttatttaccccaccaacaggcaaggtttacattcgaaaactttagctctataaatttaagaaaacatattcatcaaagggttggaatttcgatacttgagagctaaggaaattcttgagtttagcatcttggaaaaacaattgtgtaaattaaataggattttctagccatataataatatttactcgtggactagaggtcattattccttgaaccacgtacgaactctagtctcattctttatttttgatctatctctttagctttactatattttatactagtttccaaaaatcttagtaaatattttagtgctttcattgagagttgatacagaagttgcaaactgcaatgatagtagccccaagaaacactgtcgacaaatttggtgttcgtgattgagacactcccatggatgacatgaaccctcccattgcacatgcaaaagctggtgttgtaggagagacatcagaggtaactagctgtcctgctaagaaaacttaacataatgaaaaatatgttgatgagaatcccatcgatgaagaagttgacccagaaaagatgatgatcccaaggaagactattttcaagatgatggaggagacaaagaggaagatgaatattaatgagctagatccagaagtcattcagatggccaaagaattagctgaaacccgaaaaaattggcagattagaggctagaattaaatcaggaaatgttggtcttgatgaaaacactcctgaagaacctgttcctcgggaaaataataccacaaagaaaacaaaccctaaaggtcctagaacttctgatcccacaagtgacaaaggaaaatgtgccatgggagaacttacaaataggacttctttgactgctccacagaacaaaacgaatactgctaaccaacctttgcagaaaaagaaggtagctaattctccagagaaaagctgctcgattgatttgcgaggtagagttacaaaaagcgataggtctggtgctcaggtagaaaagcctgccactcggggatgggaaaatttccctagtaattttgttaactaaagtgatggagtagatgaagttcacccgatttcagaagacagtatgtcaacaatgacctcggagaatgctttcacaaataaagatccagctaaaggtgagaaagcaaggcctcgtggaaacgagctcaaaagtcacatcaatgatatagttcgtgggcacaagttccacgatgataacactaagcatctggaaggccaaatagttgaattgactaagttcacagaatgtcttgcccagtagcaaagtggggttgtatctaacttggaagaagaagattcaggagccatgtggggaagaataataaaggcaccattgccagaacactatataatgccttagatggagttatatgaaggcaggatggaccctagggcccacatgtctaaatacatctgattgatagaagtgatgacgcaaagtgcctttgtttttcattaactttacagtttgattctgactcctcaattttttgcggcaactatcactcctcctagaagtgtattcataaatccaataatgtacatacgtgatgtctcgagaaaaacttcggcacagtcctatttctttggctttgggttgtaacatccccgcttcaagcctccattgggtccttatacccacggaataaatggctcttatacacgagtacgccactctgactgcttcctggattgatgactgaccctacagaccaacacgagtgtttctagcgtgctttgtcctcactcgcacgcttcctgagaaaactttccaggaggtcacccatcctgaaattactctaggt

SEQ ID NO: 298251 - DNA, 3432 bp, Cannabis indica
ctccaccttaagggggagtattagattgtaaagtgaagtgtacatgtgtctcttgtagtgtgattagttagagagctattatttttgtttgagttagttagagagtcttaaccgactatgctctgttttgtgtctgtatatatatatcctctcttgtaccacttttccaattaatgaaaatacattctttcttcttcatcttcttactgctaaaaacaatgtattcttaaagttagttgggtttttcttttttattattattatgtttaggagttgcagcgcacttcaactttaatgatattggaaaaaaaataattaaagtgagctaattgtaaatgagtcattacaaaatttcttcctaaattatatgtacacatacggtaattttttcttaaattttgagtaaataacgtcatttaaaaaaaaaaatcaataaaaaaaaaaatacaaataaaaaaagaattaagaatggcattaatgaaactaaattttataactaacaaaatttaactattactataccatcactaaaatattctgctcctaattagtatatatatttttgaaatggctcctaattaatattatattcacacaaaaaatatatataaagtatattgtttcttggttcacatgataatttcataattatagatttagtatataaacctaattatatcctgaacatataaatagtcacatatattgtgttgtctatttagtgaaaaataatcatgatcatatgtttcgaactaattaattaatctcataattattagtgcattggatttacactaacgtaataatcagcgatgtggtttgcttacacttggctaagtggtatgtctttttcaaggtattaaaaaagtaaattaggatcaaatgtaccagctatacatcggactagaccgatatttacagtagaaaatatattataaatttaccgtaatatattttctaagtaaatatcactatgttgatatttgatcaatgatctcaatcctgagatggttagattctggcttagctgtattgcacatattctttgacttgttcattaccagcttacctgtaggattagtccatacttacatcttgagaacacagtagtgtcattgagtgggagcgctaatcatagaaatagaatttatagcttctataactatttaaaagtagactgatggtttccttagagcttgtcttaacaacatgaatgaaggagctcttatttcgtaattacactagtttactgcaatatcatttataagatggcaagtattttaagaataaaatacatcaaagtgtaaaacggtaattttgtccctactcgatgtaaaccatctatagagaatctttgattgtttaaattgaaacaattaatggataatttatagcgtatccattcttgatgaatagagggatctatgtaatcaagagtgcaatctgaatctatagtggagttaagaggaactaataagatagagaatttacttgataaattctataattaactacttattaggatcttggttacatagatccatggtacccacactatgtgagataatattattttgtagacttaattaattgatttatttaatcaattagaattctaattaaataatgactatgtctatttatgaattttactaagcaatggcttatttgagaagaaaagaatatttaatatttgtttattaattaagagacattgaagggtttagtaaataaatatattttatggtttaataatgaactataattattaaatagataaagttagcatttttgaagaaagataaaattatttcattttagaaaacaaaatgaaaaaaaaataaaaatcaaactcatgagcttgaaatagaaattcggccatgaagggttttttagagtcattttatcttttcaaatcaacccattaatttctaaacctaaccttagtaacactataaatagtatatgatagtttttaattcaacacacaattttctcttatcacaaaagaatcaaactatatactatactattttatagaatttgaatttcttttattgtttactctcaaattcgtggcttagtgttgagatagcccacactttttaaggatatactcagactagtgagaaagattgtatagtatgtttatcaaactaaaggagaattcgggttcatcagatcttaattatattctgcgacagaaaggaatcaaaaattagagatttgaattgaatgagtcacatattccgctgcaactaatgtaaagattttcataactctttaatgtttatttattgtttttagaaattacatgtttagggtgtcagattatatatataatcaaaacatagtgactagtaaattaaatatcctgataaaactatttccaattaatagtaggagctttaagctcaatgcttgttcatcaatcgtagattttgatttcttagtgtgaattgtgtttgatcacaaacaaagcgtgttaagcatccaaaatttagaattcttccctattgtatcttacaactctaaaattcatatgctaaatctataaaattcatcttatttagcatattttctcctatttcaacccttgtgatttattttaccattaaaaccaagcttaaacctgaaaataaagcataaaaatactaaaagcacacacaaaaattgactctaaaaatgcataaaaataaacctaagactagacaaggcacatgaaaccagattgatttctgggatgcctaggggacatccttaacctcaaggtctgtgacttggcgtctttttggcttgttagcttagactatttgaaggatagtggcttggaaacgatttcacgggatccaaatacctacccaaaagccttttatgtcaatttgagtattgggcaaggcccttgataccaggtcaattgccctgtcatgggctgcgaagctccgagattatttttctttttactacgtgtcaaaaataatgtttacatcattagggttactttcaggataaacaacctctaacaaaatgtatattctcttgaactttgcatgttactaatatttgtgagatttttttcacttttcattttatgttgctaaagttggtgtagcactttaaaaattgatgtgtcattgcaatgatagtattaacatggataattaattatattattaattgaaaaatcattttaaaatatttaaaaaaaaccctttaaagtatgaaatctattgttatgaatgggactatcatatgatataataattattaaagtattttttctgttcggaaaaaaaaactattctataagacataaagtaaatgaaaattattaattaagaaaaaaaattaatttaaaacaaaataaaaaaattattaatatatgtactttttatatatataaattaaacatgataattagcaaaacaccaa

SEQ ID NO: 298252 - DNA, 2794 bp, Cannabis indica
ttttttgaaaaatttaaaaagattaaaatgaaaatggtgtaaagattgctttgatagtaaatttggtgtagcagaaagagaaaaacaagaatggaagaagcaagtagaaatcgagcggaggcggaaagattgcttggaatatcggaaaaacttttgcagaaccgagatctgaacggctccagagagttcgctgttttggcccaagaaaccgagccactcctcgacggctccgatcagatcttggccatcgtcgacgtcctcctcgcctcccagaagcgcatcatcaacaacaccaaacacgattggtacgccattctccagctcgattcccgatctgacgaccacgatctcatcaagaagcagtatcgacgccttgccctcctcctccatcctgacaaaaacagctactctttcgccgatcactccttcaaactcgtcgcccaagcctgggccgtcttgtctgatcccgccaagaaaaccctatacgataatgacctaagccttttctgctcttcgcagcagagcaaattgcccgttcggaggaccaactcgacaccgttcacacccgtctccgccgccgccgggagctcgacggagccttctttgcggcaccagagtctactgaggcttcggagcttctggacattgtgtccatactgctacgctttgtatgagtaccctagggtttatgaggattgttgtttgaagtgccagaaatgccagagagcgtttcacgccgctccgctggtcgatcccctaccgccgatggtccccggtcaggaagcgtactattgttgcttagcttttttcccacttggcttcgtcgctgccaagggtaattcggagaatggtggagtgaaggagccagctgcatttcccaattggatgccgcccatgttccaggcatcggggccgccacctccaccgccatcgcagccgcagacagggaggactgccgcggcacaagtggaccaggttccgaagaagaggggaaggggacgacctcgtttatcttgaatctctcttagaaaagccaattccggaacaagtttggtcagtgataacataatttatctctagttctttgagataaatttatcctattccatgagggaaaaaaaattgacttgtgcgatagttcaatgttgtagcttgttatcaaaaaaaatgttgtagctgttgtttgttcatgtatttaataatttgatgcgtcactgttatgattatattgtgccatttcagttttgaggtttgagtcatccatttcgagtataacatgtttgaactatgaagttcaaatgggttgcaatctaatcattagaaacaatagattagttgaatgcctggataaaatttccagtatcttgaacttcatcacctatgaggtaaaactttctgtcactaaaacacaaaagacaccaatgcattgagtgcttggggagttgggaccttgagtttatgagtatcgtgaatatttgaatgcttgctactcttagaaaccgaagcaatcatacgttttgattgagttcttatctgcgttttcttcttatgacagcagatttcataaatcaaatttgttgggaaggtactttaatcctcatattgatttttatttttaattttaatgttgttgtaaatactcttactcataccagttcgagccttttacaggtgttcactattagaaaaacaaatgtatgaattgtctacgctccatgtacatgtacatcaagaattagcattgcagtattggtacatgctacattgttatttattttcaattcttgtcgaaaatattttgcctgggtttattcatgaccacaaagaaggagaaaggcgttttgagttaggaacataagattgaattgagtatattttagttaattaaagataagaaaaggtgcacaatagattttacaaaacttcatcttaaaactgtttattacaactccctttccagtgaagggaaccagatagaaagacaaaccagattgccatacatattctgatatattattagctacattagcattctactgaaaggaacgtacgccactcagcactactccaggtagcactgctgcattcctatgctcttactactgagcttcaggcatcagcaaatctgcacaaaagtaataataaagcgatatccagatgaataacttcaatcatgcaagagattaaaaacaacgaaacaaaaaaatctaatggcaagccagaggtcattcaattcttacttacccaagctctgataacttcaaatgagcctcagcgtaatcagaaaagaatgcatcctcatcctatatattacaaatatccaaagtataagaacctcttggtcatgttgcaacaggaaaaaaaaaaactaagccaattacatattatacacacctgagcatatttttctacaagaggacgaaatacgggatcctccaagagagccttatctgatggaagctgaataaggctttctttctctccactaagaagctctctgtttcaggaatctattagtgaactacgtatgttgacacaaaagaaatactgtcacatataaatatatatataaatttatatcaaaatatcgtacttgaaataagagttatcgaaaattagagggttgtttgtccagggtccttcaaatccagagcgttctttgtggcacctaccctgcacagaaaaaggattcaagtcataaactaatacatttgtgtaatgagaagaaaaatagctcatatctttatgtgactaaccaaggtgtgacctccagataaggcaacaatatcctgat

SEQ ID NO: 298253 - DNA, 4004 bp, Cannabis indica
tatatttattatcattctcacgtgacagccataagaaaaattcgattataattaaactctgtgtcgattggctaaatttacagtcaacagtacacatatgtttcaaaaaatatatgaatgtatatattcatacatatatcacaaaaatataatctaaaataaattttttaattctatatacaattattttttcctattcttagaatttgttaatttttatttgtttattttaatttgttcttagagatataaaacaataacaattttatttattgttggttatgtgaaataattttatttaaattttcaaaagaatcaatttaaaataactaatccgatctacactattgctaattgaattagattggaatcaaaatataaaacctgcacttagtgcaaatcgaatacactatgagtaaaatagtgtagattaaattagattaatacccctagttcaaatgattaaacccacaacgtctaaggttttagtccctcttcggtagccacataacaatcgctataatattttggtcccaattattataggattaagtgggaattcaagtttcaagataataataattatgaaataaataaataataagtttgaagtgactaacaattggtttcatatttttgttgttatcaaatgaaacattcttatggggaaatgacgttttataattagttagcagttttttataatttttattaaattaaaataaatagaacttaatattaaattacaccaataataatattaaagagacatcatgggtgcccgtcactacacttgcattggaaatattatcaagacatttacagagcgactttatcctgaagatttgcaatacgagcctgcatataaatatagataaagaaaatccagtaagttagaggaatatataaatgagtagaaacaactctccatagatgaataaataaacaaaaaatatggaatattaggaggtctaatgtatatacaagacaagaaagaagcataattgccctgaaggatcaataagaaaagacagaaaataatgataatgtaaattgagaaattacttggattatgttatctagaaatccttgaactaaaactagtgactgaaaaagggaaggaagcgactcaagattgattgatcaaccactcaaacaaaccaagttagcttctttaccacactggtacctttcaaaaaatacttttaacctttataacttcttctcactttattttatggtccaagtagttcagaagtattattttattaaattaggcatctacactaaaatatagagcaaccaaccactaacgacgttgaacccaaaaggagttctaattctaatctagaaaacataatattttctagcatatttgttaagaaaagagaaataaagaagcaagtagcaaacaattggtagtaagaaacctatcagaatcaatagatgatatcttttttgaaagaagagaaatacaaaagcattattatgttaaataggtttcaccttcaacctatgtacaatacaagagaattagaaagaaatggaaaagtagagcaagagaattaatgaaaataggcatggaattgatcttgtccgcttttttttaaatctcttgcgcctactccagcttatttcccagctgcaagtcctaagttatatagcacaaacgaaaagagcttgaaacccaactctggattgtctataaataagatcccttagttcggttcaaggacagccagacaaataaattattaaagagcacaaattgcttccataatcaaagtacatattgagctcaatttaattatctgtctttgtagttttactttatgtagtttcagtagtcgtaatttataaatattgctaatcaagtccttaatgcatgaactcaatacagataaacgcaaaataaaatctaccacgaacatatattttcttagaccaagatataaaataataccttgaatgattttgaacgacgaatagatgggtcaatccctagagctgttaaatatgacttctcggctgcattaaattggttcatggccaggaatgcatcaccttggcaaatgtaggccttcaaatgcagattacatacacatatacttacaacacgagataaattataagcttgagggaccatatataaatgttattatcaaaaactaaaatccatttggtgaccacctatacagtgaaaatttttatgcatgttctctagcattatacatgaccagaaacaaaagttccatttcaatatgcatctgatatgcaggacagttgaataaacaagaaatttgacccaagcaccaacggcaacgataatacgacctctttgtcaatgtgtgtctcgttcgaaatttctagatattggtgtctataactaaggcaccaacatgtgtgcaagtgcaacaatgtgattagacttttcctcataaattaatagtcttatgtacaaaaagcatgtttttgggctctctaaagattaactgatcaattaaaaatcattcaaaggtacagcagataggcttttgcaaagtaactgttgtctacaggtttgttttgattgaaaggatacgatattgcattactggagcctgcaggactcttaccatacatagtctttataatctcgtaaccatgctgagaaaggaaaatgtacaaagttcttactagttaaacatatagtcagaatgcctaaaacagattttctttttttttttttgatactcagaataattaaaacagattaaaaactttgtaagtgacatgacaagtatgacaattcaaaatgtctaaaacatgtttcaaagttcaacaatttaggtttctaaagcatgtttccagaatccagatataaccagaagcataccacctcgagcgttccaagatcagtacaaattttcatttagcatttatatagacatatatctgttaggaaaaatacagaatctggcttacctcgacatactgaggcataaacaccaaagcctctttagcatcttcaagagcttcgtggtatttctccattgccaaccttgtacgagacctgaatgttatggtggcaaaaggtcctcataaggattccaagactgaactaattttcttttgccctaaaagatttgacaagcaaggaaagttacatacatgtcctactggctcttcatatcaattaaagatagacatttactaggctttacttgaatttaaaccacaaacacacatgcacatgaatgaacgtagacacaattctaggccaacagataagagtaatttacaaaccggtctttgtatgtgatattgataccccccactggttttagctctatagcctgcacaaatagcacgcatcaaaattatatccctcgcaccattagtccattaccaataagcttatagtcaaacaaagctcaaacgtgttactcataagtcataacataacatcttgattgcacctatgacagaaccacatttcactctcaatcccatactgttccttgaatgtgttatacgcatatgccgatgtagtttggtggttaagaagtcatcatattatatgaacatatgaacaaatcataaaatcatgatattgggtctttcctaaattgtgtttgtcatcgtatcacacaatatgagacctttatttgtcatgtgcaattgtgcatgccatttatctaaaccatagaactttacaaaataataacaattcagaatctacaggaaattttatttatatcctataaaataataaatactctaaatttttttaaaaaaaaataataaacttaaataatttttaaaattactgttattatttttttataatttttttctcatattatttttgttaatttttttaatgtagcgtaatggtattacaatcaattaatagtttaaaaattttgagtttgaatccatgccattaaattaaaataaaaaaaagttaaaaaaaataaaaacaattaaagataaattttataaaataatttgtggtataaata

SEQ ID NO: 298254 - DNA, 7725 bp, Cannabis indica
cttggattggaccatccaccaattcctaagtttgggtaagcttttgatggacaaagatatttcccgaaaggtctagtatcaggctcaccaatatatgatcatacttctgggccataagtgctatcatccacgaggttcatggaggtttttaaggagactatacttctggaccaagcctgtccaagaagatcctctattagggctatttctggcccatgatgaagaaggattgcataatgtctggaaatgtgaacagtttcaaaaatatgccaaggtccacgagtgccaccaacagagatcatggtcatgaataatccgtggccttttattgtttaaggaatcgacttagtaggatccctccccatcgagaacaaagttgtcaattatgccatggttgttgttgactacttctctaattgaggcaaagcccatgaatacagtcacctctaagaacaacatgtgtcgtttcggacttccacacaagattgtctctaacaatgggacacagtttgacagtgatcacttcactgacttttatgtttaacttggaatcttgaagagcttctcaacggtggccagaccatagggaaatggacaactcaaagctatgaatagatcttaaagatacattgagaaaaaaatccaagctgtaagcccattggctggaggagcgttccacaagtcctctacggtatagagagagagagaacatcagtggggcacacaccgtactcaattgcttatgggtgtgaagtagtaatcccactagaaaccataatttcctctcacagatgagacacttacaatccaacacagaatcagtctttgctccaagaactgttatatttgattgaagagttctaggaatagtcacaagttcaactaaagatgtagcaatgcaagattgcctaacaattcaatgttaaattcaagagtcgtacatttggcgttggagatcttatcttgagtgggggtcttaggacctaacttggaaggaccttagagatacaacacaaagtgggaagtggaacataccaactcaagagaatggaggtatcagagatccctcatgcctgcaaagcagaccatttgcaatgttaccaccaataggctaggggtatccacatctcgacattcctctaagttatatgtaattctttgtaaatcttatttcttgatgtaagcctgtggacacaatgaaataaaaatataagaaatttacacaagaattcacattattgtctcctacacaagctatgttttaaacaagtgactaagaatttggagatgtccaaacttcttagctcacttgggggtagtgtacctagatatgtgccctcaaaaacatacagtgtccacttgttatttgtatttaagttttttacttgtattttatctttgaatttttattaaaactattggttggaaatatctcttaaattttaacaggtcttcaaccttcttccttgaaggaagtgtcgcttgaagtctgttgcatattgaactttgtttcatcttcagttttagtggaaatatctcttgaattttaatacatcttcaacctccttcctggaaggaagtgtcacttgaagtctattacattttcaacttggtctccacaaaaagcatagtcaatatgtttttagcctctcccgtgagaagggacatcaccttaaatctattggattgtcggttcaatctgttaaccatattgatatgttttctacaaggagtgagaaaaagaagctttgcctgaagtcccttgcacttccagcagctctcttatcataaattggggaaaacctatcgtaatactaagccaactttgtcactttggatttaggaagcttaacctacacgttaatacatgtccagctttgtttcctcaagtgaaactttgcctggactctattacacactttgccccttccctcactaaatctaaatgacaaaaaaattgctacaacattctgcttaaggcagctaatctggaaacacgtggaagggagttaagcactatgattcataaggcgattcaggaaaaagctagtggtccctcagactaagattaactcgccaaaattcataagtgccacaaaaggaactttgaaaatattgacatctaagaaaaggaattttcagttcgcacacttccaagagtcaacaagcaatttcataaactaacaagtctaatggtatcaagcttttatcattggaaccaaaagctttgaaaatcctaaggaaacctactaaatagcgtagtgaacgaagaaaagcagaaaacaagtaaaccaaagcatggcagacaaaatcaagcatacataaatgaaaaagctatcttcaaagttataacatgattaatgcatgattaaaaagaaaaaagctataagataaaattacgccttggttttatcttggacttggtctggaacggaagaagtctcttggacttggacttgagcttgaaatagaagcgcatcctacgatttatcttgtgcaagagccggaaggtcttcaggcttatcttgataaatttcttagaggtcttgagcaacattccctacaaaaactacaacctcggctgaatgctctgattgaagatcttcagctaattccttgacaaattcatcatcattgtgatgaaggccgaattcctcaaaataagtgtcgaatttgatagccttcaccctctgggtatattcttccttatctggtccgagatgttggagtatggtagaatccttatgccaaaaaatatgcagaagcatcgagtaagacatttcctgcaaccgaaggtggcacctttctgcttgagcctctattttggcaatatgtgcagcaacatccttgatagattgcccaacagtcaccctgatcatatgcatggctaacatggttataaaggcttttctatcagtaactggttgatgtgcaacttccttccttaacttttctttggtttcaatgtgtgcattactagtcaaatggacactttacaagactatgttccggttttcaagcttaactttcagtgaatccctctccttcttcagatcctcgacatttcccaacatgccttagatcactagatctttctcactaatctcattttgcaaagtgttgacctcctagagcttggcattttgggaaatattttggagcgacatgtgagcatccatttcatctttctcctccttcgcatggtaaagctcattagtgagggaagacacttgagatttaagctggtccaactctaccttatggtcttggtcagccttggctttatattcatgttacagtttgagagacttgtcactggccactttgtctacacaatcaacctcagccttacactcgattttgacgtgatttatccaagccactgtgtctgctttgacgtagttcacctcaacagtggcctgagattaagctttgtcaacctcagcaagtaagggtttgttatcagtgtaaaaggattggttcttatcttgaacctacttgaactatatgactagggcccccacttcctttgaagtcctttctgcaatcagggtcaaatggcacaatgaaacaacataagatgacaatacacaacaacaaaaatgaatacaagagaagtcaaagcttacccctaatactttttgtttcacagcctgagccaaagtgaaagcatcactactactataaattgcccacattttttagttcagctcactcacactacgcaccacttggtctagaatctccacggcaaaaaggtgcaagttctctccctaccttaggcaccatccacttgctaagagcttcagtgtcaatcattggtcctagggaagaagtttggattcccttatggatctttgccttcttcatggaagaaagggtgtcaactcttttttggagcactatttgttccttcttgttgtgttgcctcaaggtgtgctctgcctctcccattttttttcaaaattttgttgctaagaatggtaggcttcagaggcagcctgaaatttagagaagaaatcctgggcaaggtagtgacaatttattgcccttgtggttgattggaggtggattattttcctttcaaaggtgggatggcccttatttgagatggagtaaccttgggcagattagggagtgatgttttggatgcctgttgttattgtggtagttattcttgttgttggcgtttctattgatgttgttgttgttgctattggtattgttgttattgctgggaacttggggccttcacagatgccttcacaggaggggaatttcctggaccccaaaagaagaggaagtagacggaggcctcggtttacaggtcctagatgccctagccttaaccttccattttcctttagttccctccgtcttggaaagaaacttcgtgatattgtcactcaaagacctcatcatcttttcttctggagtatcggtaaacatatcaatcagatggttagtatgaaaccttcaaatagcaaagtcaaaatcacagttagcatatagcaacatctcctaaaatagtatgtctgtgggtgcaacaattcagtgagcatatataaggttcccaacgggcaaagaagattatgtcctcccaaccaatgaagcttccatactctctgaggttggggaaggacatgttcgagaaggggtccaatctaacagtatttgtttacaactctggattaattggactcctaacaatttcatctaccttgtctatgaagtccttcatggggtacttaagatgatctaagttcaagaaatatctatcgagtcccccttgatccatctaagatatgtgatggaggatgggggtacaaaatacacgaaagggttattacctcttctagaagtgttggctcctagggcaccctcatttgggtatgccacaaaaaattgttctagaatctcatcttcctctgtcatgggattcaggtggcgtagcatccgattagcttcaaggagcttatcctctttggtggcctccatgatgatttcgaccaagttacaagctatcacctccttggcctctttcgaagcctaactttggcccctgccactaacattgttgatgctttggaaaccagcaattagaccatgttaatggagcagttttgtggcgaccaaacctcaactttcagctatgcttcagtaaaggccttgtattgggctaccttcttagttatttcctctgtctaaatgctttgaggcacaggctttgttataaacaagaagcataaaagcccaattagcacttaaactaaaacagagaagattttgaaagaaggaaaggccaaaatatttacctggaatttgaaagctcagttgaagggtaggtaccctcttcaattggaaactagtcgaaaagaaccaatactcccagagattgtgggagtgtaatgtatggctggtggggcaatgagcattggaatacctctctagcttgtagaaccccagtttcttacaattggttgaggtttcacaacgtataagtacagaatcaactccagaatgggcacctcgaacttaaagatgttgtagaagatataccatgcgacaaaaagcttgtaagttagaggtataaactggaaaggagctatctcaatttgcacaatagacttcatgaaataagtcctcaggggaagatgtgcttcacttgaaatataggcccaaattatggcactgaactcgtctgtgctcactaaagacgattcttctacgatagacaacttgcgccacattagccccaaaatgttgcattgtacagctttagtggcgtatatctccaacataccgtaggaacggaagttgtacgtggatcttttagtcaatatcccagatggaagcattatatacctgtgcgggaggtggatttttggctttccccttccctttatattttgcaactaccttggacggagtagcctctacgatagcctccaaggcaatgtcctgttgaagtcctctaacatgagcctctatcagaacttcatcagtggccactccttccacgaaggcaaccgttgtgtttttttcaatttccaccacttcgatatggaattcctagttcaaatccatcactggaaaaacaaagagcaaaagagaggccaagcaattggacacccaatatccaaatgacaaaatggacattggggaagtcctcccgtaaaattgctgggagaggtccctttcggacccatcactcccagaagcctctctttgctgggcaactcgaagtgatggattgggaacccagggaaaatttaccttaataaaatctaaagcaaattctagaaattaagtccattttagtcctaaaaactccaagttgaggcacagaagatggacggacctaatattcactcaaaatttcatcatgcctggttcgaaccctaattacagaatcttgaaaaatatgcaaaaaaatattcaacataatcttgtcctagaaatgtaactctacgggcgacatttcaccattcccacatacaaaatatccttgacctagcttgaagtagcatttctatgatagataggaaatagaaaatattcaacaaagcatcgacatacttacttggtagtagggaatgaaaggttgtcgtggaaatcttcccaagtgtattgaacccagtcgatcatgccattttagctggcttgagcatcgaaatacttgtcaggctgggggtggatcagttcaaggtctaatggctctacgtttggaaagttggctaagttgaggtttacaaagtactaaatcaagcaatcgaagtctttttggattcaccactgaagacgattgcagggttgaagttttctctagaatagaaagctctggtttgaaattaaagatggaggttttgaaattttgagatggttaaaaaacgaaaaaaaaaatggttttaagagtccatttatttcggcccaaatccttgcaatttgaattaaatggcacatatcttctctccaaaacgtatgatttgatctggcggatgggaagttgaaaaataacattcaaaactttctcagggcatttatttttcttcattgtctgcgtcgagtgccgtatgcgttaaagagggatcatttcaatcaacctaccatcattataacattttccatgaaacgcgccccctacatgcagtgatgaactaaaaaattttactctgtgggggcttatttatcattaaaaaatatttatatttacattataatcactcttactagatttatttaattttgtgggggcttttctatcatttttgtctataatcaaattaaagaaaattacatttaattttttaaaaggaaatatttttgttagtgggggctatatcccccacattagtgttagtgttatcaacagatgcattaaaggcacatcatgcgtgccacgaccgtcgtaccttcgattttttatcctttaactgctgacagctcacggaatacacccatgaccccaacaatcaccacgtgtcataaacttatctcccaaaacactaccacaaacttaccttttagtgacatgcacaaaaattgtgggtcactaaaagattaggggtaagttttagtgacatacacaaaaagactcaaaatttagtattagtgtcctagaacttgagtcactaaagatatgaagtgtcactatagggtaaatcattcaatttctctaattttgttttttttaaaaaaaatattaacttatagtgacgcgccaag

SEQ ID NO: 298255 - DNA, 1720 bp, Cannabis indica
ttttattaatttataatttgatctgtttggtcaaaattttttttattaatttataatttgatcagataattattaattatttttttaagaaaaaattacataagataatttatctgaaagaaaaaatcaaatgccataaatgatatatacgaaaacacatgtttataaattggatatatgtggacacatcaacattcaaaccaagtacattactcttcaattaagaaaatcaagtaaaggaaaacttatgtgtcactttgctgatgtctcagtataataaattagtgaaaccaggaataaacaaccattttttgaaggctatggattggctaataataatcttatcaattttgtttaggttaaataataaataaatatattgcagttgttggcttcactacatatagtttagtcatttacttaaactcctaaaactcaataaaattattattttatattccattatgaagactaaaattagttacttaatttgataaactgaatatttttaattttactttaaaaataaaataaaaatattaaaaaaatagctgctactattaaggaggctaattgtgtctgcattattatttatataagtatgtcaccttatttttttctgattgactgttattatgttttccaagtcatttctcaattcaaaatacagaaagaaaaagtcaccaatcaattgaccaaccaatcaacaatgaactttttctattatattgaaatgtacttggacaagaaataggcttatattgcttatcactataaaaagccaaaacataaaaccaccaagtttgccactagtttaagattttagcttaaacaaaacaggttgaatagttcaaacttcaaagcacactaaaatactaaataattataagcaggttgaacaaaagagctgcctctgtttggagcttattacttaaccccataattattacactacgctttactaaaactttagatatatgaaaagaatcacatattgtaattgactatataacccttcattttaggttcaatgtatacagaagaaaagtttagggtagattgtggaaagtcacaaaatgaactaattaataagaaaattgatccagtataccattttagattattgaccctacaaatatcttgggcttggacttttgctgttggagtcattataatcttagttgtggagtttctgttcatcactactgccaccactccccagttccatatccttttcaaacagtacatttttcaaggcttcatattagtctttatttgaatgccttttcttttcgtcttttgtcattttgctattgaatattgatgttctaacccataacgatgataaagtgacagattattatcaagaaactaaactctgattttctttaagctttatgtgtttctttactcaaagtatttgagtatgttaactaatttgtaacaaaaagaaccgtaaaaaaagatgattgagtgagtaatgagaaaaagaatattattgagaagcagaaaccgtgcacataatttttaatttgtttctatggtaatgccaatattgctgtattacttggtagaaatgaactcatttatataaaacgcaactatactaattaggtgacgtttgataacacttttgtttttaaatttgtaataaaaaaataaaataaaatttttatttttgagaaataaaaatgtgttctataatcacttttgtttttca

SEQ ID NO: 298256 - DNA, 1906 bp, Cannabis indica
tgtttttggatggaagctaatggtttaggaggtgggttgttttctaccatgggtgctgggatgcttggcctagaaatacctctccaacaacaacagcaaaacccttcaaatactcaaaatcctcaccttttgtcccattctcaaatggtggcttatggccatcatgactctgatcaccaccctcaagctcaaccctctgttaaacacggtttttcttacgctccaaaatccaaacaaataccaccaacccttagtgatgaagatgatcttggttttggtgctgatgacaatagtggggatgggaagaggaagatgtcaccgtggcaaagaatgaaatggactgataccatggttaggcttcttataatggcggtttattacattggtgatgaaaatagttcagaagcaattgatcccacaaacaagaaaaagcctaccggaggattgttacagaagaaagggaaatggaaaacggtttctcgggctatgatggagaaagggttctatgtctctccacagcaatgtgaagacaaatttaatgacttgaataaaagatataagagggtaaacgatatacttgggaaaggtacagcttgcaaggttgtggagaatcagagcttgttggataccatggatttggcaccaaagataaaagaagaagttcgaaagttgctcaattccaagcacttgtttttcagagaaatgtgtgcttaccacaatagttgtagccatgctggtgctactactactaatggtgtagctagtggagccaaccattcatcagagctggctacctcagagccctcatctaatgtacagcctaatcaacagaaccaacagcagcaacaacaacaacaacgttgctttcatgcgacagacaactcccatgtggtttctaatttgagcaggccaggaactgagcatggatcaaaagtagtaaaagcctcaggaagtggtggtgaagacgaagaggatgatgatgaagatgatgatgattctgatgactacgatgatgatgaagatgatgatgaagctgaaggtggttctcgtggtccaattgggcatggtcacgaagatattgatgatgttagccatgtaagactgcgaaaaaggccaagaaagggagtcttatcagaatcttcccagctgattcaacaactgagctgtgagattcttggggtgattcaagatgggtcgaagagttcttgggaaaagaagcagtggttgaagagtaggatgatacagttggaggaacaacaagtgaacttccaatgcgaagcttttgagttagagaaacaaaggcttaagtgggtgaagtttagtagcaagaaggagagggaaatggagaaagctaagtttgaaaatgagaagagaagacttgagaatgagagaatggttctactcattcgacagaaagagcttgaggtgcttgagctttatcatcgttctcagcatcaacaacaacaacactcttcaaacaaaagaagtggtggtggtggtggtggtgatccttcttcaattactggataatttaataaacttgtatggttgtattatatatcagaataggtagtttagttttagagagatcactgatttagaatcatagatttaaggaatgtaacaaccttttttgtttggctttctattttatttaatgtaatcgggtgctcttttttgtatgtaatatatgtcctttatataaaatttaattaaaatctttctggttagttttgggttcgagttacaatcttttggaaacgtgagttgtaattaggatggataggagtcccacatcgaccttctagtaaatatctttaacctttttatactctggcatctacgttacaaatcacgaccttacttgaacaggatctgttctataggctcgtacctctgtttcctt

SEQ ID NO: 298257 - DNA, 5065 bp, Cannabis indica
aaatcaattcagggtcctatttgtactattttagaaaatacagggtccgttttgtcatttaacaaaacacagggtccaattggtaacttttgcaaaacagagggtccaaaatggcatttacccttatttaaaatattaaagtacaatataaaatttcctagatattttgtaaaaattcgatatggctataattgaccctaaaatttgacattagtataaattatttattgatacagttttttgccagttgatctaagacgatcgtggagaatagaggactacgctgatttgactttggcaaaataaaattgtataaaagtaaattagacaccatgatttgtagtagtttactcccatatcgcgatggtaatgaggctatatcatactttatattttattgattttatcccacacaccagagttatgttattaagagtgtgcggacattaatacagaaaagagattactaggcaacattgaaatcaaagcttataaacaaaggacacaagagacaacaatctataaacttgacaataattgtgtcagtaattaatgttcttcgaaacaatgataaaagaaaaacaaaagatagagaatggtctctaatccttggtggactcgtgtcttgaagagagaaaggggaagcaatttagaaagaggtctcataacctaagtctataactatttatatataagcttaggggtaggttgtgagtctccacaagtcggagtatctcactaaaaattatgcattctattacataataataattaataaatgccaataaatacatatcaaaaaagattccacaattttaggaatttatattacaactgggtagttctcttttcctcgaaatcgcttatgtggcattatggcttctttcttgaagttgcatatgtggtataatggtacttccttggcaaataatgtaaatggagagagtgaccatatggaatggcacatctcaatactaaggattatatggccacaagtattgttacatagctcccacataactccataaggccctcgcatattagaactacaaattcttgtgtaaaattttccagcttatcttgtgagccaattttgagctcgataatatcataattaagctatcaccttgagataaacttatatctcccttgaaaatatcttttcaatacaaattgaactgataatatcagaattgagctatgaccatgagataaaattgagtgagttatgcccatttttactgaagggatgtaaccatttttcatctctaaattcggcttctgccatgtcattacaagttgtgccacctcattatggtgcaagtcaaccatgcatgtgttttagacacctcggggtgtgttttcacttgttttttttttatgaagagtcatattttgtgggttccggggttcagaaacctcatatcaatgttcgaaacccaaatggagaagaatttaatgatacttgttgcttattttagtcataaagatactatattttggccacatcatctcttcataaatttgtgagggagacctctgccatctttggagtcataaatatagtagtggtggaccataggtgttctacacctctaggtgacttttctcacttatttttggtacttgaataatagaaaaatactttggccaaagaaattttccaccaattcatgtggctgactagtgcctctccattgtgcacaaagatgacataggttgactaggtggtttctacaccacttggtgacttttctcacttggttttgatgtactaatgtagagaaagtacatttgacaaataataactcttcttttcctattggcaagcgtgtggaactttattgtgtacaaagatggcataggttggttaggcatgatattgagtggaaaatggttcctttcaattgttttatgctccttggtattggggaaacacatttagacaactttactttagtagtttgagagtagagacttgcgccatctttttgtgccaaaagattatacaagttggccatgccatggaaaatttccttcttgtgcaatcttgagtttatgttcaagtttaggcttttatgcataaatgagtcaagctcttgttggtttccttattagattaaggtctcttggatggaaacccttgcgcagttgcattaactttaggttgggcacccttgggtgtgggtccctacataaaatggttggtttgtgttttctactgcaaagaagaatactttttaggtagaagagtaactcttatgatgaaaagacctcaagtgttgctgagctcaaaggtcaatttcttcaccttgagggtcaagtggcagcctcggaagcaaaggtcattgtggatgtcactatttatgagggctactatttcgatgccgtttcaactcatggttggccaatggtggatcaattttaacttggcaacctttgataaaaactaggttggtttcttggctagtgaatgtgagcgacataccgatgaggctactctttgcgatatcaaatttaacttgaattgtgttatctcagatgttagagatgctatgggggtcaaaggctataaccctgagcatctgaacatacatgagctctcaaacatgcaccaaagatgactacaacacatatcaaggagcttttgcaaaactatatacttgctagttttatcaaggatgttgtcttgaccttttttttattagcatttagatttagtgtattactcgaccatcctgagtggcctttcagtgtagatatgccgtagtagaaatgtgattagaacttgttccaatttaatcagagattaatccaatctaattagactttgttctaatgtttttttttatgtttctagtttatccacctctaacacttgcacagtatttcatgtagaaattcggtcactgggagtaacatcaacattttcttaatgtttaattaccatgaaagtactacccaggtgtgtaaatttttttgaatgcattgtagctcttggctcgtgtatgccatggcaacacttaactcttgtataccaaggtgtatgtataccccaagtgatcaaagaattaccttaattggtcactccaatactgaatcctattgtgctttcttgatcatgagacttaaggaactattacatgtcgagcacctgaccacctatctaaagattcgtgtttttggcaatgtttaactaaagaccaactctgcaagattcttagctcatgagagtgttatcaggcctgtgttttgtaattgattaattacaatgaagtaccaaaaaaaactttgtccaacaattttatccattaaaaattaaatcatcattatagctaaactaaaaaaaatgtagctccagctaatttattcttcatcagaattagctgaggtaatcccctctacactaataccctgttcgactaacactgtatcagccatcacttggcgatggacattttgacctagacatgactccgtcgcatctatttgatcaaagaggtgatcgattcacttgctcgaagaggattgaatcacactatggattaagctgtgttgaagatagctgctttattagtatttttttctgaggagcaccctattccagtaccatggtatgggcaccagattcaagttagagtaatacaaggccaacttgtaagttccatggtctagcactttagtaatgacatatatggccctttcagaggaaatcctaagtactcctgttgtagcatcttttctatttaggaatactcatcgtaacaccatatccccatgcttaaatttcttatctttaaccttggagttgtagtttcgggcgatcctttgttgatacgcaaccttgtggagctcaattttctctctaatttcttcaatttttttctaaagactcagccagcaattgttgattggcttgttgatcataggtgagcctctggtgtgatggcggtgtgagctctatgggtatcatggctttgtacccataggccagcgagaaaggagtacgaccagttgttgtttttcaattgtgtaataagaccacaacactttaggtaattcttcaggtcagttccctttagcttgctccaagcacttttttagcatatctttaagagtatggttgatagcttccacttgcccattttcttatgggtaagcaactcctaaagaactcttaatgatttagtgcatttcacataaatcagtaaagaggtcactatcaaactgcgttccgttgtctgacactatcttttgtagaagtccatagcgacagatgatattcttaaatatgaagccaagaacattctttgatgttatggtggccaagggctcttcttcgacccgtttggtgaagtaatccatgaccattatcgcgtattggactctaccttttcccttaggtagagaggctatgagatcgaatccctaaacagcaaatggacagggagtctacataattttgagcttgtttggggcaaccattttggataacccctaacactttctacatctcttgacatattccattgaatcttaaatcattgatggccaaaagtacccttgccttagtatcttctttgagaggctttgtccctgagcctggttgccacaaaaacccaaaagtacctcgaccatgaggagttttccttcttctttcaccacacgcctcaaaataggcattgagtagcttcttttgtacattactctatccatgatgataaagcgagctacttttctcattagcttcttatattcgttctggtctcttaaaagaataccttgttttaagtactatgcagtcagagtcatccatgatggactattgttctaacggctataaacagctaattttcattcctaaactatataaactcgttttcactcaaaaattaaggttggtttagcttctattcatcatataacatcattataagtgttctaagctaaagaattattatcttttcataaacacaccaactacacacccttgagccaaacttgttctaatattctctagtgtgcttgcaattctctctaggatttcacattgtttttcatctta

SEQ ID NO: 298258 - DNA, 2536 bp, Cannabis indica
agcttttgatcgggtggaatggatttttattgggcctgtgatggaaaaaatgggcctcaatattcgttggatctccctgattatgatatttcttcatactaacaccttctattttcttatcaatggagatgtttttggttctgttgttcctcaaagacgattgcgtcagggtgaccctctctttccatatctcttccttattttctttgagagtctttctcgcttactcaatatgagaaaaagattggtcgacttaagggactggatgttttgcgtaaatcaccaacgatctctcatcttttttttttcttgcggatgatagtttgttatattttgaagctaatgacaggtcttgtggagcaatcaaatgcgctcttgatatctaccatcatgcagcaagacaacagttgattacaaacaagtatgtcatgtttttttttttttgcttaacacaatgaaggctgtcaagaactctttccaaaattttgggtatgcctatttgtgagtgtcatgaatcttatttaggccttcatgtgtattctgaaagagacaaaaagtaattatttagcaacatcaacgaacgaatatcaaagctactgcactcttggaatgataaactttttttaattggtggaaaagagattccattgaaagtggttgttcaatcgattcctagttatggaatgagttattttcgattatcttccaaattttgcaaatcgctagagactataatggcaaaattttggtggtgttcaacatcagacaaaatgaaaatccattgaaagaaatggaaatttttaagtttaacaaagatggaaggtggtccaatcttttattcacttcaatcaagctttattggctaaacaagcttggcgtattttcaaaaatctcaatactcttctacgtcgagtcttaaagagtcgttactttcttaataatgactttttggatgctgctcttggaggtatgtcgtccatgacatggcagggtattagatgggtacgagattttttggctaaacgtttaagattgaaggttggttctggttctaatatcaggtgtggtttggacccatggatccatggtatcactattttcactccttcgcattatcagggtgatgttatgagtaatgttccacattatatcactgccaatcgagaatggaattcggagcatttgtaattggacttttctcctgctgatgtggatcatattcttaccattctactatcttatcatgttagtgatgataagtggatttggcatttttaatgaatcgggtgagtacacaatacattcatgctactattttgcatacactttggaagaacaagatcagtcttcaacctctagaagtcaatcatcatggtggaaaccttcaaaaatcaaaatatttggttggagggtagttcaatcttctcttccagttgcaaagtcccttttttatcgcaaggtgttaaactctacaacttgctgcttatgttccaatgcttgggaatccataggacattccttgttttcttgtaagcatgctaaatctatttggaaaaaggttgggttttcatttgactacattttggcaaatcaaatgcaagatagagattatctaattcacctttttaaaatctattttactgctaatatggaaaagataatctgtataatgtggcatatttggtcagatagaaataatttggggcatggtgagttgctacagagtacattccaagttttctctaaagctacaacatacataaaaaacttccaacagtattcaagtgctgcaattcctgctactataaatagaactggtcctgctgaacatcacccttggttacctcctctagagagcaaattaaacttaaatgtcgatgcagttgttgattcttcgaggaataaaataggattgggtgccattataagggattcacatggacaagttctggtttctcttgcaaaacaagttataggcaatttcaaatctcaaaaaatagaagaaaaagccatattttatagtctttgttaggctaaacatcttggcttgtcgattgattttgtagaaatagattcattgtctctcgccaattctctgaatggctctacctctaaccaatcttgtttttatgacttggtgatggatgttcacaaaaattatcctatctctcttcagattgtgtatctcatattagacaggatgcgaaccaagctgcacatggcatggctaaataggctttagtgttggataatgattatacttggttggaagtaattccttttgccatattttctgttgttgtaaatgactcatttaatttataataacaggtcttttctcaaaaaaaaaaaaaaaacatctatatattctatatacataaagagagatataaagcagagacatgtcactttataattactcttcacggccctatttgctctcttcttaattctttcagattttaatttttatccagtttataaatattgataaattaattaattacgaataatattataattaattaattaataa

SEQ ID NO: 298259 - DNA, 1570 bp, Cannabis indica
tataaatatatatattatttactaaatatatatcagatcgaccacttttaacgtggacacacacaacacaacacaaagttacacaatagtaaataatgtaattaatattaaatatagtacataactaaaattgaacatgcattccaggagaggattaacacatattattaattaagaggactaataattataactttttaattaacttttaggtttaaaatgatatgttagggatattttttgtcaatttttttcatagtggttataattataattttatttttgtaaacttttaaaaaatttcaaatttattttaaacacggtaaactatttgaatttttaaaaaatttacagagagattgttaaaactatatggattaacagtaacactactccttgtgttgattttttttttattattattttgaataataataataataattttgtgtttggttcaattaatataaagttacaatattatatatatttatagttatagtaaagaacattggaaacgacggaaaaactcagctgagtgctacatatctgtgtcttttttagttttgaagatagtcatgcatgcatgcatgcctttatttaattatttatactaatattaatttatatatatcataccaaaaataataaatatatattaattattatgtataaaaaggagaaaaagtggctatttctataaatatatattattctccttttttttttgtaagcttttttcatatgccgtgcatggtaccacatgtattataatccaataaaaaacatttttacaaatatataatttatgaaggaaatataagagaattatatataatagttaactttttcttttctgatataataattaacttattactaatttgagtgaaatggatacacttggtgacatgttttaatttatataaggctattttacttagttactagttacacattctatactagtcatcattttgtatataaatatgttgttgtttttatatatccataaaatgtatataattaactttaataattatataatttaatatgacaacactttataattatcccaaaaatatacatacatttattttttcttgtacccaaggcagccacctcgctcgtcttatcatgagaactgaggtgtctgtcgtgtatatataattaaagaatttttttataaaaaatattagattttaaataaaaatttataattttattaatatacagaaattttttataaaaatatataaaaacaaaattattaaaaataacaataaaataactaaaaaataactgttgaacaatagtaaaattttaacgcagtacataatataaaacctatacagtaattaaaaaaaaaaaaaaaccataattttaactttataaatcaatcaattttaaattagctttatcaatacttattggtactatatatgatcatatatatttaaaattggtactatatatatcatatatgcccccccgtaaaaaataacgtactacacatatatatctttatatattaaaaagtgcctatctaacggcaattctggtttaacag

SEQ ID NO: 298260 - DNA, 1339 bp, Cannabis indica
aaagaagcaagtgctttgatatgatactaagtagactatacaagtacgtactagtttgtacataattaatgaatcacggaatataaggcttaacaatgggaaaactaattaattaattagtcctaattatatataactaattaataaacttaaattaattaatgtgttaataactacttataagaaatgaaaaatattataatattacacttgaaatcaactatagaatatacacgtatatattgtaaattattggatatgatcatatatgatgattcagaatcatgatgaaattaaaaaaaaatatatataattaatacagaatggtcactgtcgtttgacatgatgatgatgatgatattgataaatacatgaagatagatagatataagaagggagtgatgtattgatttgtatatatatatacatagttctatactatagggttagtttacagttggctatgcatgttatttctgaatattttgtccccattgtcccacacaatataacatcacataacacaatttcattgaaatttcgtggaaagagctataatatatatatatacacatatctatatcatatttcacataaataataattctcaaaatctctcatgatcataaaataaaatcatcttttgatcttcctctctttgctccttaatttcttatagtacatgaatatatatatatgacatattttgtgatatatgagtttgatcatcatgtgttgaagtagtactataaatatatataataattaacgtatgaataatttctttatatagtttcacatatataataatttattaataagttctgactaatgtgttgctgtgtacggagataataaagctaactagggccacgggggccagaattaaagtttcattaagaaaaagattaaaattaattaatgtgattagttacaaaaaatataagacaaaataaaacagctctgtcagtttttgccaagtcaatatatatatcattatatattattatatgaatcgtatatataaagtgtgatcgtataaatatttatacaccactcatatatatactaccacttatatataatgaagtaataatgtacatacaaatatatataattgataacccatgcattaaaatgaaccatatataaatatttaaaatatattacacgtactcatataataatttgttggattaaaaatcctatgtgggcacatatgtataatgtatatgctattataaagtgtgatacaaaattaagtgaccaattatgttatgggtatcaaaagggtattaaattgtcatggaaataatgtgtagataccataagttaattt

SEQ ID NO: 298261 - DNA, 5055 bp, Cannabis indica
cttcttcttcttaataaattagcaatggtaagaaatatttcaaaaaaaaaatctcatagccctacatcagttgttcattatctggaaaagagaaaattaaaacatttgaaattaatcattgaagatttagactcagattttgaacttgatgatggagattttgagatacccaaagtgctgaaggtatttatgttattttcagttgttttagggttttttttcttttttttttttttactgtagatgttctggtttttttctctaatctatgtcttctaccaattttaatttattgttatgtattttgtattttttttcttattgtttgcatattttttcgtattttttaactgttattttgttgttgatgagactaagctagcatcctggcgaaatggctcagagttttggtgaaagttatggtggccaagccgcttattgtgggttattttatcaaactcaaaaatgggaagaaaattttgatccaattcaaatatgaaagacttggaaacttttgtttcatgtgtggtcatttgggtcaccagcggagtacctgttctcagacaacgctggacgattctgaaggctcaagggataccattttctctttttggtccgtggctcaacccagccaccaagtatttcgactgcttctctagtaagcagagcctacccaaatctcaaatgaaggattatttagctttagggtcgaagccaaccaccttaactcttgtagcaccaatgacgatgattagggacgagctctcgagccaaagcctcgaatgggttgagtacatagttcacgaggaatttcaaactaggtcagctaggtattgtactgatacaagatctgcagcaaaagtcgtttgggttcccaagcaaggtaagataagtcaagaggggtcaagggcaaaacataccttttttgctaataattaagctaggaaatctctgaagattggaaagcaagctgagaggtctccttgcttggaagaggagtagctgccgagacaaattttgaaagttgtgggaaatgatgttgatggtaataaccctaatgggtctaattgtgttgggcgtgtgagctttattatgtcggctcttgtgttgggccctaatatccacaccaaaacaagctttgaattgggccaagatttaagtggacatataagtgagacttgggcctgaacaaaattttttcaagcccaataaactactttaaaagagcttaaatcttttggagccaaagagataaatgacatacaacatgtggaaagggacattgagttccatgctacttcagaattcaacgaaagaaccaccccatttagaaagaaaaaaattctcagagagtgcactctctctttgtccatgaccaaagaagactctccatcaacatcctggtgtggttcgtgattttccttgggactgcgaggttggaaagtctgcaccaattagaaacacaaagttggctattctttctcaagagaaggtgtgcgataggaaggttcaaggaaagaaatggatctttaaatctccttccaatgatgcaatgctaatgggaataagctttcttcaaatgttggatttaatgtttggctatcatagtggaagtcgaaaacagaccttacagacctgtttgttccccttaatgatggtgtgaatgtggatgatgctagctctggagtctttgtccagaataatacccctgtggaggaggataactcatctcctccacaggagccatgagaggtgtggcatggaactgtagagggttgggacaaacctctacaattttggagcttaagtccctggttcagttttgcttgccagatttcatctttttatccgaactaaaagtgaatgcgaattttggtacgtattctaaaccgtttacatttttattttaatatttctgctcctgttgttggaaccgtaggtggtttaatcttttcctagaaagttggctttgttttcgaaagtattattacttcttgcgaattatgtattcagaccctaagcgccatccttgctgtcatcctgtgtctatggactgccgtactaccatgccaaaaagaagttctagactgatttcatgaatgtgggggataagttcggtggtcctttattctctatgagtcagagagggttggttccaaaggtaaagacctttttatcccagttatctcagtgttaactaactcccaaggtcttattagcttgcccattaaaggagatcaattaacttgggataatcattaggatggtgtgaatcatgttaaatcggcgtgtgacaaagggcttgcaaatgctagttagatttcccttttccctaaggcagctctgcgctcttttagtcttgcaattcgaatcataggcctttatgcatttactcagataattgggaaagtagaaataaacgccaatttagattcaaagaagcttggactcatgatgaccgtagcaacctagtagtgagtcacgcttggtccacgattaatcacaactaggcttcaactagaattttcaagaagatcagggctactaaagttgcgttgctcaactagaatatgcaccaatttgaaaagattgacacaatcattagagaattgaaatctaagttgaatcttatccaaactagaccgataggtattagaaattggagagaggaagatgagattagaaattcgctaaaccatgccttagagcaaaaaggtttatattgaaaacaaagggccagaattttgtggcttaaagagggggataaatgctaaaaaaaatcatttcagccactattagaaaaagatagaatacaattgagagcttattggacaaaaatgaaaattggattactagttggaatcaaatagggaaagaattcttggattactttggaggtatttttgctaataattttgacaccgagaggcctagcttgaacatgaccattagagatgggttttctaaagaggatcagaggaatccgctccttattctggatgtcgctaaaattaggaagactttattcgccatgaataacaacaaagctcctggcccagatggtatgtcagtactttctttaaacattattgggatacagtgggcggggatttttatgactcagttttagatttctttcagtcaaggactatgcgtaaaagtataaacgctactaatgtagtgctcatccctaaagtccataacccgaagaaggtgatgcaattcacaccgatttccctttgtaatgtaacttacaaggttatatccaaaatcactgccaacaggattgagctgatccttccacgaatcatctgtcttactcaagcaatgtttatgccagggagaaacattcaagataacaacatccttgtataggagaacatccactcctttaaggaaaaagggtaaagaaggttggtttgctatcaaaattaatcttgtcaaagcatatgataaacttagttgacagttcctagaccaagtgatgggttactttggagccactgcttagtttcgtaactgggtgtctcaatgtatctccacaacatctcttaacaattgccttaataggggccaagtggggaggattatgccttcttgtggtatccgtcagggagaccctccatctccttacctgtttatctaggctccggaggttctatcgagacttcttgagaactccatttgatagaaagagattaaagggattactcttagtcagggagaatcgcgtcttacccacttattctttgcaaataaccttattttggtaggaagggctaatatcgaggaagctaagggctactgacaatgtttggacaagttctacgcttagtctggccaacaagttaacaaactcaaaacatccatcttctttagcggtaatactaaaaagactattacaaatatgttgggaattaggggatcagcaggtaacattaaatacttagggctccctctctttagatcaagacagaaggatgttgactttaatttcattcttgacaacctcacttctaaacttcaaggatagaagatcaaaaccctctcgaattaaatctgtcgagctctctctgctaatttattcaatgcaaaccacaaaattatcaaagaagatatcggtaaagattcatggcatggtgagggatttctagtgggggcatgaaaaggacaacaaaggtctctatctcaaggcttggaataagatgtatctccttaaggctagaaagggtctcgggttccaaaaaactactaaaatgaatagagccttccttgtgaagtggggctagaaccttctaattaatagtcaatctcttccttaaaaggtattgaaagctaagtatcttaggggaaaaaatatgcttgagggcgggtttaaagatttagattcttggctctagaaaaatattatcaaggcgaatgaggttcttaagaaaggggcttccaaaatggtagttgatggtaaagatactagtatttgggaggacccttgggtgatccaagggaaggatttctaccctaaactgattgattcaacccttaggttccaaaaagtagcacacctcttgatggaaaatggggattgggacctctagaatttgactctcctgttcgaccaggagacagttataaacattctgaaagggggtaaaccagctggaagggtttactaggtttggactaaagaagccaagggaaaattctcttcttaattggcttatttgatctaagctttggatagagctcctcaatgtgatgtggctccttccctatggaacatgttgtggaatagtaaaattttggaacgatacaagatcatgtggtagaggaatgctctccccattcataagattcttaggcaacgaatgaccattgaggacaattcttgtcctatttgcagaggaaacgaggaaactatggaacatctatttctaaattacaatttagcttttcacatttccattcgtcccctttgggccttacccccatcaatgactctggtgcaagaatgtgggattgggttaagtttttgtagaaccttaactcaagaggatc

SEQ ID NO: 298262 - DNA, 2954 bp, Cannabis indica
acacacacccacccccccccccccacccccaaaacgctcctctctgtttataggcttagtttattaattggcatctgtataaaagaattagggaattaaatacaattaaactgaataacacttaagggtgcaaattgaaaagtgaaagcacaacacattgacacttgaactaatatattctcagtatatgaggatttccattgaaatttaagttttaaatgtaagagaagtggaaaaatttgagttgaaaatgggaactctattcctaacattagaagtaaggatagcaactttacaattctgacaacccttaaaaagaaagaagaaacgtagggaagctacaatatcaataaatagattacctgataagatagtatattattaaaaaagtaatcacaaaacacgagactagtgtacacattcttcgattggattttttctcaaaaacctgcaaagtggccactttacgacaatcagataacttcattccaacagccatggaggtgtaattatggatgaaaatgaaagctaaataaaagatggatctactttagtaccctcttaaaccgatccatggtgccagacattatgccccttgaagcatccatgttattcccctattttcacaaaatcatccattaaaacacttgcaaaaatttttgaataaaagaatgaatttgctgaaatgaaacctccataccattcgatcaaggaagcgattatgagtctctacctcatcatgtatgtcacctgttatctgtcatcaataaaataatcaacaaaacagcagtaactcaaaacatgaaaaatatggatgaataaaatcattccaattgcaagatgaaaagtcaagatcaatacaactacactcaatcatgtacatctaatgtaccagaaagtgctgtaaactacgctttaacatttctggcaaatgtgttcatagggtgcaccagacaacacagacatgtgcaattgttctttttcttatgctgatgaaaaaataatcagcaattaaaagagcttgattttcttaaaagtttcatacaaatttaaattggttcttgcttttgagaagtaaaaattaccaaaccaaccaaattgaaacctgaaaaacatatcaaatatttttttggtttatcagtatttatagcaagacttatgatttggttaatgatttgaacttttacctacaaactcccttactatgacaccttttgatgtaaattgccataagcccatttataccttacttggttcttgcacatacaaacaatctatctacttaggaaatgaaggcagaataccagaaattcaatgaacataaattgatacgtgacatacaaatagtaggattgattaacaaaatggatgactgatcaattcattagatgtatcatttgtacatggcaaataaccatgaataaaaatctcaaaactaaaacccttaagatgatgaccatcaagagcacaatgtttcttatgcatcaggcaagctgcctccctttgagaaaagaaaatgatttctgtacacatttaaatgtaacgatggatctgctaatgacactcccaagtctcaataatccatcatttctaataactaacaaaataatgaccatagtatttagcacgttgggaacataaagtttgccgatagaatctaacgggagtatggaacagctaaaattttatgtaagtactgtacttcccaagaataaatgctaactcatgtataagtagtaagaggaactttgtagttcaaacgtacttgttttaagaaaatcactctatcttgcaaactctcaacagctttgtcattgtcatgctcgttaatgtcatgtgaatatgaggaagaagacctgagactaccttcctcaaggtcattaaagagagatgatctggaggaacggtgatccctgcaaaaaggtagcactgttatccactgaggacagcataactaggactagtgagacactctagctttgaggctgttggcaatgacgaagaaaaaaaaaagaaaaaatacaaaaggttatgaaggtaataagtcaagctgagatcaaaatgattaagacaaattcaagagatcaaattcccaccaacctggaactaactataagcctctacccttaacccatcaaaatttcaaaacagaattgtgtgttaactacttgccaccatatataaaatgatttcatacataaacaactaaaatctatactttctcatgctgaaaatccccaaatgtttgattgcaaatcctgccaaaaccaaaacttttccttccttcttcaaaacatgaaaattttcaattgggtttgtgattatacaatgcgaatccaagtgaatactaaattactctaaaaagaagcaatgcttttattacagatttgattatgagcttctcagaatcagacagtttcaaacaaagaattaatctatcaatcatgaaaagaaacgatacatacatttaagaacaaaaccccgtgatcttgaactcagatcatgccaagaaaaagcattgtaaaaaaatactgaaattgaaactgaaaccgtaatacgtatgtgttgtaggttttaccttctgtaattcatcgggagactggttgacaagatatgacgaaataaaagtgaggatttgatttcttcaacctccgcaggcttgaatttttgagcaaatcgtgaaattgtgagaattgttaattccacggtgtttttttttctgaaatggttaattccacgtttggttgcccagaaaatctgtgttcaggagggacccagaaatcaaaattaaaatttatgtacaataataacaactttccaaaattaattgatttataggtttttatatggtttataaaaggaaaacttacaaaaatactggaatttggattaagttttacaaaaatactgtcacacggaaaaaatttcaaaaatattgtatttttataaaacac

SEQ ID NO: 298263 - DNA, 2965 bp, Cannabis indica
ttccataataaacaaaatattaggtttacataaggagacgaaacgggagagatgactaaatgcacgatcactcccaataccacgtgcattccagctgacaagctttatggctgcaggcaggcctgctcaacggcgaggcgtgcatttcgaggagagatctcggtttcttgatggctatcgcaccgagactgtttgatctaatgacgaagttccccattgaccatctcagtttttctcttgaagctatctttggaattgggtttgcattttcgttttctgcctttggagctagatggagttgcaacacccggttggtaggataggttcatagcgtccaaccgtttgctagtgtcaaggagaggaatgttgacaggcaaagggacatggaagtagttggagctagtagatttagagctactagagttttgtgaggtactttaaagggtaggtggtgaggcatgtggagcttgttggacaattgagctgctcattgtggcattgaggagtaccgtgaaagtgtgtgggttatttttggtttggggttggttggtgataatgggttgagcatctccatgagtccaggtgacaatgtcttgggtatgtgatgaaggtcccgacttgtataggccaacaagttgggtttgaccatgggttgggggttggtcttgagggcagtatgtggggaatgggggcattaggtccgggggtgagacacatacagtgctagcaggattggaagtcatgaaagtggtcacaggagggttggcaaagctatgctgttcagagcacaacaaagagttagtagtaaccttaactttgccagaaattgttttgatatcatacctgagcttcggaggaagaggagcttcatgacaagctttcatatagtccacacaacccttattatagctgtgtcccatgcgaccacagaaaaagcagatgtcggggagattttcgtattttaactcaagctaaaccaccttgtttatgcccaagaagttgacgggacttccctgggggagagggtatgccacatcaaacatgactcggatacaaaaatatgggccccatgtttcacggaatgatgggcgatacacctcaaacaggtggccgagggaagtcgaaactaattccgcaagttgctcggttcgtttaaggaatggtgtgttgaaaacttgcacccaaagagggatttttaagaggttgtccccattaaggacatccaagaaatttttaatatccatgagaaggggttggttgaggtaggtccaaggttgttgtaaaagcactcgacgcctatccccctcacatccaaactcaaccaaaacaaggccttgagaacgatcggttatggtaaccaagaatctagagatatggttccaattactggtcattttatcaataaaaaccttacggttaaatgacttaaccgtatgcaatttttccaccaaaaagtaatgggttggaacatgctcaggttcggctgggttagcaggggtgggttcatataaggtctggttggtgctttcgatatctgtgaggttcaaagcaagtgtaagagagtttgttaagtcatccatagtggtgactttgttagtgcagacaacaaaataacgagagcaacaacaaagaaagcaaatacagaaaaggctaaagttcagtaatctgggggatgaaaacagggatccttttataggaaaattcccaaaaaaggtaataaatatgatactcggtggttaagtatcacatcgtaggatcggactctccctaaagtggaaataaaaacttgtagtacaaacatttaatggttcgcaaagcagttgaacagaagatttcacgcagatagagggaaaaacacattcaacacccagagcattaactagattaatacattttttttgataaaaatagttaaagccagagtaataaatggaggagatggtgtcatactatccccacagaagggaagattcgctcaagcagaggattaaattttcttttgaatttaaacctagagatcatgattaatcccctcttttgcaggtacaatttgacagaaacaagaaaatagtgaaagggagggagtatacctgaagaaatctcataaatgtgatgacgggaaggggagttgggaagctggccagagttattgttgatgcgatgggtacggtctgggcttcgcaacttgatgcgatggggacggtaggaaccagtcgagctggcttgttcgtcgttggatgagtagtcggagccaccaagatttgagatctggggcttgggtaaggtttcatagtgtggaaacaattaggttgcaggtgtcaacaagaagatttggatgaaaccacatgcatctgcattctcgaaggagagagaaggttgtgagcgttcaaagagtctagagaaggctcttttgaaaaaaaaagagttgttaccatgggaaccttcagtttgaattaagcatttttggtctcagtatttgtagaatggtacgaagcataatccaaaggattaatatctacaaacatatttatacagattattatatttatttacgaagattttaaggttgaattataatcttttgaagacatgtcatggaaaagcttgaatgctatgtacatactgttgaccattatatacatatttttttggactaaatatcattttagtaataaaaattgtttgtgacaatagaaacatttaagtgatgtttggtttggtgaaatgtaatagtaatggtaatgataatagtattgtaatggaataagaatagtaatgggaattgattaagatgtttggtttgttattcgaatgaatattagaataaatgataaattaacaaaattatcccctacttatttgagtaatttgcggtaaaaccccctcaactatcaatttacttggaaaaaaccatccaacctcatatttttgtgggaaaaccttccaaagttctgttccgtttaca

SEQ ID NO: 298264 - DNA, 952 bp, Cannabis indica
agatcctggtaaaataataaccaacaaatataataatattttaaaattaaaaaaaccttaaaaccttttttattttcttctcctcctagttgcacacacgcacgcacacaatacacacatcacaactccttcactctcaacccttctttatctcttcatccaccatacaatcacacaccaccactactcactcacacccttctctttctctttgttggagtcccacgcctacgagagaccacaaccgacctccccccgagtctctgacctcccatttgcacacacccttctcttcgtccttcaccttttctcttcatccctccctcccttccttcctctcatcgtcgacgcaagccccaccccaacaccaccataccatcaatagcaagtcgtgacaagcagaggcaacaacctgtaaggtttttttatagataattaatttttttatttaaaatgtaatatatatatattatatgttgacagtaagaactcgtcaactaagtaattaagaaaaattttgtaataagaaattgaaagattatcaataatcaagagatcaattccacacactaaaaataataagaatttcattgttttattgatattccaagtctcttacaaaagttttcccatcccttataactattccattggggtattcatgcctgagcttttcttattttgaaatccctttggtccttatgatagaggagacaatatctctgttgtaccatgaggatcagtgttgcagatggatgaggaagaagtggtggtcgggtgtcagtttgtacttttagtaacacaaaccttgtctccacttcttgtgccaacagtacggttgtcatcccatcagaggcgtactcattccaacaaccttatgtttggttatctatcttctttggtcattttctctcgttttaggatgtcctgggtattggaaattattttacca

SEQ ID NO: 298265 - DNA, 2300 bp, Cannabis indica
aaacatgtaaagttgatctaataaaccaagacagtactcaagtgcttacttggtcactatccctgtgctatccgtgtcaatcttcctgaaaagtacggaagagaaaaatgttggcagcttgcatatttcctttgtaagcggcttaaattctgtacataaaaacagcaaatttcagtgtttctattccaccattttccttcaattttctttgagagtggtacaaacaagaatatgaagaataaaggaagacacagaaacaaataaaatgaatatcccaccatgcaatcgcaatccatctggatgattgttgaaaaagtcatcaatcctagagaaaaattgttgctctagttcctttggcggtggacggccatttttgaaatagaactgcaagtaaatgacatctaaagcaatataagtttctaagcatgaaagaaagcagcacaaagctagagttcccaagttcatttgtattattttccattgatgaaatatctttaagagaaaattgaaaaactttcataaaagaaagtaacctgaggaatgacttctcgaacttgttcagtgactaacttaagtggagaaccaagaggaggactgcttcgttgctttgaaaaacgtggagaaccagatgaacttcttggagatagtggaggagtactggcagcagggaacatggaaggcgtggtatggctcccagcagtgttcgagttcccaatggcatttatgggattgcctgccttcgcatcatcaatcaaagacttcacctatcataccaaacagaccaaacagtaccaaatgacataagttgcataaacaacaaataaacttttctgttcaattgaaaatgaacacgttaagaaactttagaatatatgaactaccacataaggttttcatgaattgtttgttcgattaatttcaattaagtcctatattgttcagaccgataaaaagagctagtagaaaacccaaaaaaactagttatagttaggcataaagagagtacatgaaaaagttagttgtaactattcatccatttttgtaataattgctgttcctaagaggattaacagcgttttatatgtttcgaatttatttactaagccatttaaaaaaaggattaacaactaaatataggttcgttaggtattatatacaatatctcgatataaataaaactttaacatagtattacatcaaagattcaaaatatgatataaaacacaatttaatataatactatatacaatacaggtgtaacaaacgaacactattaatttaagcaacgaagaaaactttcagcaaattaagcaacaaaaatatgagtaaagaatcaattaccagtcgtccagtttcgggaagagaaagccattgatcaaacaaatcatcagcaattgaagggtttgattttaaagccaaaggagataactctggaagtatcaacagttcaggatccaaacagctaccaatatcaccatctcccttacccacagaatcgatatccatactacggactactaaattaaacctcaaaatctctccaacgttacagaaatgcaaaaattacccaaaccatcaattatacaaattacacaatactattcgcaatcgaaaaaacttccaaatttaatcaaattcacagtcccttctagttcaacaaaaccacttccataccggagttcagataaccctagggtaaagaaaatagacagttccaaagcttcatcctcacccaaaaacaacagttctaaatccgattccttaaagtttctcactcaaaacacaaaagaaaaagaagataaaaacacaagaaagaaaagaagaacgatttcaaagttgttcatcagagcacaaaacatataaaccgattacaggtccaagtatggttgaagattgaagaggaagagaaagaatcagcgatgaatcggtggtaatacacagtagagattcccggaaagagttgggaatgggaatcggagaatgggaatggagttgaaatttgaagttgaaaactgaaagagaagaaaaggtttatatatgaagagagagtaaggacacgtgtaatatttttaggacaaagaagctttgggagaagagaagacttttgggtcaaactctagtctttccttcttcccctcaattctataatatcacttatccaaattgggtagactctataattagggaagtaattagtctatgctaattataattacattatatttttaaaatagtgaattgcttaaaaaaaaatattattagtgtctatcaagtttaatataatttaagaaaatagtttt

SEQ ID NO: 298266 - DNA, 6319 bp, Cannabis indica
atgagaaaaaaaatgttggattggatcggatgcccacccctaattggtagcatgggatgtggtgtgtaagcccatcaaggtggcttgggaattggcaagctaaatgggaagttatgaagttgttgtggagattctctgtagagaacatgtccctttggcacaaagttataagtcattagggagctattaagactcattgggataccaaaaagggagaaaggttgtcatgtagattagaggaccatggaaaggcatagttgcatagtatgatgaatatctagatttgtcccactttaaaattgggaagggaaatggaatcaaattttgggaaggcaactatgcaactaactttttaatcaatcaattaatctatttcttcatctagccgtatccttatcaaataattaattgattaaaaaattaatagggtgggattgaaggaatacctaaatatgggactcaatggaatcttaatttcagaaggagcctaaaggatagagaggtttcaagcttgatagatatattgcaaattatagaactttcaactttttctttgttggatgacaggcaggtgtggaaggcagacttgagtggttttttcacttgtaagttagctcttgaaggcttagttaccatcatttgcttgctgtggaaaagtgggcaaaaaccatgtcgaaaagtagttgtgttccatctaaagtaaaagtatttagctggttattatcaataaagtggatgaatatttatgaaaatgataagcaccacacaatcccactggcctcttcagtatttaaaggaaacatggctctatactaatttgataaacaccacgcaatcaatgactaaaattcctctataacaattgtattaaaactaggaatagaactctagcattcgagagctacgaatctccccaagatccaatgctcaattacaattttcaaggcaaaaaccattacccactaacctcctcatttcttaaagggaaccaacaatcctcccaatcccaatgcaaacatcccttgttgaaaagaacattacatggaaataagagaaatacaaggaaatagaataaggaactagaatatctacatggcattgcgcctagtgtaggtgaaacgattggaggtttgtcaaaaaaactacaacaaaagcagtcatatcaattattgactccaaggtgatgagtttgttgtataaaaactatcaatcatttgtttatggagtgtaacttcattccactattatgggccaaactgctcaaagagtaaggcatttagtgatgtatgccccattcatgcaaccagaggttgggtgtgaaaaataaaaaggggtaggaagatttctacagtttggatagtagacgcactcgttatgttatgggatgtttggtttgaaagcaagcagaatatttgatgataaaaaagtagtagcagaggatttgtgggaaaatattaaattttgggtcgcaacttggatctataaatcaaaggcttctagggtagagttaatcatttcaaaatgtcagcagagagaggggattttttgtattaaaagtttttagcgagtgtttaaagattgtgttgttttattttactttgtataaagctttactgagctagctctaagatcattccttgtattctttatcatattaatacaaataagttccttttcaaagaaagaagaacctaaactaaaatcaaagttgtccaatttaaagcaaaatccctgcctcatcttgaacaagagggagatcatcctacttcatttatcagtattgtcctttaaatctatttgtctatttattttcttttgcatgcacgagaggatttagggagggggaggggcagattatgctaacttcatgatgacagatcctacatagcacagattcaaccagcgtgagctttgttccccattttcaatcagtctaactttttctttcataaggaacctacaccacaataagtgattgaacttatagtctcattctcctatatttgagtttgagataactgtcaacagaattaactggaaaaggacgagaaagagacaaagaattggagttctataaaacgataaggtttgtacaaccatccctcatagcaaaaaggaacaagaaaatttgatacttcaaattggctatgttagtaaagtagaccaagaaattttagtccttctagcttgaagtaacatgctaacgagataaaaattcctactgagaacatgtggatagatgatgccaatgacattgctatagttacttacactctttgcacaatcatataattgagccaagctttctcattcacaggactgcttcttgcatgttcctggtcgtttcacgtttatataatgctctacactaaagtaatacttaagctaaaggcattatacgtttcaagacaaacttcaatcccatcaatcaatttagcacaataaatccttgaatgaggcaagaccacaaaccaatcatcaaatttaatctaccttttctaatttgaattttcaaaaaaaaaaaatgatccaatacaaagaatcaaatgcaatcacagaatatgatttccagttactagattctgtgtcctcttaactaaaactcgaaatctcttactttcccaaaaatcatacttgttataatagcactaaacgtatcaaagcccccactcgacaccacaaaacgtccctggcaaaaccctaattctaattgaataaaaactaaacacagcaaatcctttaattagaacacaaaattcgttaattatcaaaatataataatgggaagtcgaaataaataccagtaacgaaccgctttgcatcgagcacagcgtgtagtggtggggaaataacaaacgacgcactgattcagagcaaccgtggaaacgacgccgtaaccgtattctgcattcgcctcgagctcagccctagccgcctcctcggaggccaaaaggaccagcctcctgatctcttccttcctggatacagaaagcctccattttcggcggatgacaaagccgatcaccggaacgaaaaaacaaaccaggagaaccaagctttgaaaccctagacccccaacaacaagcatttagccggcacccaacaatacacatccagagaaagcaacaaaaactaggattttaatcccacccaacaccatagattggtcgatttcgtctcagccggcgccggtcccggtggtcacgcatgcaggcaaattataagggagaaaaagatcactcaatttacagccgtcgattaccggttgctcattccaaataaaattttggaaataaaaatatgaaattttcgagagagtgagagaaacgaaattctgttgaaatgcagagtttttttttttttaagtgtgaactcgatgacctttttcttcagttttgagcttcgtgtggattcggacaatgagaataagaaaagaaaagtaaatatatttctattaattaattttccgcattccttttactatataaattaataaatcggtaaataataccctacatttattatactgtacttttctttttcagaatttgtaaaggtattacccgtgttaatattgttattagtctaattaagtattgagttgtatataatttttagaaaatataactaactaattgtgagccgctatttataaaaagtactaagtactaccgatgctcaattacaatactacctttttaaaaaaaatatatagaatattattaatgacaatcaaactaaaataatagtttgcaatctaattagatttttttcgttgaagacacaatcaggattagaattaaaaaaacgagataaataatcagtcgtctaattctcaaatcgtttgataaaaactatagtaaaatcaaataaaaaagattacagtatcacaattaacttttagaacacctatatgatatttcatccacagctgagaatatacaatagtgaaaactgttgcagtagtttcattcaaacttgtagcttgagcactaaactatttgtgtaaggtatgtaattgcactactaataacctttttagtcagagagaacttgttattaccaactgctaataatgatttaagggtgagtcatcgatgaaaaaagaaaaaccaacaacgaaacaaaacaaaatcatatttaaaacactcaaaattatgtcacaaagataagactaaaacactcaaaacaatatcataaagacaagactaattgtaaaagcaaaattcaaattgtagtagcaaaacacaactcttaccaatttatattaaagtaaaaaattatagtctagcaattagcaatttagcattcaagagaataagaaaaaatagcaatttagtatttgttataccttatatttaagttttagagattaaagaaaaaccatgttcttgtttttttttcagaaaataataataattatatgatttggtcgagtgaggatcaggaatcgaggcaaggaattttatttgattttatattattatattattaattattattataaatataagacgggtattcgaaagcgtgaatgagtgaatccatcttcgatcaaattttttgtaccgattggagagattagatatagtttaggactaagcttgttatttaatcattttaatgacgatgtttgttttttgtggaagaaaaagaaaggcactaaattggacggttgcctggtgacgcatgtgatttgatagacggcaaagattggatgggttcgggctctgacggtggagattgagtgtagaagtttgattctctatagtaatggcttctttgtgattgtccatatgtagtacaaagctctgcgcaggattcttcatttggaattaaccattccacaagacaacttatgttcttttcttttcttttcttttttgtggtattaaatttattaacatcaacttcaaaatgtattattttttttcttgaaagagaacttcaaaataaaatttaaaagattgtttttttttttttatgatttctcttaatcaaattaatttatactatttttattaatttcataaatcagtgctactaatgggggtagcgtaaatgtaagacaagttgtaagaatatatataaaaaaaataataaaaaataaataaataaaattagagtttgtggaatagatgttagcgttccaaaagagataactatgagaatgtcttatttcatatgggaagagttcagctgaatttttataattgatgattattttaatatttagtatgtataatcaccctattattgtcatttgttactctaactcgcatgagacaatacataatcaaattaaagtattagttaatatgtgaagttacttgatgattagtgggttgaaactataaagaacagttctctcaagatctatatattttatagcttttgataatattgagaagtcatttacttggtataagataccaacaaaggaaagaactatattgggcccccacataaagttttacagaatttaattaaaaaaattcaaaatatactcatacacttatcgaaaataccagttgaccttcgtctcctttacaataataaacttttgccgtctttgctggcctatggtagtaaaacaataataataataatactaataaatatttatgtattttatttattaaattttgataggtcatttgttatgtatatctggtgtgtcgtgtggtttttgatcaaaggatgagtaagcttagaatcagcattgcctaaagtaggaatagatttatgacagagcgtgcagtttagtcaaagtttgatgcagataatccttgtcttttatgagactcatgtgtagcttttgacatagttttttttttctaataaaaataaaacgtaaaataataatagtaataaaatggaaaattcagagcagccaacaaattatttttccttcgcctcttttctacaattttacttttctaagttatagcgtaagttgaaaaattatgattgtcaaaaaggaaattctaaagatacaaatttcttgttatctaccatgaaagtgctctctttattcttgaatgcaaataatatgagcttgaaaagaaatagatttttttattagtgtttttatttttttttattatttatttatttattttggtgagaataacgaaaagaaaaaattaaatagtaaaatagatttgataaaatgaaggaaaaaaaaaaaacaaatatatctatatgaataacttcagcatatgtatataatcacacgtacaaaatttaaatggctaaaattaatgatatattatagggacaatatgtaaaatggtcttaaatctaacaattaagttaa

SEQ ID NO: 298267 - DNA, 3104 bp, Cannabis indica
tacggtaaatttatcatatctaatccaagttcaatacttccaatgtatactccatacattcgatacttgaaaactttgccaatgccttggaaaggacataacacttatccaaggtgtaagtatacatattactgattattatgcgagtctaaatctagtgaactgacaaatcaggaaattaaacttttgaacatataatcatgattattttccattgtgctgacaacactataatcatgaacaaatacatatgttctggacttaatagaacttatacattaaatataatcatgaaataaatcatgtgtaccatgcaacataaaatgtgatttctaatctttattaattagtaaatctgattatattaaaatgagttttatctagggcacaaaacccaacactaggttctttaggaaccaggacatatcttccattgctagagggaggacagaccttgtcacaaaggtctaacagcgagaacagctagatctcaacaaccagcagtttgcggggcgatcagggatctttggctcagcaatagtccccatcaaccagcccttggctggccagccaccaacaaaagcactcttggctaaccaagagagtacactccctccccgaggggaacaagccactcaaaggccaatcttcaaccggcttggactgggattgggtggaaacacccaaagcaacaatttcagaagagacattgatcactttaggtatctagatccaccaaactctagcaatcaatatgatctacctcctatcaacaaacgataatgtctaacaactggggaatcacaggcagccagattctgccaaatgtagggttggctgaccatggacagttgcctaacataagtttggccggccagagccaacatcccttcatgggagtgaccgaccaaggtcagcaacatagcacagggctagccaacctccatcatacactcttccaaagtatggtcggccagcccctgacagtttcaagcctgcagccccttcaagagggccagtcagtcaagtctctacaacaatagatcctgttgtgcaagcacagttagaccagattaaggacatgatcaagggcctagatggtccaaaaccctcagaccttgagttagataggtcaaagggatcaccattctcagcatacataaatgctttgcccttgtctaagttcaagatgccagtatggaagatgtataatgcgcgagaagaccctttggcacacatcaaatactttgagatgcaactcaatctccaaaagattactaatgatgtgcgatgtcgtatattcccgacaaatttgtcagagatagctcagtaatggtactttatacttgccttaaaaaggtttaattcttggaatgagttttcccgagagttttacacacaattctcatcctcaaggcttataccatcacaactagaagaccttgttgaagtcaaacaatgataaggagaaactttgaaggattacatccagaggttcatggccaatgccaccaaggtcaaaggccttatagaagagggctggtatacggtcatactagggggcatcctcccattaagtgacttctagaaagacattcagaggatctcaactaacaacatggaggagtttctagaagagggctggtatacggtcatactgtggggcatcctcccattaagtgacttctagaaagacattcagaggatctcaactaacaacatggaggagtttcttgatagagttgacatctttaccaaactaaaagaagctgtctgataggccctgacagggtaagttatcaacatgtagtcacaaggcattcagtaacctcgtgattaccaggcgcacaagcagataccaataattctacccagacctgtagtaacactaggaacaagtgcagcaacaatagctctggaaaaaacaatggcaagaaggggaagtttaatacttcttctacgtcacaaaatcagaaggacaaggaggagaagtacacatgcttcaccttcctgacggaaaaatcccaggccatctttatggccaatcaaggaacagtcccatacagaaagccctttcccatcaagaaggagttgagcaagagggacatgtcaaagttctgtttgtttcacaacgactttggccatttattcttttatttctttcaggttcacttgacttgattaatcatttaatattctgaaatattaaatattaaattttgtaattccaagtttgatattttaaaattgactaatctagaaccttctattagtcacatctaattaataaatttattaaatctcatgactaatcatgtcagatgccgaaattaatgattctattctacatctcatcaagttcaaatcactattgattttagttgattttatttaagattacttgactaataagaatatttatttctcattttacaaacgatactctaatatatattcttttattaattaactccttaatcttaaattctaataatgtgttttaaatggattcacctcttgaatgatattctaatgtcagctaaaaacttttcctggtgatgtggacatcaatgtttgacatgtggcaagaaggatgatgtcacaaagttgagtagatccaagtcatagcagtcgatctgggaagggaccctagccctgcgcccaggttgactttgggagctctatgatggaagtttggacttcaataacttgaatccaactcatcattatcttttagtattttctaccatgaagacatagagcaacctaatccaagcctcaagagctaaaattacatgaacctgcaacccggaagccaatctaggcacctagggtttcacccgatgcccaagttgacattcctaactagggtttcagtttctgggactgtcttagtgtaaatggatcaaaacttgcattggggcatcaactagacataccacaaacatatttgaggcatcagaattagaatcagagcaagttcatttttaagcatctggggcttcggcgccccgagcacccagcgcccaagttgacaatctgtcaatctgggtaggggtgttcataaaaaccaaaaaaccagaaccgaccatcaaaccgaccag

SEQ ID NO: 298268 - DNA, 2992 bp, Cannabis indica
gaggaaaatcttctcgaattcttcccatctgcaaagcgctctgctgaaggcttctctgaacatttcacgtgagttacctatatttgatattgaatttttgcttgtgtatagcgcattggtttgaaagaatttcatttctttagtgtctaatcttttgcagttatcatacgagtacaatacaccctgtgtttgtatggtgtgataacatttattggtattaccttatatggaacaaggtgaagtctatgatagaaagctgttgatggattagtcctttgatgattagtattgtaatgataaccagtttgtgaatttatctcttcttttttttttcctcattttcagtaaagaagggttggtaccattggttgaatacaacgataagaaaatattcgaggtgaagttgaaggagatgaaatctgccttgacaacccagataacagaggaaactgatatatcagaagtcatagagactgtgaagcagcgtgtgcgagatgctaaactacctgatattgaggtggtgcgaattttgtgggatgtcataatggatgctgttcagtggtctggaaagaaccagcagcagaatgctaattcagctcttcgccaggtatgctttaatgatatgaagttataatttttgttatattaatgttttgattttacaatatcattcagtgtagtgaaaaaggttgactatctatgtatataatgtatggcacaggtgaaaacatgggcgaagttgttgaacgccttctgtacgagcgggaagctcgagttggaactgatttacaaagttcagatgcagtgctacgaggatgctaagcttatgaaactgttccctgaaattgtaagatccctttatgaccaggatgttcttgctgaggataccattcttcattggttccgcaaaggaaccaaccccaagggcaggtatgatggatgattcatctggtcgttttcttcttcttctgtggttgtttaataataataataataatgtgaaatttggttggataacattgcaggcaaacttttgtgaaggccctggagccatttgtgaattggctggaagaagcagaagaggaggaatagaaagcaaggctaggccttgtctagctctctcgttctctctcttgctgtgaagtagcgttcccttatatttgctgctgctgagatgtaaaactcataaaagaaaatgtgtgctgtgctgttgctatgacccactcttatgctttattaattttgaataatcaagtctactttttgttttgcttatcaagttttccttttttattcccatttttctaatttataattcagctttttctttttaattgttttctattggatcgtgttttctttaaatgaaaaagtatatagtaacaaaatgtaggatggttaagatttggagggactggtgctgacattaaggtggtgtttgattggctgaaatgaaagtgaagttatttttattttgtttttttatttaattttattttaaagtattggaatgttattttaattttagttatgtttttattttttttaattcagtgtttgttatgtgagtttgggttggagagagtagagttgaagggagtaaactttgagagaatataaaattatgtgttagaagagattagcattattattattttaattaataaagtaaaatctccttaaaaatacaaattctttgtcattgaaatatttaccatctcatttttactaagtctaaacttcatattaaatgccccataagcatcaactccttggtatttagcatatggctgaatgagatatcttagagtaaatctcaaaccaactaagtagaaagcttcaaattgtagtggcataatcgataaggtccgaaagaagcttcattttgttcatttaattttgttaaaaatttaattatttttttacaagatttttttttttttttcattaatcacataaagttacacctaaaggccaaccaagcaaggctcaacaagctacttccagctcacaaaacttgatgttcttcttaagattcaactgtaaaaaactataaatcttataatgaactcaaaaatgcaagtatttttattattccaaatgtagtatataattaacgccatcacagtcgaaatagcaccagttttgatccttctcttcagaccttctagtcaagagaggcagttctcataattttgaggccacctacaaccgatccaactttgaacaaggagaaattaaaaaagagatgctcatgatcctccttgtccactccataaattaggcaaatcaagctctctaaatagatgccaagccgagccaagtgatcccttgtgagtaacttagaatttaccacttgcgaaaagataaatttgtgcttaggaatgctcatcttattccaaacaaaaagatagtacttaactttttcaagttgaaaaaagtttctatacaacatactgttaatacagattttcgttaactaaataattattagtcttttttctataataaataaactttagaattaattacataataattaataataagaatgacaataaatgacaagagggtttttttatgtagttttgaagttaaattttgactgatcacgagttcatcttattcaagtttgaaagattatatataaaatacaatgacactatttttcatgaatgaacaataaataatcacaatattatctatttttccaaaggttggtcgttctttgttccttgggttctgtccctatttataagagttcaaggtgacacttattcctttgggatatgatcattcgtaactgttcatgaaacgtgaacatttctcacgttttatttttctgtacatgagataattataaattaccgcctaactgctctttgtctttatctgtagacggatatgctgactgtgctttgttgtacttgccattcaagtaatacttttcttaaacatcttcgtagaaaaatgtctaagtgtatagttatag

SEQ ID NO: 298269 - DNA, 2051 bp, Cannabis indica
aaaatttaaggtgctaaaagactaaagccaaacatgtacagaaaaaaatgatgaagtgctacatgaaaaaaagaagcattgccactcgattgccgtggcattaagataatagatgtaacatgtcgtaatcttctatattgacagcacacaagcaaatacccatcagcccagcagtttagttgcatttgcagagccaacataaaggtttttggaaagaaaatgttacaccatctgaggtcagacaagctgtagagctcagacatgcatgttggtctcttgaggtaatagaatattaaagtctaacagcattttatcgaaatccaaagcctactatataacaaagtcaggtcttgcccatgacagcaatagttctacctcctggtaaagtttgatcttttattatcacaatgggattcaaagccaaatagtagatttttcagctctagacgtgctacaacccaagttctatgatcccatacaagaagaaaatcaccttcaagcagagagaaaagaaaacagctctagaattgctgaaaaacttcttgcaaactatttgcaggacaaatatgcaatggactcacatggttatgagatggaaccggttatgcaactatttaatatataccctgaaaaaaccaattaaattagcattgcttcgtcgtcatctctcaattaattcaattgcaattaacaaagatttggtttcttgcttgcaccaagactgtaaaaacttccggtcagagtaagttgattcagaaaccaaaacaagcacttcacatccaagatagattccattaatttgagcttaaacatgtacaagactactacttttgttgactatatttatgggggcataagacacgcatcataaataaaaactacccttttcacactaccactactttttctttggtttccttcatttccatatctattgtacaatcaaagaaatcaacacaacaaaacaccaacaacagtgtagagctggattcacctcgagaatgttgtggcatacagtcccagcaattgccttggcagcatggagattctctcccgcgattatagtcagattggtaattatgggctttgaattgaaagtcagctctgcaatcgcagtcttgtactggctcacaagctcctgatgttgctgttgctgctgctgatgctgcgacaaaggctgcggctgataccctccgccaccgccgccgccgctgctgcgacttgaaaccaaagggttgttcccagttggtctttgcggaaaagaccgggtatttggattcgaactgagacctcctcgctctggttcttcattcaatcggggtttcttaaggcctggctctcttgatctatcgaaaggtcttcgagagctttccatttccattaccgtgaattacaaatcaagataccaagaaactctaaactaaatctaaatcttccattacagaataactcgaagaaagggaagaacaataaaaaaatgtccaaattcaattttgatgatacaaaaaatagaactacaaaaactttatccacaacaagggactctgaaattaaacagaattaacaaatatatataagagaaaagaaataaaaaaaaaaaaaatcccacttcctaagcgaacaagaacaagaaggataaaaccctaatctaatctaattacagaaaagagagagaaatgaaaatgggtaagaaagtttagggctttaatagtgaagagaaaagaaaaaggaggaaggagatttaggagggagaaggagaaatgtgggcaatagagagcttttaatagtgaagttcggcttccgtttaagacaaacccaaaactttcatgattcgagattctcacaaatttgagaacatgcttttttttctttttttcttcttttctcttttttttttcttttttaattttttaagagtaatgatatggggatgagtttagaatgagtttggttggtgtatggaatggtacggaataagaatggtaatatgaattggttaatttttttttttttttttaaattaaagcgttagatagatattaaaattagac

SEQ ID NO: 298270 - DNA, 4889 bp, Cannabis indica
atattttcttatatacaactgacatttgcaaaaacacggtttttcacaaaataattgaaaaagttgtgtttctccattaattaatcactaaaatgattgaataattgtttgaaatattaatataagatatttttctctatattcatatataggtcggtataaaagatcaaaattaaatgagattaatttttttattataaaatgaagaataagaaaagaaaatgagaaaataaaacagaaagttcttaagtttttaatggggtgatcttttatttatacaaaaatgtgagctacaaaattaaaaactaaaaaaatgaataatggtaattacaattaaaaattaattggaagatttggacaagatccatatattatttatacttccctttgtatatccataataaataattcattaaaaattttgcttaaaaatctaatagaacaaaaactcgattaagagagaaatacaataatcatttaatggcatacacttgtaaacatttgttaaagcaaaaagaatatttacacaatccaatgctagtagaattggcacaaaaataaaagaacgattccatcagctttgcactccaacaaactacgggtgaattcaggatagaccaaaaggcccatgctatttttcaattctcttaactccacccttcaagcgaagaagtgactctgccagtccaagtttgttaaccaggaagtaaaaatgacttggagagagcccttttgtcaagaaatctgcgatctgatcatgcgataaaatgtagcgaattttgagtttctgatgtagtactttgtctctcatgaagtgtaaatcaagctctatgtgtttggtacgctcatgatatactggattcgatgcgaacacgctggcactcatgttatcagactaaattattggtgttgttggcattcatacttcattttttgcatcagttcctgtaaccacgccaactctgctgcaagatgtgcaagagatctatattcggactcagtgctagaccgtgcaactacggtttatttcttcgaggactaaaatattagggactctccaaggaacacacaatatcttgttattgacctccgatcgtcggcacattaggcccaatcagcgtttgaaaacccttgtaaagtcaagttgtcactcggggaaatgtgaatctcgtgatgcattgtgcccttgagataccttaatattctcttagtagcccccaatgtataaaagtttgacttttgagaaattgatttaatttgttgaccacaaaagagatatttggctgagtatggctcagatattgtaaggcaacaatgacactcctgtatagagatggattttctaggtaatcaccatcactaatcaaagaggtttccctattgtcattggtgttgggcttggcttgatgttttccatcttatatttctacaagagctcactatgtattttctttgtgactaatagactcctgtgtgatccttgaatatacctttattccaagaaagtaatgcaagtgtcccaagtccttgaaagagaacaccttgttaaacctatcaattaactgcttaatttcacctgagctgttacctgttattatgatatcatctacatagatgagtatcataataacaaaatttagggttttcaacataaatagagctgaatcggttttagaatttttaaaattccagtcaaataaggtctttttaccatgatctaggggtctatcttagtccatagcgcgatttattcagcttacacacataatgaggttttgttgcatcttcaaatcctagaggttgcatcatgtatatatacatcttccttaagtactccgttaaggaatgtgttgttgacatcttattgtcgaatttccaaattgtgtgctactgcgattgtcaaaacaactcggacagttaaggatttgatcaagggactaaacgtttcaccaaaataaactcttagatgttgatgaaaaccgttggtgacaaggcgtgctttgaatctttagaagctgccatcaaaattgtacttgattttatatacccacttacaacctactatgtggggaatatgaacaatagtgatatcaaccaatatccacgttcgattgtgataaagaggtgtcatttcttcataaatagcacgattacacccctcatgttgaagtgcatctttgagagagtacggttcatgacgtgagagatcaaatttagcatggccaaggtagaatttgggtttgaagacccatgtctttgctcgagcaataattggatgaaaagaccttaatggctgaattgtgactagtgtggtaacatgtgtagaactgttattcgtggatgcacaatctatatcctgtgagacagctacaagggactgatgcaatggtgagatatcaagtttagtatcagagggaggagagtatacctgctgtgaggatgagtctagagaccgaggtggtgattctgcaaggccaggactgataggtgttgtctgagtgagaatcaggtgttacatatgatagcgtatttggtaagtgttgagggtagtatgaggtacattaggaagagtgaaccaagcatgaggtgtgtcaagagtgacaatttgttcatgtcgatgaagaaaccatgttgacatggaaattcatgttcattaaagatgacatgcctgaaattgtatattcgcccatgaggagttaggcatttatagcctttttgtgcttcattgtagcaaaaattaatgcatttagaggagtgaaactaaaacttgtgtgtttgatataatcacagataagaaaagcatgttgtacgtaccaaaaaccttaagagatttatagtctagttttgtggagtacaagacttcatatggagatttttcattgagtatagaagtgggaagacgattgatgagatgaacaacagtgtggaaggcatctgtccaatatttgaatcgcatgtatgcttgtgctaagagagtgagtccaattttgactatgtgtcgatgctttcattaagcccttccattctatttagaagtatgagggcatgaatgttgataaacaatgccattttgattgacaatgtctgtatatgcttggaactcacctccccaatcagttctaagagctttgattttcctatcaaattagttttccaccaatgctttgaacttaacaaaagccaaaaggacattagatttttgttttagtggaaagatccaagtatagcggctatgttcatccataaagtgaatgtataatctaaaatttatgtgtgaatttatgagagttggtccccatagatccttgtgtatgagatgtagaacattagaggcatgattgatagagtttttgaaaggtaaatagtgggatttcccatattgacatacataaaaaaaattgatttctcattcataactggcatcacattagttgtttttaaaactttactcaacactgcatgagaagggtgaccgagccttttatgacacaaactcaaaacatactcatcacactagttttatttgatttatatgttgtagcagcgactctaacaaaagaaatagacttagatttagaagactgggggtatgatttgtttggctgagaaaggagagatgtgttgagctagtagagtccatcctcaagagctcctcacagaaccactctccttgtctcctggtccttcacacaacaagtagatggaaagaattcaatagatacattattatttgttgtaaattgagaaacactaatcaaattcttagtgatatttggaacatgaaagagattcttaagaattgaaggtgcagatgaatgagttttaagttggcctgagctgatatgggatatggttagtttattaccatcaccaacagtaatcttctccttaccaccatacacggacttgttgctcatctgtccatcttcaacagtcaaatggttgctcactccactatttgtgtaccaactattatcattgagaacttgtggtctaacaacaagtgcactgaattttttttcctgattttgatgtcttggtggctgatgtcccatgtaattctcatcgtacgtgttgtaacaaacaacagttgagtggtcatacttgccacagacttggaccctccaaaatgaccacgacgacccctaccatgatttccatttctttcttgagatcctaaatttaaagaggagcctcgcccatgttgatggtactggtttgtgaatcgagagccacaatgaccagttggtttgtgagccaagttggccgatggtgaaactaggttcttatggctaggaggggtagcaaacaacctttccagtttgttgttgaagctgaggagtatgctctgtagttcttgccaagttgttttagatttggactcgattagagagacaatcgacgggtattcaatctccaaactagataatacattggacactagatgactttccggataaggttttccaacgagtgcaagtgagtaagcccacatacgcattcgctttagataatcagtcattgatgtagatcctttccttgttgtctaaagttcggtgtggagatcattagtgtgagcctgtgagtatgcaccatagagatattcaagtgttgtccaaagtacatgagctgattgacatcccattactttggacacaatactttcgatcatcgaactgtagacccattccattaataactggtcatgaacaatccaattttttcatagtcaaggttaatggtaacatgataattaagggaattagggatacctgaagtgatgaactcctcttgacaggccttttggccattgatgaaacctttgaatctgtaaccttgaataatggtgaaaaccatcgtcttccacagggaaaagtttttttttcaag

SEQ ID NO: 298271 - DNA, 1460 bp, Cannabis indica
tttgagctattgtgcggattagaattggatccaaaaaactgaaatctgtacttagtgcgaatcggatgcactatgagcaaaaaagtataaattaaattggatgaacacctttataaatacattttagttaattacgacatatatttagtaataaaagataatttttataaatataatattagtctttgtgtaaatggttaaactaaattacatatagaataaaaatcatgaattcaaatatatcttacaattacgtccccctcagtttaaattgagagtccgcaaccacatctattaaatagagctctcacatcacgtcacaatgtgtatataaatagaattatcgtgtgggtgaggtagtggaacatgtattaataacattaatggttgaacaacaaccgcactgaactacttatttgccacgagggtagtaagaagaagtggatgatcaacttaattaattcaacacggtttggtccatttggtattggtgatgttaatgttagtgttaattagtacttactcaaatgctttcttcattttgttctgacaagttgaaacttttcaatacattttcacacacacacaccatggaaaaatcacaccaaaaaattagttttctaatatagtagtgctactcaatatcacgcaataattatttgttttctaatgactaaaacaatcaccatcatacaattccaatgacaaactaataaaatcaaagtttgcccacatttacaaaacacttacaattgtttgttgttgttgttgtttttttttttttttccaataatttcgagtcacactttgttaaaattaatattcaactaattttaggggtacaacaattaccttatgatgatattagcagcccaaaaatatcaatgtatattatggtcatattccagtatatatatatatataaaatatacaatatatttatatatatatataatttttattagttatgttgttggtggttcttgcagtgttattttgcgttttgcgaatggtgttacccacacacggtgactagtataagagagtgtatgaacagatgtttatccacgtattttttaattttctgtaacagtagatttattttaatgaattgcattttttattaaaaatatatatagaaggtttaaatgattatatcaaatttgtagtcatgactgttacatttatttttagtcattaaattgttattaaatagttgtgattaatttaaaaattcaataaaaagaaataataaaattatctagtatcttatattttttataaaattatctggtgccttataattaaaattattctgtacagaaattataaataacaattttattatattgttcaaatttaaatatgtaattataggtatattgtggtgattcaatcaccattcaagaacataaacaagatcaaaataaaaccagaaaacagatgacataaaccagaaa

SEQ ID NO: 298272 - DNA, 866 bp, Cannabis indica
ggacggtttatgatgagtctcatacaatctagtttagctgcaatttttattttttagaaaagaccttactgtgacaaacctttactttgtattagctttgggaatcaaccaaaaagtcatgtgtcttgtgtaaatctcttggtaacctttcatttattattttctttgttagtttatagcacttttaagggtatttgttgaaaatcgtacatcatttaaaccaaactaaccaataagatataagttatttagtcgagaagggacctaatccatagcttgaatgatcccaaaaaacattttaaatttttttatccgaatgattttatcagagtatttgtttaatacttgtttcttaccttttctcatattcagattggtttgcaaggagagcatttaggcatttacaaggcagatggtattaataaagtaaattgggttgctacctcggaaccaccaaagatgcaacctttaacatggtacaaggtaaatactgggatctggggaacattatggttttcgtattacagaggctgattgtttcagttgtattattactttctttttatgctgttgaaattaagaaaaacaaagtactcactcggactcggagtattgcaggctgaaataaaccctccaccagggaaagaacctgtggggctggatatggttcatatgggaaaaggtctagcttggttgaatggggaagaaattggaaggtactggccaaggaagagttctatagatgatggatgtgttaaagaatgtgattaccgaggaaagttcatgcccaacaaatgctttacgggttgtggagaaccaactcaaagatggtaagactaagtcaataaatatactcaaagatgttt

SEQ ID NO: 298273 - DNA, 3336 bp, Cannabis indica
agttttagtaaataatgtattacaaaaattagtttccgatttatttttttatttcatttctatttacattttctttatttattttattaatactctataataaatgtgctattagtttgtaagaatttttaaatagtgattacttatttttattttattaatttcttgagaatatatatttataggtttgaccgtgagtaggcacgtacgtaatactcaagtcaagatagacatatatatgtttcatgtgaattaatagtgtagtcgtgactcgagagagttttcaactctatattaattgaaagagccgttgtcataactccatatatattatctcttaacacatattgtttattgaactaagaatttaagtagaagaaggcgtattctttatttatttatttatttttcttttggagagttggacgtcctttttattattctccatgttaaaatttgatataaatttaaatgtttatagtattaaatatagtttaaactaagaaaagtaatattaacaagttagcttcaataattaaagtactgaatacagattttattgataaaatttcataaagtaaactttaaatattaaaaataaaaataccaaaaaaaaaggtgttatattattttcagttttgaagtgttgaataacatattaaccggttaccatcgtaatgattactactacatcaatttctaaaataataaattggatacaagtttttattttttatttggtaatgataatcaacttgaactaattggatacaagtggttgattagcatagaaaaaaatgaagtccatttgggccttactccatagtcacataaagcggatgggcttttaattgggcgtgtacagtacatatgctctttgttacagaaaattctctctcagctatatccaaagtcatagcatgtgagttgttgcaagtatgacatgattgttttgagacgatacaagaagacatttcttgatcatcatactgctctttgttacagaaaattctcagctatatccattgttgaacttgatggaattaaaacacaagaatgcttttccccggttggccaaagagctgacccagttcctcttttgcatgaactcttgcaagcttgctcaacgcaagggctatcatggaaggacaagcctgccattcccagatcattcgtattgggtttcaaacaaacactttaacgtcaaacatgctaataaatttgtacgccaaatgtgggttagttgattgtgctcgcaaagtgttcgacgaaatgtctgaaaggagtttggtttcgtggaatacgatgattggatcacttacccatagtgggaaggaacgtgaagctcttggactcttcttgaatatgcaaagagaaggaaaccctttcagtgaattcactgtttcgagtgttctttgtgcatgtgctgggaaatttgctgtgtttgagtgtaaacagttacatgcttttgctgttaaggcatcaatggattcaaatgtgtttgttgggactgcattacttgatgtttatgctaaatgtggttttataaaggatgccagttgtgtctttgagtgtatgccgaataagagtctcgttacatggagttcaatgatggcaggctatgtgcagactgcactttatgaggaagctctagttttgttccacaaagctcaagtgcttgaattggaagcagacccctttgtattttcttctgctatttgtgcttgtgcaggccttgcgtctctgaatgaagggaaccaggttaatgctgcgctatgtaaagcgggattcggatcaaatatatttattgcttcgtcgcttatagacatgtacgcaaaatgtggtagcattgaagaagcatacactgtgtttcaatgtacagaagaaagaaatattgtcttgtggaatgcaatgatttcagggtttgctagacatgcttgttctcttgaggtgatgatattatttgagaaaatgcagcagattggtatgttcccaaatgaagtgacttatatttctgtgttatctgcctgtagtcatatgggattggttgaaaatggaagaaagtattttgaacttatgagaaaagaacacaatgtttcaccaaatgttgtgcactattcaaccatggttgatattcttggccgaacagggttgattgttgatgctcataacttgattgagaacatgccattctctgctactgcttccatgtggggatcactcttggcttcttgcaggatccatggcaatcttcagctagcggaggtagctgctgaccatttatttgaaatggagcctgataatgcaggaaatcacattctgctttctaacatttatgcagcaaacaataagtgggaggatgttgcaagaacaagaaagaatcttaaggaaagtgaggtgaagaaggagagaggtaaaagttggatcgaagttaagaacacggttcactcattcatggttggagaaagaaaccatcctagaattgctgatatttactcgatgttagacgatttggttgaagaattgaaaaaattgggttacctagcaaagggtgaagatgagcttcacaaagttgaagagagtacaaaacatgagcttttgaggcaccacagtgagaagcttgctgtcacttttggactaatgtgtttgcctcccagtgcacctattcgaattatgaagaatcttaggatctgtggagattgccattcatttatgaagttcacatcaagttttgtaaggagggagatcattgtgagggatacaaatagatttcaccattttaagaatggaagttgctcttgtcaggatttttggtaaaaataatccaggttatacaataagtttgttatctttttactcttttagtgaactataattttttcagtacaaatttagtaacaaaggtcgagtggttacaacagccgaagtatgatatttataagttgtaaaaacagaagtgaacatttgacaaattgaagtctgatagattttttattttttaatggaaattatttttgctttcaactacgtaatatccataacaaccaagaacaataatattggctcacccgcaccatataatacatcatgtcggtatggttctcttatctcttccttctccaaacttgcgttatggaagaaggagaagaaggaagtatcaataacaatacgggacagctcttgacattcatatccatttattctcaccatccttgcgtgtgtgatgtctaccattctgttttactcgtaattattgttaaattagacctcacctggacacttattaaaacagctttacaagtagagaagaaataatacaaataaatggactcgatc

SEQ ID NO: 298274 - DNA, 2515 bp, Cannabis indica
tgtcaagagataacaacaaagttcgcattcttcaggtactcataaaatgctgtacaaataattttattgtctgcataattattttcatttgtaggatttctatacacaggctctacatgattatgctgttttaagttgacataataagaatttttgtccgacaaatttcttttgggatgcatttcttcactaatggttagattgagaaaaatggtttagcttttactgtagatgcttcaaagcactttgtattcatccagttaatataaaatcttcattgtatggaaatcatctacattttgaagttgctgattttactttatcgaaattgtacacaggaaggatgcaagggccttctttacatggtacttcatgctcgtgttgtcctggatttgtgtgaaagccatgaacaagagattagttttgaacaggttgaaggcgactttgactcctttcaagggaaatggcttcttgagcagctaggcagccatcacaccctgttaaagtatacagtggagtcaaaaatgcacaaggatacgtttctttcagaagctattatggaagaggttcctacacaatttttcttttctttctatatttcacatttgataactgttctttgtcaaattaagttgcatggcaagctgtatgtttcgagagaaataataggatctttgaggactgcaaggaacacttatagtcattatgggaaattatcaaagtattggatttattaaaaatgttaaatgtttatattatttttctgatgtttaattactatggaatgctttgccatgattatggggtcgtagttagtgtgggattgtttcatgctttctctttggtttgtaaagtttctgctttaactagtggtttgtttggaaattactcatttatttatgaccttgttatatgccaggttatatatgaagatcttccttcaaatttgtgtgcaatacgggactatgtagaaaagagggaggcagctcgttcttcagtgacacatgatcagggaacatgcttggaggaacaaattagttcatcaaatattgacagtgatgataacatgggtccaatagctgataaaatttcagattgcagttgtcagagttcatcaagacaaaggcctagggtccccggtttgcagagggatattgaaattcttaaagctgagcttttaaagttcatatctgaacatgggcaggaaggattcatgcccatgcgaaagcaactacgtttacatggaagggttgacattgaaaaggcaatcacacgcatgggtggctttagaaggatagcatcactgatggacctttctcttgcctataaaaatcgtaagccaaagggttactgggagaatcttgaaaatttgcaggaagaggtaaagatattaaacttcatatttatgtttttctacgttcaatcctacgggttttcagtaccatttcgacacttcctttagtttaagcacttgatgaagtgtaatgtccgtcgtttttcttcctataaaattataaatcagtatttagaagtatattatacaaggttaatctttggtattcctgttttttcttttttcttcttcataaatataatttctgatggtgttgctttacattatacagatagatcgatttcaaaggagttggggaatggacccgtcgttcatgcccagtagaaagacatttgagcgtgcaggtagggagagatatttttatttatattaatgttatcctcaaacagtcattttgttgattttacacacatctgaagccttcttctccttttcaaaattttgactggatactcttattggtatttttctttggctgaactcgtaatggtagtttttatttttgtacttccactttgttactaagagtatctctataaggaacttggttgaatgattgttgtatactaattaatgaaaatttatattgaacatgaatacaatacaggtcgctacgacattgctcgtgcgctagaaaaatgggggggtctccatgaagtttcgcgtctactgtcactgaaagtgaggcatccaaacaggcagacaaaccttgcaagagagaagaagagtgataatggagcaacagctcctgtggacgagaaaaacaaggcatcatctaatccttacatctctcaagacacacaaaagtggatctcaaaattaaagcacttggatattaattgggtggaataaaaaccctctaatttactacttatctgtgtatacttaaccatgtaatcagtgttcctatatttatttggtcaaataaactaaaaaaaataagtgaaaatagtaacaatatatattggactttttgatgtcctagaaaatgaaatataatttcactattctaccctaggtctatgaatcaattttcgctgctagtatttttgttttccttctcataaaatgggcaaagaagataaaaattaaagaagaagaagaagaaaggttgtataacttgtgatacggattttaagttttttatttgttttttttttt

SEQ ID NO: 298275 - DNA, 2523 bp, Cannabis indica
tttgtgtgtgtgtgtgtgttattgctgttcaaattgttgatttaatgcaggtgttagattgagttcttggtattattgttgctgaatttacaacaacaattatacaaccttttgactcccttgaatcctaatttaggttctattgcttcttaattcactctcttttttagattgttctgatgtgcaatgctggttttgcatcatcttagaagtactacagttcttaattcatttggtttaagtattgtgtggattagtatttggctattttgttctctattgtagaaagctatcttactgaatatagaccaacatacctctctggtcaacacctcaagtctgatcattctttcctctgctcccttcatttgagcaacctcctacttccagttacgcgttgtgatcaaaattctacttcttaaatctcccactttatagacacaactttatatgttcccacttttgataatttgttgtccaaaccatcatctaaaaacaaaacaaggagtacctgctaagcttataacatttattattatctactttcatgtttgaatcagaaaagtaaaagtttggaactttgacattttaccatagttaactagttttctttttctatcatatcaaaacttctcctaagattggagcaagaatagattttggttagatttacacgagtcacatggataaaatgagaacactaaacaatttcctttgatggctacacaaaatctgcctctgcagaagcaatattatccaacaaaatcatttgaagggtctcttgtagctgcaaatgaagccaataatttattaaataagtagctgcaagagggaacaaattaacaacatttaatccaatttattcctatcccaaaagagtgaaacattatattgtgttacaggagaaagatcaagctcaacaaactctttccaattgcagaattagtctaataactaaagatatatatacatatatatttctaattagtaattttacagaaaaattagtattttatttttattataaagattaacagaacatggttcatctcattgagatgctgcagaaataagtcttggattttctatgaaaagaacaagtgtctcaaacttgtgagcaacttaaccataatttatacatctaattcaccaaaagacagtaaaacatagaaatatgacaactgaaattgaaattactaaacttatagcaattcgacagttgaaattccataattttatcacagtagccaacaacttcaattagaaccaaatttaatcatttcacttctaaaatagccccaaattttaccaaaagatgagataatagaaataaggaaaatacatagtaacggcacggttaagtagtttatcccgtcgatgagtttgcggcacatccatatcaggtcaaagccaaagtcaggatcaccaaatgttctgcatatcaatggttcaccacatgagagaattcctacggatattaagctgcaacttgctaaccatcattctcacaacacaaaatcatggcatccaaattttctaccgaataaaattctttaactgaaaagtttttctatgtttgccttctcactccctatttattattttgtgagaactagatcagttcgagttggtatggtcaaaaggtggatactggcatcttaaagacaaccaacactggctgtatgtatgtttaattaattttatttaattggctaacaacattaccagcataaaataatagcaacatacaaagatagcaaatgctgaagatttggccagggaacatcaaagcacatagcacaggacttgaaggagcaaaatagcttttcaaaatctgcaagtgttgggaaacattgttgagcatcagaaattaggaatggttgtgggtactagagtggatatgtattttgagctccactgctggttcaaaatcaagaactaccagtttctcaccttcacttagaagagctaaatatataatgaatatctaaaccgatggggaaataaagaataaaaagttaatgtgggcaatgcagttccaagttcataataagaagattgatacagcgacgagaaagagtctttgacagagcatgaaaaaagaagacagagatagaaaatcagtctcaacagagttctgtgaatagcaatgcaaggtatctaaaatcccattaaagacaatcaatttttaattttcatgaaaaccaatatgctatatttacatcaattgagcatggtctatagataggactgaaaagtgcaaaacatgctaaacacaagttactgaaatgaacctcgaaaacttgctactagattttaattccccatattttccatgaacaagtagacaacattaactattgtatccgaaatgacttcaaggcacaattcatgaagaaatactattggtagctaattaatgatcactatgtgttggaaatttgttttgaccaacacacttaaaaaaagcaaaattaatactatgcaaattggtatttttcaaaatttattattttatgcgtc

SEQ ID NO: 298276 - DNA, 9051 bp, Cannabis indica
aaaaaaaaaaaataataataaaaacaaaaacaaatttcttcatctctcaaatacagctcctttgctggctcctttactttttgtcctaatttacatcttaaaattatattatacactcgattataataacaaatattatatcaaatataacatttatatttatattttgaatcatttattacaatagatctttaattaaagatagccttaatgcaggtaattactgttgttttaacttctatctatacaaaacattataataattaaattaaaaatatgaatcttaatgttatagccaaattagcagtttctatttattattagatttttattaatattgtaaaataaataaataaatatgtaaatctttgtagtcggtcaaccagtttgaaaagaatacagcttaggcgggagctgattattgaatatgaccctaaaaacgtccttattcaaaatttgtggggtccacacctctgaaaaaaacactccccacccttgactttttcattcaacacgtggatcatcaaagtccccacacttaatatttcccagctattaataataataaaaaacaatctcctattcttttttttgtcgagactttttcattaagttaaaaagaaaaagttaaatgttatgaatcttagaatacccaaaaatttaggttaacggttaattaaattagattatgaaccaaagtgatgaacaaggaagcagtttgagtagatattgaacttggacagaaacatgtactacatacaataataatacattaagttgagttactcctaaaatacgaggaggaccattaagtgtgctgtgggaagaggaaaacggaaggtggctactactgattcccacttctgccttttcacaatgacacgtatataaaatattgtttctttttctttcttttctttctcttacatatacaaattcttcttcttcttcttctttatttactttttcctttttgtatgtacaaatatgtacatatagatatttatatacatatataatattatttcttttctgattaaaaaaaaaagtgccctttttctcccactatcgatggttttcgttagaagcacatgaatgaatgaggtgagtaagactctgttttggactttattcttcatatttttttatgcatattgaaatgaccaattatggattttgagtcatgattattattatttggcaatgcatgtagggagaactgttttattagatgccaatggcaatagcctatgatatgagtagggggatcaatgttacattagatagaaaaaaaattatcttcacagaataatatataatctgtatgagtttgataggatttggtcaagttgtctctttaggcattccaaaagggaacgaacaacatctcataaacgcatgcacccttttggcgattcttgaaaacaatgtccagttttagattacagtaatgattttttctatttaatccttttcaagaataacagcatattttcaatgaaactaatgcttgttatgattggatatggatggatgcccttttattttctttaatgtcccaatcaagagtcgaataccaataactatttgagcgtggaagaagaaaaatataaaggtgatgcttacgctatatgtctatatctaagcgtctgttacaaggttattgtttttttttttgcttgagttgaaatggtcaatggttcactctaatactttgtttagtcgttttgttaacttgctttgtggaccttctcgtatcatattatattcttaagcttcagttgaaaagaaagttggagcatggattacattaagagaatacatcttcatattttgatgttttatgtctaaagtgtgggaccttacttgattgtgatccctcaaattagtactaaaaaattcattaatataataaaccccattaaagctcaaaaatgaaactttggttcattggttctatataatgaacaaagatttggaaaatataatttaaaagaagtggacttagctctctacttctgccatctgtgatttcaagtcaacacacccatttcaaactaaatattataatccttaagcaccagagttatggtattgatgagattattgcttacatcaattataagccattgaaaattaataataataataatagcaatagtccatgcgtctggctgttttatgattctaaagttcaattattttattattagtaacttcactttgtctagttgtgtgtgtatgtgacatgtaagagatccagattcatcaatacactgctgttggtgcttgtgttttcagttgtaaagtttgactaaaattctttcataacagcttatataaggctaacttcctcaacatcctgttctgcattcaataactctctctactgctccattaaggtatttgattatatgactctgtaagctttaaataacattgtacactttttccattgagtttacttcacactgttttttattttatttttttcaactgtttgactatatggtgttatttcattagttacagtaaattaggacttcatttacatagttaaagactttttttgctgaacacatagttaaagacttaagtgtcacaagacgactataaagccacttgctcaagtggttggtctattattaacccttctgaacttggagccaaaagggtagttgtctatgcataattagatgtaaacgaagtattatttctatgctaattgtccctccatttatatttctgcatatcagtgttctgaattcaaagtaaaatatatactgagatggcttcaacagttcattcaactgctgaaaataaagaagagatggacacgataaggagcaccccgagtgaccgatatattcccagagtttcagttccttccaagcaaaacctcttcaaggagttcaaaaacactgtcaaagagacattctttgctgatgaccctttacgttcatttaaggatcagtccaagtctaaaaagctcatccttggagtgcaggccgttttccccatctttgaatggtctagagattatagtcttaaaaaatttaggggagatcttattgctggactcactattgcaagtctctgcattcctcaggtacatcattatcagctacttctctgcttctcttgagaggtttatacttaaaagattctgtcattcacaatgttgaccaattccattgacttggaaaacaggatattgggtactcaaaacttgcaaatttggctccacaatatggattgtgtatgttatctttctacttatctatggttattttcggtttgattgtttcattgagttttgtgcttagtcttcttcttttccccgttttaatctctgcagactccagctttgttccaccactgatctatgcttttatgggaagctcaagagatatagccataggaccagtggctgttgtatctctcttacttggtacactgcttcagaatcaagttgatcatactacacatccggttgaatatctgagacttgcatttacagctacttttttgctgggataacccaagcaactcttgggattttgaggtaattctcgactaagtgtttaggcctggtatggctactatcttcagctaattctctgataaaatatgcattgatttcatgtcttcttttttcatctgatattagattgggtttcttgatttgatttcctatcactatgctgctattgttggttttatgggtggagctgccatcacaattgccctccaacagcttagggttcttggcataaaaaagtcacaaaggaaactgatatcatctcagtgatgcattcagtagttgactcagctcaccatgggggaaaacctctccttacattccctaaactatgcagtttcaataacaaatcattctatagctttctagttactgatttatatgtaccaaattcgcagtggaattggcagactatagtcataggaggggtgtttttaacctttcttctagtttctaaattcatcgtaagaatcacaatatcacttccatgatttacttcaagcgatataagctctcaatgttttcttattttttttctaactcactcttgtgttgggaacagggaaagaaaaacaaaaaactcttctgggtgcctgcaatagctccattgatatcagttgttttgtccactttttttgtttacataacccatgcagaaaagcaaggagttgaaatagtaagcatttgacatgatttctctccctccttattgctaattatttaaccaatagattgaataatatagagaatggttttttagtacttgttgccgttgactttttatgacgtgtttgacttattatatgaaggtgagacatatagagaaaggaatcagtccttcatccttgaatcaaatatacttcactggggaatatctcgtcaaaggctttaagattggtgttgtggccggtgttatagcattaacggtgagctgatatacctatttttgaagaattcgttttggactttgtagcaacatgaatctaaccattgaaagtgaattttgttttggggttgtctttatattaggaagctatagcaattggaagaacatttgcttccatgaaggattatcaacttgatggaaacaaagaaatggtggcacttggaaccatgaacgttattggctcaatgacttcctgctatgtgacaacaggtgaaaattatttatataaatgaccaatttcaaacaataatagctgattttgaactggggattagctgctcatcacaagcaaatttctaaaattcacacttgatcctcacttatttaagtaataaacttgttttgattaacattcttaactttataataatacgtcagtaaacaatatagaaaggggatcaaactaatatgatataaacgcaagggagtcaatcattcatttcattttccaatgcttttattatgtttgaaattcttgtcatcatagatttgtaaacactattctaacttaggtgagtaattaactggttgtattgtatcttcttgctcattgcttgtaggttcattctctcggtcggcagtcaattacatggctggatgtcatacagcagtctctaacattgtgatgtcctctgttgtattcctaacattgatgttcatcacaccccttttcaagtacactccaaacgccatccttagccgccatcattatatctgctgtgctcaatctaatcgattttcaggctgcaatcctaatatggaagattgatagtttgattttgtggcttgcatgggagccttctttggtgttgtattcaaatctgtcgagattggtctcttaatcgcggtactaattcccaacataagcttacaactatcttatattcctagagtagaccaagaaagaatattgtgtcaagtgatctgttgttaatcgttgttgttgttgtggtaggtcgtcatatcctttgctaaaattctgttacaagttactagaccaaggactgcaactcttggaaagatccctagaacaactgtgtacagaaacatccaacaatatccagaagcaactaaggttccaggcgctttgattgtcagagttgattcagcaatttacttttccaactctaattacgttagagaaaggtatatagctagagccttttctgccttactgttattccttcatatttatcctacaagtaaatctatctaactatataatatgtatgtagaatattgagatggctgaacgatgaggaagaacttgttaaagcagctgatctaccagctattcacttcttgatagtcgaaatgtcacgtaagtgaattttgtacctagttttgatcaactacctatgacattttatttcttatgttttggttttgttgtttaattgttgcagctgttactgacattgacaccagtggtatccatgccttggaagaattgtataggagtctccaaaagagagacattcaagtaaataaaccaataattgtccctaagtcttatataattctacttttagttcctcttacctataatagcaaaccataattattactaacatttcatacaatacaataattgtacttaattggtttgagtatatactgacctctgttattgctaaacagcttgttcttgcaaatcctggtcctgtggtgattgacaaacttcatgcatctaagtttacgactttgatcggtgaggaccgaatcttcctaactgttgcggatgcagtggcagcttgttctccaaaattgctggaagaagtttaagtaacaacaaacacattacaaatgaacgtaatattgttgatggcaatatcataaaaatcagctgagtcttgaacatgctgataagttgaattctgaagaaattactagtataactctggatatatatggcagaagagaagagccattatgaaagtggttaatggagggtcatatgccttaattccaatagaaagaaaaataataacgtatatagatgtgtacaatttgtacactacaagaaagcatgcaagaatttaatgtaataacttgcaaaagtctataagtctgcgtagaattgaactgttaaagttatctaaagctcactccatactttgagattatgttaccctatatatcatgacctcgaggcttttctcagatcttttgttttcacccactatatatataatataatatacatttgaatgtaattaagatttaaatgagctttgatgcaaatgatcattgcataacaccatactctaatgttgtgagtagttaacagtttcgattgatcctattaatcatataataaccatggtatagcacctaattaagcttgaagtaacatgaaatgatatttcatatcaagtacgaagtttgattatattcatattttaaaaaaataatcattaaaagaaggtttcttattaaatttgtggaaaacattttcttccggccagtttttttctactatatattttcctcctaaaaatttcctagtctaatatcttaacaagatcttagtatttaactatttgtacgtaaactataataataaataaagagaaaagttgatggaagatttgttcaatcttatccatatgacctcatttatttatttattttttctgaaagaacgatcatgttcgtagaattacaccagaattttgctagaaattctagctctcttagttataatccatcagtgaaagtgaaaccattagttaatgttgatcatggagatgtaaaatgtgtcaactagttaattttacacacaattatcaagtatttaattttacctatacatatttttaattaaatgatgatgtctatgcaaaatcaaattatatatatagttaagatcattagttggacttgaactgacacatcaaaattatacttttaattttgttaattcatgaaacaaaattattaaaatgttttaaaataacgctgttagagataaaataattctcctctatttgattactggaaacaattgcagagaaaccaataaggagggaacctttaatctcagttatcttctaattagatattagggaatgtaatcaaaccaagtatttacgtacaaattagcatgcccatgcctacgtactataataataagaagcattttaaaaccaaatgaaaaaatcgctaagctacattgagatcacactcccccttctcatgtttttcacacaaatattttatcagaaaagtagaaaattagttggttgaaacaaataatacaaattaactaaaggattttctatctttctttccttctttgatctgatagtggaaaaatacttcttatatataattcacattttgagtaattaaaaaccgaacataattattaatttctcacgaccatatacaaaaataccaccatatatataatatatatctagaattatattactagaagaatgaaaaacaattgtaaagattaatcaagcttaccagctgttcctttatttgattctcaaactagctagcataagcttcagaaacccacttggttaatttaatttgaagagatttttctggagaagaacatgtacaaactgagaacttctttaaggaaaagaaagagtagtagtagctagagaaataagtcttccacttattaagacatggggttgaattgatttttgtgggctctctttttgagacggaaaaaagataaaatgtaaatgtgctgaagtggaatcctaatcagaaaccattacagcttaaggtgaacaagtacgaacagtcaaaaaaaaaaaaatgtaataaggttttggtccaatgctgtatgctgctaccttaaaaagggttcggttttcaggtggaaaaatacgagtctggataagcactgaaatgagtgcaaaatatgtttatataatgcactttgttatatatatatataaagtcattatatatgtatatagattccagacttataaaaattatgaactagcctttgctacatatgttggctgtagcccttaatttcaaatgatgacagaagcaaaccatgtctatatgtacgaatgtagttacaaaacgaagccagattcatttaaaaactccatatatatttttagagcataagataccacattctttactatatactttattggatacatgattcactttttggcgtttgctataaagaaatgatacttgctcttatctcataccactaacttggatatttgtctcctcgggccctaaaagaatgatacaaagagaaaagctaagggcaagttaatgtgctaaatacacaagaggtgacatattgtcgggttctacatattttgattaaataaataatataaaaaattactaacggctagtatggtattgagcaccataaaatatttcatagcaatgctccacaattacctttcataataccatactgcttagtaaagaaaaaaaatatattttttttattatttttaatatatatctattctatataaagtgtgtctatataactgaattcttagtttatgagaaatttatgggtgactttttatttatatttaataaaata

SEQ ID NO: 298277 - DNA, 3165 bp, Cannabis indica
aaaaaaaaaaaaaaaaacagaatgctgacataagttaatttgttagcgtgtgtgatagtttaatttttatttaattaaattggaatatagtttaacatgagttctgtcaaattacaaggcttaattaccttgacatatttaaatatatatggtgcgtcccatgtaaaatatatattatattatgttgtgttcctaagtcttgtttttcatcgacttagcaatgataaactgatgtttcaatgtgttttttttgttttagtacccatgaacgagttctaattcgaatattcttgagtatgttgttttccaaaatgtgtaagatatgtttatgttaatacatatttttggagaaggattttcagttagtttgttttttccttcatttttatttatcgaagattttcatttaatgttatgatacttactattttattttttctattactgatttatgtacactttctgtccgggccgggctacactcatcagatattaaaacagaaaaaggaaaaaaaattacatactaaattactgaaacattaatgtatataccttcatccataccagaactataaataaagttatgggaatgaaacatatataaatatatatatatatatatatatgtttggtaaaaagatggtgtgtatagataaaagtagaatagtatatataatgtaattattatacttacaagaagactaaaaccagtgacgttggtaagagagatggcaatggcaacactggcgatggagaggtgaccaagatgtcccaccatgatcaaggaagacacttgaagcaagtactgcagcaccgccacgcccaccatcggccctgctataattccttctctcttcatttccctcaccagtgatcgccatgatatctcccatttattcttctcctctttcaaattctcctccattactagtactatactatttttactactttttctatatatcataaaaacttctgtttatgaaggtaagtaatatgtatatatatgttacttattatatcgccacagctagccatggtactaaatatatgtattattatagtttatataatatttcttgtccatcgatttttggtattgaattgaagtttgacatttaatgagaaaactcataacagacaaataatatatccaacaaaatcgatttgattaggagctcgactaacaaggaccggccttattttattttatatatgtattaatttgatttaagtataattaatgagattttgaagcagttgatgtcagttttggcactaggggagatcttgttccacagaatcatttttcaatgatatattagggtgttaacgtgcgcgcaagttttctaatattgaaaactattcactcacaatttttgagttttcgtgtaagttgatattatttaatgaaatgggatgttaaaaaaaaaaaaataactatattcactcacaatagacatattttgtacataaataaggttacaactagagcatcgggtttgtattctgggttttgtgtttctcgggttcgggttttgagagtggaaaaatgcctatcgaatccactcatttttggtattgaattgtgactaagtatgtagggccccacctccttgatacagtctagtagttgcttgttagttagcacaattagttagcttgtattttgtgttatttttctgtacaactgtacttaactaatattcttggttttcttctatgtaatcctctctataaataactttctctcttaagtcttgtaacttttacaagcttgtgagattttttgtattcattgatccggttaattatagcttgtatagataaattcttttatggtatcagaaagccattcacgaaaatcatgtatggatcctacccttattgaaaatctacctcgcacctctgcccaaactgatcaagggccaccacaacaatcatggaacccattccaaaacttaataataaattcctctcatactgtcaaacttgacagatccaacttcttggcatggaaatctcaagttattctgaccatgattggccatggcttggatgacataatactcactggaattcctccactagctcatcttgtcaatggcaatgtcaatcctgaatccgtggcttggaaacgaaaagatcaactcttactcagctggcttcgttcttcaatgagtgaaactattatgggttctttggctcaatacacaacacatcatccacaggatggaaagctttggagcaacgattttcatctcaatcaaaggcatgaatattgcagatcaagtctcagctcacaactattcagcaatgcaacctttccatttctaattacgataacaaagtgaaggttcttgcagattccttatctacatttggccatcccatggaggaaagtgacttgatcatgcaacttctcaacaaattgggaccagaatatgatcatgttacggttcacaagacaagtcttgttgataatttcttgtttgagtccatacagtctctgcttttgactcacgaaagtcgctttgaaaggcattatacagtcagtgatcctttggtcaaaatgactgcaaatcttttcacaagttcctcgatattttgttctagtttgtcttcttcaagaacctttgactacaatgaccacagttgcggatgtagtcaacctagtcgatccttaggaaggttctttggacgaggaatagctccattagggctcttgtgtaaattgtgttacaaaactggccacacaactacaatgtgccattactagttcaacaagtcatttgtcaccccccaaagtttgtgaattttatgcctacctaacagagattgatgaagaagacccatccacctacagttttcccatgattcaagattttgctcattatcttgagtggtatgctaatataggagctaacaaacatgtggctataggaatggaacatcttgacttcgaaataccttatcatggcaatgagtctcttgttgttggtgatggtaagaaactccacatcactcatattggtaatcactctttaccttccacttccaatccaattcaattaaattttgttattaaagttcccaaaatcacaaaaaatttggtcaggtgtcagaactcacaaaagataatcatgtttttgttgggttttatgc

SEQ ID NO: 298278 - DNA, 3500 bp, Cannabis indica
cctatggcgtcggttaatacctaataaccgacgccataaggttatatatcagaccctttctgcttcgtcttcctcacttcctcatttcacaccttgctgaacacgaagaacagccacccacagcagccccaaacccacgaaaaaaccctcgccaaccaccacctttctgtagcaagtcccttggtagtcagatcaaactttaaatctccccaaccttaaaaaataatcaagtatggttaaatttgtatctccgttaatgaacggtttaccttttaagagatggccatcatgagattccatgctatcttcaaattctctttactgtagtgacataaaatttaatactttttgcacctcatccttcagacagtcgaaaaaatattgttaaagaacacttaaacacacatctttctcaggtgatttttgtattttcactgcatgccttcttattctccttgattgttcatgaacattatttacttcatgtgcctcatttgttctcacaaaaaaaatcaagagaagttcatcgactgaatacaagtcaccatttgaatgtaccatgtttgaactgtcccttgacaaacaaatgaagtttggaactaatccctcctgaaaagtattattagagataatttaatcttctacatcttaaattgttctcaaacacttacaaattctttgcataatactagaaaggtcatttcacaaaggttgttgttcaaaaatctccttgtcttttcctctgatagatcaatctctatcaatggagagcctgaattctgagagccatggtgagcttcaaattttgagctacacttgatgtaactcgatgttatgccttctattgcatgataagaatcaacggaaatattttcaaaaaaaaaaagttccactagcaagctggtttttatccagcttctgttggaatttttgaatcttgaatagaatcagttggagcgatgacactgggtttcctcatcattttataagaaattcagttgacttcatctatacaacactcaccttctccaattttacagtgaatgtaggatctaagttctgcacaaatgcatttttttgtgagttgtattcttggcttattaagcttgccacctcaagtccctaggtagtcaaatcaaactttaaaccaccctaaacacttgaaaagaataaagtacgatttgtatcttccataataaatagtttacatttaacaagatggctatcttaagatcaaattttttttctaaaaattgtatttagaatagccaggaaaacttcgatacgtattttagcatccttcagacttccaaaaaatatcgctggggaatactcaaactcacaattttctctattgtaccagacttttttttgtgtttgccttcttgttaccattggttattcatggatattatattcttcacatgccttatttttttccctcaaacagcttaaaggaaactttattagattatacaatgacgggactctcatctggggaagatatgaagttttggactgattcttttaaaaatatcatgagaggcaattccaccttctacattttaaattgttctcaaattgttgtagattatttgcatagtatcaaaaatgttgtttggcaaatgttgatgttcaagaagctcttggacttctccatccctttttgtatccatctcatcacccaataccttagaatttaaatttaaagagacatggtgggcattagaattctaaaattttgaactgcgcttgttgtaacttgatattaagtcttctgttgcatgatataaatcaatgaaaatcttttcataaaaagccccagtactagctggttttgatccaactaatattgcaatattggagtctttagtaaaagtagttgtagtgatgatattgggcttctacatcttctaacaatttgaattgactccatccgtacaacactcacctccaccaatttgaaagtgattgtaggatcgaagttctacatagatgtttttttcttttgtgattcatattctttgattattgagcttgctgccacaagttccttggtagtcggatcaaacttcaaacctctacaaccttttgaacataatgaagtatggttttgatcttcctcaatgaacgacttacctcttacgagatgaccattatgagattccatgttgtcttgaacttctttcaactgtagtagggaaaactctaatactctttgtagcatccttcagaatgccaaaaaagtattattgaagaatacttaaacacacatctttctatgatgtatttcactttttatgagtctaccttcttgaactcttggatgttcatggacattacttgcttcatgtgcctcatttcctctctcctacaacttagagggaagtttatttgttgcattcaagtcataattttattgtactatgtctaaactctaccctggtaaagacatgaagtttggaactaatccctcctaaaaagtaacatgtcagaaaattccaacttctacatctaaaactattctcaaactcttgcatattatttgcatagtaccaaagatgtgatataataaatgttgatgttcaagaagctccccgacttttccatcctcttttgcatctaactcatcacccataacatgagaattttgaagttcagagaaacgcatggcgggcatccaaattttcaaattttgaaattcacttgctatgactcaatatgaatcctttttttttttgcatgatataaatcaatggaaatattttcagaaaaagtttcactagctggttttgatccagcttctattatattcttgaagtcttaagtagaaatagttgaagtgataatattgggcttctacatcttcttataacatttgaactgaagccatctttacaacactcacctcaccaatttgaaagtgaatataggatttgagttctatagagattcattttccttttgtaactcatattcttaaattatttagcttgctgtcataagtccctagtagtcgaattaaacttcaaacctctccaaccttttgagcaaaaacaagtatggtttgtatcttccttaatgagcaatttacctcttacgagatgatcgtcacgagattccatattgtcttcaaattctttcaactgtagtggggaaaactctaatattttttgcaacatccttcaaactgtcagaaaaatattattgaagaacacttaaacacacatattctattatgatttcactttttatgtgtcttccatcttgttccccttggttgttcatggattatctatttgatcacgtgcttcgtatcttctttcaaacaaattaaagagaagtttattagttgctgttgcgaaaattattaaatactacgcaagtgcacgcaatcaagtagtatactcacgcaagtgaggtcgaaccacagggaattggattaattactactaaactatacttataattctatttggcaaatcaaaagtatttatgat

SEQ ID NO: 298279 - DNA, 5550 bp, Cannabis indica
aaaaaaattgtgctttatgtaatcatttcttaaatataatgatagagcaagaagaaaaagaaggttgtcaacttgtcatgatgcaaaatttgaatttgaacatcttaacttaaatatgtgctttaaatattgatctaaacatatattccagatcccagaaaatcaaaaactgaaggagctcttcagcttgataatgaacagcattacaggtcaaaagcttgactaaagagcagtttaacgatgaaccccataaataaaaaagttcatcatcatcatcaaacaagtcactcttgtctcactaccaacagaaagatgctttagattatatcttttttataacaaatgaaacagcaaagctttctgaaaaatcataaactaaattaacttgacttagcagtagtgatataataagcattataagacctcgtaagaggctaataataatagtcccatatgttgttatgttacctaccaatggcggcttgctgaataagagtttccttgatcacttccaacatcattgccttcaatgtcgtcgctcccatctaaacaaccggaagaagcattgttcacacttggttcagagctcgcgttgctgcttgtagcatgaggagattctgaattgcttattgtcctgctttttgttggtcctgatcggatactgtacatggatgaagctggaatagccgtcacgagtggtcgtagactaccaccttgcatacttcgccttatatcctgagtaagaaatttcacaaccaaattataaatgaagctctttacataagttgtagtttgcaatgaaccatgcatagggtcttatatgatttaccctttaaaccagggtctgtgcctaggactcacccagccacgggctcaaaagaaaaaattcattttaaaaatacatattcgtttaataagaacccaaaaattctatttttcccaaggcctaacaaaactcggggccggcctgctataaattatgctgcaatggaaaaaagcaggatttcaacaaggacaaaaacaaagatgtgcataccatgtgtcttagagccatatccaaggatttctttgaaagtgatcttccaaagcctaagctgtcagcagactgagacttcccagaagaataactatgggaagaatgatcgttatctcgctttgggggtgccagtttcctcatgtttacaactctttcaaccatttgtgtgccaataacaacaggactaacttcatcattgtcaccacagcttgatttgctcatatgtttattgaagttcttattactagtagcgacagtactatgtgaagaccgtcccctagatggagaacatgattgctgtctaccattagcacccgacacagtagaaatcgatttaacaacaggtactactggccgtaccctagaagcagaggctggtctttctggcaacgttgtctttaaattatggggagcattaacagaggaaccaggcatctcagagggtttccaaggccttgattttactgtaggtgaagggccacgtgaagtcgctgaactttttgagattgtgggacgtaacttggatgctgaagaagctcgacctgttggagcagatacaccaggtgcatttagtgaggttgatggctgacgtgttggtgttgctgaccgtgctgtcgacttggaagctggcaacgcaggtctggcagttggtgttgaagcccgagcagtggacctagatggagttgaagcccgagagaagggcctagttggagttgaagaccgagcagaggacatagttggagttgaagacctagcttgaggagccacattcttagatgaaggaaatgaggcccgtgaacttggtgtagatgatctcgacggtttggttgttaatggtaatgtaggccgtgcagttggagttgcagatctccgagtcactgttttcggtccctcagatgaagatggccttctgtttccaatagaggaagaatttttttcagatggcaagtttggatttttagatgatatatttctccttgaagcaggctccacttgaatatttgctggctgcaccccacatcatagaaataaatactaccaaatcagaatattttagcttttaagtacaaaaacaattagttttaaaacaattaaagtacattaacagccagggacaacaatgtagacaaaattccaatgatactaaagactatatacaagcttgtaactcaaatgaactagaaactctcaccctcgaccgcaaggcagtgggacgagacgaaggattctcaacctgacttgttgcacttctttgtgatcccaaatccaaagaaggcaaaagtggggtaccaggtggtgtaagaagcctgaatatagagattcattgtaaatacaaagccataaaataaacaaatatattggcaaaatcatattattttgtactgaatctcttaactcattggttaactttgagttgatagagtttaagtggtattgaatgcatagacttgtgattaattactaactttactacagtagaaagacataaaaagatagggacagtttacgtccccatttgattaaccatgactatagataaagaaataacagctcacctaatatgaaagaaagtacaaaggtaataatcatttaacaggagccaataattcaaatgatttcttagtgtgtcactatgttcttttttaggattgtctaaaagtgtatgaaaagaaacaaaattttaaaagaagacattatgctttatgcagatattcatgaaagtttcatccaattattcatgagaggagtttcaaaattttcaaaaaaagtagtcaaaatgaaaataacaaaacttgtagagatccatttggttctcaagaataagagaaaagggaagaaaaatactttaagccattaccactaactttcctttttctcttgtctaaaagtagaattttcatgactagtgatggaacaagattctttatctaagttgtacaaagttaaagcaaaatagtccctttttcagtttcacagtgttctagaattagcaatcaagtaattgattaattacccactaatcaattttcaaaatctatgatccccgccttggctcttggctaaaattaacactgaacccatgtttaccgatcaacagtttcttgaccaaatttactacattttgactgaaacagatcacttgaatcattctattgattcagattagagcaacaacccagaaaaataaatagataaataaatcaaaatattaccaatcgtaatcggatttatcattttctgagtttaaaaattcctcaactcggctctttcgctgcggtggcatagacgagacactctttgaaattggcgatttcggactgttattcgattctgcagaatatcatacacaatcacattcaatgccaaaaacaaagaacaaacataatatatatatatatgtatatgaggaaaaaacgacaccgtaccaagaagaagatcatcgagctcatcagagttactattatcatttggaagctgaagaagaagaccattatttgcttcgttctctttctccaatcttctcatctcgaagaataacgcaagctcttcatctttctcactcatcaccttccccattttttctctccttctctctctctctctcaaaataacaaaagacacttccttcactgttcaaacctctcaaaacacgaaaatggaaacaatcccagatctgaaactgagaaaactataatgcccaaaaaggaatagagtgaaaataatgtaaaaaaaagctagctattattaatgatagaaaaagagaagtgagattttaatgttacgaaagagaaaaagaaccctttttttttcaaacgaaaacaacaaatctaattaacgctctttaccaccttcttttagctccaatgatgactatctttttcaaaaatggcgttcaaacaaattttataccaagaagagttgcagagagagaagaagaagaggaaataaaaatggtatttttgtaatttttatttaattttcgtctaatgtttttagaagactcgaagagcggaatacttcatttaattactcttttattttaataataataataataaaaaataggaaactgaaaaagacccagatagaaaggatttgaaagaacgtgacttgaaattccgaaaatacccttacgtacatttatggtccaagtgtgacgtggcgtattcattattctcttctatacacattattattattattgtatgtattgagaattgtatgtcaaaccaagccacgttaccagaaaatataaatatcaaaggttatggtttcaaattttcttttatattataataaacaattcttctttcaaaataccaataataataataataataataataaataattttctttacaaaataaaaaggacattgatgattcaccaaccacatggttatgactttctcaagcaattaaaatgtctgaaaaatcatcatctaatttattactcactgctagggttatttaaatggtttttaacattgttgttcttccaattcatggtgaattgatcaagtagttttgagtttttgtttttagccaattttttaagttaataaatttctaattgtgtaacatcaaatcgttgcatcaactagtggggtggataaacaataaacttaattaacatattaataaatttaaattacttttttaaaatttttgtaatataactatctaattaaatattctaatacacaactaaatatagttataaaatttcaaataattctatttttttttttgctagatattaattaaattattttgattaccaagtgcttggcctttaccattactgagtggtgctacaatgcacatagagatacagtgtgctcggcctagaaaagctctctcttttgcagtgtggcgtaagctcttactgtcgaaaaattgttgtgctccaataaaaatactaaatcaacaagattacaactctatgacaaataatacaaaggacaaaatatgtataaataatgttacaacactaaacaaaatatacacataaaatagaaaacagagatgaagagagggattataactcaaagccataagctacacataaacacaatatataaataacatacatatataagagatgtgagagcaatctcaacaccacatacaccacaagtgtataataggagaatcacaaaacttgaacaaggtcttacacctttgtccaaaagcttattttcccctaccacaagcacttagggaaaagaaaagaatggaaatagctttttggatttatcaagcctatagtgtttctagcaatgtgctctcttgatagaaacttgttctcccaaagtaaactcaagacctctatttatagtgttttgaggatcacatttgaaaatcaaattctttcatcacatggctgttaccaacacattaatttgtgtttaatggaataaaaacattggacaagagagctggaaacaagctcaaatagtctatatacgtttatgaacgttttcaaaaatctggttccagatgttcgaaaa

SEQ ID NO: 298280 - DNA, 2328 bp, Cannabis indica
taattatttacggtattaaaatcaataaaaattttaattatatactaaactaagaaattgattccatatctaatgtgactataaacacatatatttacggtgacacattatcacataatactgaaatagaatttatgtcatatttttaaaattggaaacaatttgttcccataaatttcacgcgagtggttaccattcaggtttattgttaacactgcacaatgattctgacaaaaaaatgtcattgtcaacattgcaaaagtttcaacaaaatccaatgttaagcaaagattaactattgcaattgaaaaaaaaaaaaactactatcacactacaacatacactcagaaaatacttatgatattaatcaacatagatttcaaagatcaccgtagattcttacagcaatacataagaactcaatttggcaacctaaagttgcccctgaaaggtgggagtgtacattgacttcgatagagcatctcgggtgacgattgcgaggaggggatatctaaagtttctggtggatctccgaatagatcagcaaattgttgcaggtttctatttgaatatttctcgggataaaaaagagtgggttcaattcaaataccataaactcccggctttgtgcttcaactgtgggtttcttgctcattcttttaccaaatgccataaaccaaaggagtttgcattcccgccggtagggaaagcggttccgatgtacggcgcttggcttaaagtcggggtgcccatacgaaattgctttgatccaagtatcccgcgcctaaccttgagaagaccggtaaacaacggagagtctggggaattgccggtgcaggcgaagggcaaaaatgtaatttctgtgggtgataatgacgttcccaaaggccctgctttggcaggcgacaatagagccgttggggagggggtcagtcggcagcaaggactttcaccaagggggaattctcagagaactcagaaggcaatagaaattcgatgttctgataatactcctattatggcaaaaggaatagctcgcgtggaacccaaagtgactactagggcttttcctcatcctatggcccatatatgcaacaaaaagaaagacgtgggcatttatcgaagcttgatgcctgacattgggcctactagagaccagatggttgacctaccacatgtagaagtgtgcaaatcaagaacgccccatcatttccctgaacccacagtagtaaattggcccaataactcaagcttatctgagatggtccaaggtctgctggacccggcccaggatggagaagagatggcccagagaagtatcacttgtaataatattgaactggaaagtagtgggccagtgatttcgggctcaaaaaagagaaaagctagcttgtgtgttattcccgtagcccaggacccaagtgttaacggtcctccagctttgcccggtaaggacataatactccctcctctggaagtaaatgttatcaaggtggggaatgcaggctatgtgcacggagaggcttcgtcgtctaaaacgaggacggaaaagagaaggaagggaagttatgccaagagaccaactaggctttcgatgtcaggtaaatctcttccccgactctcttttgaagattcagaagcaactaacattgaagggaagctacgggattcagaggaaggtaacttggtggaaattactgtacaagaagttcaaaattttcatttgggcgaggaggcggcccttatcaagcccccccctccccaatgaagtttctttcgtggaattgtcggggtgctttacgggccccggcaatccaagctatccaagcttggaagcgaaggcacaaacctgactgtgtctttttgatggaaactaaaaccaatgaggaagggatgaatcaagtggtgagagctattggatttcaggagtcagtctctctaccggctgagggtttggcgggcggacatctgcttacttggagtactgacattagactgaatgtggtaagagctactaatggggttttcgaagctttggtgtgggacccgggctcatgtgaatattggatgcttgtggctatatatggccgcccgtataaaaatgaaaagaatgagttttgggaagatattaaatgtgaattgctcaaatattcagtcccttggatgatcatgggcgatttgaaccttattgtctctcaggatgagaaacgagggggtagtaaggttacggatagcgatacgaagatactaagagagtttctccattgcacggggagtgttgacctgggctacgtggggtgccccttcacttggcagaataatagattc

SEQ ID NO: 298281 - DNA, 904 bp, Cannabis indica
cttcttttattctttttatttttctttttcttttttttttttttctttttaagagagaatatttatatatgtggattttactttcattataattcagtcacaaaatattattcttttactttcatcagttgaacttgttttgactctccctttttgtgtggggttttgaaatgggaaatgtttgggataagggacttgtgaacgaaccaccacagaaaaaaacagggataggcatgtgatatttttaacatgaaaagccaaagtgacatcaatgtaaatattcttattttgatgtcaactgaatatgaatcccaaggaaatcttaatggaaagggacttgaaaagccaagggacatgtagataaaacttgaagtgatgtgcctccaaactagaggtttttcagggctggtttccaactcacaatgcattgtctacctttatatactaaatttgttcgggccgtacaatagtattgctatatcattacgaataaatttattttcagttttcatgtttttaacaatactatacaaagctttgtaaatttgaatggtttagtttcaagcatagagatactaactttatcgtttattgtttagctaaagattgttttagatgttagaacatctttttgatagaatgggggtttgccctttattgcttgtcatctcgctgagcttcacatacccgctattttatgcgccatgcataatgaactttccttccaaaaaaagaaaacataatttcatacgaagatttaaaaattttatttgaccaaaattttgattataattattaaggtaagaactcatttgttaccatgtgtggggtaaaagatcattgttaaaactgttggaatttattttaccaggatcttaaatctactcacaaatatgttgtttaa

SEQ ID NO: 298282 - DNA, 3296 bp, Cannabis indica
aagtgtctttctttgatattaaattttgaaattgaagtgagcacttctcttcagaagattaggattaaattcatctggttgtttgattctccatagtgttctacattggcattcatgatttagaaattgtgtgtatattattaccatttgaattgaaatgttataataatatgaatatgtgttaataatgaatcatactatattttttgttctaatctggatggaaagaagcttctgattttggttcaataaacaaatttctgtttctttcatgtgaatcaatcccatttgtatggtgtttgttcttatatatcagtactgtgttgataaactgtttgatgacattgagaaacttctttccaaataaaatctaatttatggtttttctaggcaatttgaattgtaattgttagctactcatagtgacaaataacttacctgaacaatgttgtgttgttgattaaagagataattttgtagttgagaagcaaaataggcaatgcttcattagtaacatgtttagagaagtaatggaccaaaatgatttgaatagctaccatctactaacttgtttagagaagttttatgaacaattatggtttatttatttgcttctctttagcattgttgttagtatttgacatgtttctgttaaaataatagacacaagaaattctattagacatgcatttcttatatagctaagaagatatgaatataatatgaagaacacgttgtagttatacagttgatttgggaatggttgcttagattctgctattttttttccttttatacagttgatttgtctatttctaataacaaaagatatcattttaatttattacttcttcttcaactgatttgtatgtgtatatgtatatactcatttacaattcatatgctattttcttttcttttctttgcagatcatcatcagataacataaccttctttctgagtattgagtatataattgatttctctcttgattatgagttcagttatagaatattcataatttgtgattaactcaactagagattgttcataattggtgtttggatcataactccaataatgggttctctaccagcaacagttccggagttccatttcccggactcttcttccaaacaaactccaatccataaccaatcctccattgatgaaactacactcctcaaccttttcaaatctcaacaagattacctcaatttcttcttcaacaatctcgacattttccaaacgctaactttcaccagaaccctcctagattcctctggcaccgtcttcttctctggcgtaggcaagtctggctttgtcgcccgaaagatttcccagactcttgtctcgcttggcgttccctctggatttctttctcctgttgatgcactccatggtgatattggcattatcaccaagagagatgttttggttctctttagtaagtctgggaacactgacgagcttctaagacttgttccttgtgccaaggccaaaggggcttatttgatctcggtgacatctgtggaggacaatgcccttgctagggtttgtaatatgaatgtgcatttgcctcttgagagggaactctgccctttcaatttggcccctgtgacgtcgactgcaattcagatgatttttggggacacggtggcaatcgcgctcatgggtgctaggaatttgacaagggaggagtacgcctgtaatcatcccgctggtcggattggaaaaagcctcatcttcaaggtgcaatgctcttctatcaatctttctcttcattcattcctttccttttgtgaatttgaatttgatatgtgtataaatattgaactgtgatgttgggtgtttactcaatttctctgctaatcattgtttgagtgatgattttgtgttagtgtgttgtgtttgaaactatttattgaaagcttgatcataacaatggagtcaaattttatgtaaatgggtggcaggtgacagatgtaatgaagaaacaagatgagttacctgtttgtaaagagacagatcttataatggatcaactagttgctaacaagtaaagggtgtggatgtctacttgttatagaccaagattatcatttgattggtacttttacagatggtgatcttcgtcgtactctcaaggctagtggcgaagccatcttcaagctcactgttggagaaatgtgtaataggtaatgaaagaaaactgaaaaatgatacatgttataccgaaaattaaataaattggaacgaattaccgaatgaaatttctggctgagtcgcaaagagtgcacagcagtataagtgttgcactctcacacacttcacttctcttataattttatttgtaaaactcactcaaagttccaacaattaccatttttcataatttagattttagaatagaaacatggcctataagtggatatgatatgattgttactttgatcaattttttcaagtataatttgttttcaccatttacaggaacccaagaaccattagtccagatgcaatggctgtagaagccatgaaaaagatggaagctccaccgtccccggtacagttcttgcctgttgtcgattatgaaaacagagtaatcggaattgtcacactgcatggattagtttcagctggcttataatatgtatgattctctttcatctattgaatttgattatattctttaccagttattcttttattataggaactcaacccacctctttagtaaaggtttcatgtgtattgtatcagtataggtcttctatactataatttatatataaatattagatagttaattattttaacaatgtcatcactggtttttaagcattgtggttttgtgactctgaatatgaaacatgtcaaactacattctgatttctgaagcttaatgattgttcatttcactacaatttcattctttggtttgggtttgaaaactttataaaaatcaaactcttctggattaacatgatagtagaatgagtaccatgcttgtttctggatttcaaaccgtgtagttttaaccctaataatggttcaacattatcgctcgatagagaatcaaattagatttaccaatgaatcacgaaataaatatgattttaattttttagaagtaattcgtggaatcatacattacatcttttctttcctacaaatcaatacgccccaagcactacacttagatttattggatttatatttgggaaatttgaatttctatgcttacattagggaataatttttttcctaaacttaaaatagggaatattggtaaa

SEQ ID NO: 298283 - DNA, 1109 bp, Cannabis indica
taattttaaatatatttaaataagaataacaataataaaatctaaaaaaaataattttttatatgaatacttgacaaaaattacaaaatacaaaaattaattttgtagtcacttagaaaaattataacttatcgggcgtgattaagttcatcaatcacccacataaaaaacaaataatattaaagtgaaacaatattgatttatatgttcgatggaattagtacgcaggtatacgtaatcgaatcaagtaatataatgataaagtagaatatcgttcccacgaggattgactatcaattaccaattaattaattatttgtttctatttgatcaattaaaaaaatttagaaaaaataaataaaacaaagcaaataattaaaaatttgagaaataaacaatgagaaaaacaaagattattatgattcttaactatcttttattttacttcttaatgtagttactcaatttctcttcattttttcaagaaagtgacaacttttgaatttagcctgcgacttttgaagctgaaaaatgaactttgattttttttaagtaatgagaatcccaattaagcattacttcaaatcttgaagtttttttttcccttcagaattaactatttttatctcaaaaaagattgaagaacaccaaaataaacaaaaacagagatctcccaatatttcttttaaaaaatacacaaaaacaaataccaagcataaattcaaataataaagcgataaaatattaaaaaaaaacacacattaaaatagactctaaaaatacataaaaatagatctatcaaattctcccaaacttaacatttactcgcccttaagtaaagactaagttaaactaacgaaaaagaaacaacaacgaacacaagaagtaagccaccattaccatctatactacattgcctttttgaactttcaattgaaatttttaagagaatttcagctcaacttccttaaagttcaaccttaaagtttaataggaaaataaataacatgactcacaaatggtcccaatatttaggctacatcatatatgctcaacttataccaaacaattctactaactaatttttcaatatgcttgcatcatttaac

SEQ ID NO: 298284 - DNA, 2326 bp, Cannabis indica
tttaaaattgaaaaacaaaagtgattacagaacgcatttttgtttttcaaaaataaattttttaaaaacaaaaattttactttcattttgtgattaaaaaattaaaaaacaaaagtgttaccaaacggcacctatatttttctaaaatttggaaataagtgcattgcacgtaacatttacctagttaattttaaattacgtacataagtataattaattttttttattaagtaataaatattttttttaaatttaaacaccatatataaatatattaatataaaaaaacagaaaaataaaaagaaaaactatcatggtatatttacctatcataataaaattagtggaataaatataaatgaaaatatgttttaaaaattcattcgtgcgaatatatagtacgtaaatactcacctcaaaataaaagataatattatatctaatttgagataataattatattatatttttttaatacattttagttggttttgttggtttcttataatattacttaatttatttatatttctatttgattacataaaacatataattgatatattaaaaaaattaattattaattttaagaataatgttgtaaaattcaaatccacgtacaaaataaaaatgattttaaacagatttaattaaaaaaaacctaatatccattcatagttttatttaaggtttttaaaatttttaattaataataataataataaatatttttacttttgattttaattcattgcacaaattttttttagtcttaattttggaacttaatgaaattcagtttattttactgtattagatattttatgtaattaaaatgtgaaattttaaatatattagaatcaattttgttgaaattatatttagggatgcaatttgtaccaatcagtgaaaagcacgtataaatgctactaaagtgctaatttctccaacataattaatttatcactaacaagaatttaattttgttaatttttttgacttataattttttttaaattaagataatttattataatttaatgtaataatttacacgtattccttaaaaaacaaaattataagtacaccacaaggctagggtaactatatatatacatggaaagagttaccattacgctgtgactagcagaataaaagctgagctcgttctttctattccatttttcttcatgaaaagaggaatctaaactctttaaaactccatgaaaacacgaatctaaaccacgcccaccttcaacaccattgtcattacatcattctacgaacaataattgatcgagtatgcgtggataccttttgaggaacagaggaggaaggaaatcgttgttaaagtggcttactttaacatcgatgaaattattttttctcttcatattaacagtatcaatgggaaaagtaccaaaggtcttcgcacactcttctacagacggtcgggagattctgcttccggaccctcccaatgatcataataggggttggaacactggctgcagaatgagcgccaccctttctgaaaaaagagattttcatgtttataaaactcaaataaatgagtcttctcctttgccctctccctcatcagctctgttcgattcattgctcaattcatcatcctgtccggtaataaaaaaaaaatgttcacattttaattactgaattaattgattaatttatagagagactaatttgttaatttctccagtctcccaccactggaagatttgagtcctccaattcattcgaaacttttgaaaataaggttagagctatattcctactatgcatttatatactcatatattcagtatatagatatattgcttagtcttcatttaatgattttcttctatttgagctattttgccccagctgccagccttccttccaaaaaaaattcttatcaataatctatcacaataaaaaactctctcattagaactaggtttcaacattaatatttaccactaaactacaacttataaaaaaagaaaaacacataatagaaaaacacataataaaatgataaaatgaaagacaaaattaaatttaagaggtaaatccatacccaactttaacttctaacgttacaaaaaaaataattaagaattttatacaccaaagttttcaaaataagtgttttagagtgaacaaaatgcaatattaatagggaaatttgaaattatatgcatattagggattaaaattggtatcctaatctaaaactatacataatttgtaaaatgggataacttttacttaaacccaattttaccccctcatttctaaactgactctctctctctct

SEQ ID NO: 298285 - DNA, 5210 bp, Cannabis indica
ggagatatcggggatttgtcgggagtggtaaatgactaaactacccttgctacaattaaagagttttcaatcagaaataggaggtccaattcaaggtataatgcttagccttcttctttatggttttctttagctcaagataggttaattgcatgattttagtgatttgaggttctgtagtgtgcagctagtttgggtttgaattctggggttaagataggtttgttttagttgattttgtgctgagatagctagttgtgctacggattactcaaacttgaagttagagagcttaagttggctctctaatggtgtttttaatttctgagctatttgatgtgttctgttgcttgaaatggatttagtatagtatatgcaagtgttctagagagtatggtagagtttgggctcgaattgagttgtggaggacatttttggggttccctgcactgaaccggtcgaccggttcaggggagcctgtaacaaccggtcgaccggttgatccccaggaaccggtcttccggttgggaaccagtctgctggttgggcttttttcagaaccctaccttaaactaagttgaagaataagcatactatgaatgtatattatttactagttcatgcatgattttataaataatgtaattgatgtaaaaaattaattttatatctaaaaattttaaatacattgaacattataatcttgaaaaataaaattaattaatataatatgatagaattttcaaactattaaattaattgaaatcttaaattaaatatatgtaaagaaaagaaaagaaaatattacattgaactcgtgacattttaattattttaagagtgattattataaaattattataagttgaatatgttataagtttttataagtataattattgttttaaaaataaatttaattaagatactttttatgtaaatttgaaataaaaaaaaatataattaaaattaaattttaagtagaaataaaataaaaagataaaaatattaggtttggagtttgttagttgaacccacaattaataatattaaagattaattataactaaaaaaatatattaattttggtgtagttttcaagagttgatttgagccattagattaaatcaaaggctataaatcactatccctattaatataggtaaaatacccaatccctaccataataatatatattcatattttaatttatgtattattaaataatataacacattccacttctagtaatgctatatatgtgtggctttaattacatgattatcacacaacatgtgaaattcaaataatatttatatcatccatccagatggccaaaaaattcataagtttgaaatacaaaatttctttcaattatcatcataaccaattctcgaaattggaaccacttcatcaataactaataatacctataatttagaaataagctatgaaactaactaacaatgagaaaaaaatagtgtcataataataattaataattccttcacatagtgacatgttataaaattaaaatatatatattatatattacaatgtaaagaaaagagataaaaaatgagaaaaatggagagaattgttcttttatttatttatttattcattcattcatttcttaaccaatacactccataaatacactcttaacaaaactaggcctgcaatttcaataaactaaaaggtatatatcacaaccctaaaatacataaataacaatctgtaattacaatacatgtactttacaatttattgatattaaaatatatataaattaattatgcaatataaacctcacactaacttaattatacttaaagcaaatttttttttttactttcataattgaaattattggtcaataactaacaataaaataatataatttctcaaaataaataattaaaattaatagaatgattgtttatagaagaaagtaacaacacaaacctttttattcctcacaattacattatttacatctaaaatagagggataaaaatagaaaggtgtatataacaaataacaaataacaaaacagatgttgactaattcaattatgaattaataatccatagaattattctttgacctaaagaaatattattaatatgaaaacactacatatatataaattagaaaatatgattacaaacctttaattaaaatctgtcaacctgaaaatatgaagacggggatcgagagaagatcccatggaaattagtgttctattatcacacttccattaattacaaggtgattacatttcaaattaatactttaaaccttctcatcacatcacctattaattgttttttttatagatataaacttgttatgtatatctttaatggcttttgttaagttattaatctagattattgtgaacatataaatatcattgttgttatatattacttctattcattcatcgacaattttgtttttggaaaaaaaaaaatgaatatgtactatatagacacctattaattcttcaattctttttcttcagattttcatatataaacatggtgtgtttttggagatttattggctattattaaaacattaaatattgattattgtaagcatgcaacatttgctatatgtattacttatataatctcatgaacaattttttttttattaaaaatggtgaatatatagctttgatttgttttttaagatgagtttgagttattataggatgatcaaattcacaaaaaaaaaccctaaatataaaagattgaaagatgattttctgaagcatcataaaaaattattattatttgatttttgtgcttctgagtttggatttctcacttaattagatcttatttaaaaacttaatattattaattaacattttttaacataattgtgtttatgtgaatattatgtgtaaccattactatctatactaatattacttagttgcttaataatgttacatttcatttttttccagagaacctgaatttgttcttttaaattgtcgagttcaaggtaaaatatcttaaattataatatagtatgaatataataagcctgtgacaataacaattccacacaagatcaggctatgtttattttaatccattagcaataaaaattaaggttataaatatatatatatatatatatttatatatatgtttattaaggcttgtatgcaacttgcaaagagacttgtttcaaacaaaaagtgtatgcatccaaagttgatgcaatatagtacttttatttttctttttttattcattaattttcttaaagtatattgtctaataacttttttttgttctttctttagtcttggtgaataaacaagtgacatagaagcaaattaaatgtcatcttcaagctctcattcaccatgtgctgcatgcaagtttttaagaaggaaagagcactttagagtgtgtatttgcaccatacttccctcctgatcaaccacaaaagtttgcatgtgtccataaggttatggcgcgagtaatgtggccaagatcctcaacgagctcgcggtagctcaccgcgaggaagctgtggtctccctagcctacgaggcacaagctcgtatacgtgatccagtctacggttgtgtaggtttcatctctgtcctacacaaccgcctcaaacaagtccagaccgagcttcactcggccaggaaagagcttgaggcctacattggccctcaagcaatgatgataccatcctatagcctctccccaatgccacccatgttgggaattcccacaaatattcccaatatgggccggcaacaccaacagttcatgattcaagatccaaccaataataataataatcatcatttgcaacatccaatttttgttgacaacaatgctgctcatcaacaacatcaaatgaggttcaacaataataatggctttgatcacatgggagtgactgcttcaattggagacataggagttggcattggctgcggatttaataataatcaaatgagcagtagtggcggcggtggtggtggcggcggcggtggtagtggctctcctagtgctgttggtggtggtggtgttatgtctcctactttaagtctacaaggaagctttaataataacattttcaatagtactactcagatgcaaccacaccaaacaaccgtactaaatcacaattctcttgactatcaacttcaatcacagctcttgctccaatctcaacacaattcagaagctgaggagagttgagcttaattatatagctattttttttataatgtttatacttaattagtattatttctctgcaatatttttcattcattcattattttttttttcatttatttacaattaattatcatattcatttaatttattctttaaggtttgatgaatatatatctttttggatgaaataattgaaggccatataatattatatattggatagttttatagtgcactatttacgggtttatcgatgcacccctttatgtttcgacatctgagaaaattttttattctaaattttttcatgctcgtctatgttgtagttatttaagcatcttgtaaaattttgagagattcgaaaataaggttcaaaaagtttattgtacacaagactacaagactcttttattttatacgcgtgtgaaatagactatttaaaaattttgcagagtcttaaataactataatgtagacgaccatgaaaaaaattagactaaaaaattcaaataccaaaataaataaagggtacatcagtagactccttttaagattgtgtattgtaaaatttttctatattacttatatatgtagccagaaataccaaaacatattttttataaccctatatatgatataacatacccctaatagttattatttttatgttgttgtaaatatattaggttttcaaaccaaatgagtcctactaatgactatcttccaataaaaattggataacaatctcattgtttaaataataattaaaaaaaatgataagaccaaccatatgctaagacactagggctcatttggtatgtcatattgtattgtattaagttggattgtatagtattgtattagtattatataatacaacactatgtttggtattgacttttattaataggttgtgtaaagtgttgaaaatattttaccaggaactagatttactaccatgtatgtttcattaacatc

SEQ ID NO: 298286 - DNA, 4809 bp, Cannabis indica
gtatatataatttatataaataaccatatgcatgacagttaaggaggaacttacagtgcagataaaaactctcgtgaatgtccacgtaagttatatagtactatatataatattactgttacatgacactctaatactagtaaaacatggaagctaattaagctaaactaaggtacgtacatggtaaataaacgtgtctagaaagaattaaggttattttgagtggtaaatattgtgatatgtgtaacagacttgctaaataacgtgattaaagtcaaggatttgctatgtaagatcaccattgaagttttttcctcctgtccttttaacctaatgtttaactgtgaaggttactactagcttcgcttagtttcataacaattttctgttgcagtagtagcttcaattctgttgtatggcttttaatacgttaaaaatttgaaaaaaaattacaaaaatatcttaacacagaaaattttatttttataatttgaaagttgtgcagaacacaataacaaatattgtaccaatagcattttatctcggcgttaatttatttagagataagatgaataaggttacatctcaaaactaattgacaatattcatcttatatatggtaatttatttttatatattaacaatgtgtgactaactccaatactaatccctctaaactcaagctaacatcgataaatatgattaatactttcatcatcttttattacacactgatttaatgattttacttgcataatttgacaagtaaatctcactgctcaagagttgcaaaataagtcacctagagaatcatactatagtaatgctacaaatcgtccaaggattgtttaataccttttttgtaaatttcagataactaactaaaagcctctccaaataaaagcacaaaaacaaagataaatggactgaaaagtgagcaagacatctctcactatttcgagatagtgaagatattgtagtttcgaggtttcaacggccaattacagaacggtggtcttcctttcagaagttctgaagttgaattgtattcttgtgccctttcctgtacaaaataacacatactagctggtacataagtgtcaaatattaaaaccaaaaggttataaagaactggttctacgtcttatatattgtcataaatttaaataaataaaatatcaattctgaatgaagagaagcgtctgttcttactttgagaaccaactttctcaaggagagaagccagttttctttataaatacagtacagcaagaaggtaatttatcctatttaaaccaaattaaataagaggtgagagaatccggccaattgttggaactggctgtattagtaatagtattgacaccggcaaatattaaattaccttcctaccaaaacatcacccttcacaaactgttttggaacccacacaatactagcatagatcacatttcatggaaatttaaatgtacaagtaagtcggttgaagtatatagacatcagatttcttcaaattgcatcctagctcccaagtcccaaggaaaaggggcagggagaatttatttattactcgggatagtaaaaagatgttcacatattgatactattgtcgtataccttgagttcttgataagaaacatcatcttctcggtttccgataggaaattcacgtcttagtgacaagaaaaactccaacaatcgctttctgtagaatgaaattaaaataacatgattttaattgcattatggaaaaattcttcttaaacgattttaacagctcttacttgcaaagagaagactcggttgatggtgataatgcccccttagaagatgtgccttgctttcttcccgtggttccgagaatgacttcatgcaacccagacttattccaacatattgaatatctgttggccaatatttataaatctataggtagcaaaagccagttgagaaataacagcagcagcagcagctagaacagatcaagttcaaaaatcaaatacccgcatgttaaagtaattgaagcagtttccgcatgttgaaactcctttggtggtattggagctgcccagaatagtggctgcaagtaacattacaaaattacgaccctatcatcctgataatagatgtaccagacattaagaattcacaaacctggttcactcgaaagggactcatcagctcattcaacaatggacgaactcgatcatataaagccttcttcaagcaatcctccacaagaacctctctggaatagttagaagattgaccaacagtaatggaagagaggtaaacaggttgcagtaagtgagaaagcaaagctcctgaaacaagatgaatagccttatcttctaaccatactaagaaaatttaatattagtcataatatgttgaagactttacttaaatggtaacacaccttcccgcaggcacaagcaaaaatgcttaaccctactaaaaaattagcatgtgttgcacgggctatgtcttgatgaaaaatttaaactactacagttttctttcaagtttttttggtatcatttagctatttttttaacaagtgaggcacttcttgtataaaaaaacataccttgaactccaacaacattccaacgacatatcttgtcagagcagctgactgatgatgtcgtattgcctcgaccaggttttctttggactgagttaccaagttctgaagcatcacctgaaaaataataatcctgtagtcaattaacaccttagataatcaaaagcacagatacaattaagctaatatttaaggatccactacagaaactctttatggaagcctctccattcatggaatccttgagctcagcacaagatggctggaaaccgcattctgttggtaaaacattcttctcaggtgcaaattgtgaactcgacgaagcatccccacctacatgaaacatatcagagatccattataaagaagtttttcagaaatgtgcattatctaaaccaatgcgatagctaggaaaaggtaactgtttattatacttaaagcattacacatagttacatggaagctgtgatatatacatgtgtaattgccaacccttcttcattctatattttcttctccccatattatctttgtccagttccaaaaccaaggttgcatcatcatcatcatcaccttcagactgtttgtttccatcaccaagtttttgtttactgtaaatttcagaatttagctgaatctgcgtgtaaaagtacctattaccatagaatgggaagccagaaaactgtattattttccacataacaagtcacagaatttgaaatattcactgtcagccaaaacgtcattaagtggcaaaccaacaactacataggtcaataccgattcagaacctcaaaatagaaattaacaagcaggaaagcaaatttccagtcatgaattcactcatattgttagaattttggataaagtaaatggttccatctcaaaactaattatatatggattttattttcccgcattagcaataatgtgggataactctaataaatatacaaataaaatcaattaaatttaacaaactttcaatgaaatccgtacacgcttatatgtatgtctatctataggcacatacataaaaagcatctataacaaaatcactccagaaagaaacagagtagaaaagacctcaacaaggatctccgtgcaacgatttcagcgtgagaatcgttgactacatcaccatgggagctcaagcgtgatcgccctatacatttcgtcccggttccaagtgctacaacttccaattctgttggcaccataagaactatacataaactcatgtatacatatacactcgtatagtaaaggaatagctgaattgatttccttgaaaatgtatagagagagagagagagagagagtaagtagggatttaatagaggaccttgagaaggggaggagatgagaaatgcagctaagacggtaacttcgcgaccttgaggctttcctttcttcgggagagacttgtaaagcgagaaaaccttgcctgaaacttgattccccattgagtttcgttggagagaaggagaggacgacgccgtttttacgggaagcactcccatatccagttgtccacggttcagacttcagaagcagaaatctctgtacagagctcggaacctctagacatggttttgggccattttgcaatgaggttggacttgaaatgcaccttcagcatttggaccacgtaagaataaacacaatgaaataaggccatttactgctatttctcatgaaataatagggattatttcagatatactgtattttttttttacatttttacggactatttttttttttcgcttatgaaaaacaatgttgttttccttctaaaaaataacaaatctgtgaaaatatgaagaaaaataaaaattctataaaacatacataaaaaatgtggcattttgtatatacttttcaaaataataatagcatataaccttttgttttatgtttaagccacgtaaataggctggcccaagggtaggtccagttaagcccaagcactcttctttttgggtaaggcccaactctttttcaatatttatatatttaacattttcttcttgataattatttaaatataattttttgagtatgtaaatatatgtagttaattggaccaagatgcaaaatagtcctaaatctaacaattaagttaatagatgttctttttttaaataaattaacaaaatgtccttttagttaaaaatttgatgataaaattataattataaccttgaataattaagtgt

SEQ ID NO: 298287 - DNA, 7446 bp, Cannabis indica
tgtctaattttattcaattttactatttagtgattatttatgtactaaatcactgcttctcaaactttaatatttaccaaatcacaccccttgtacttttgtatatgtgccaaatcatgtctctgaacttttcattcatgttaattttttcttactaaaagtccttaaatccaacaatctccataattcaaggagaatttttaacgactaaaaaagtttgagaaacataatttgatatatatcaaaattccggagaacaaaaatcctaattagccaaataaaatatatacgtacatagaaagaactcaaaaaatggatattttttatatgaaacaaacttcttttatgacattactctatatttctcctataattttaaggtttttttttttttaaaaaaaaaaatgccatatttagtgcattaagtttccatgctatatcttacttttataaatagccaaaaaaactttatcacattatattaaaccaaaatatctttgctgcacaagactgtggtgtccacagtttctggtccgaattaaagaaaagaaactaaacctggaaaccatgtgacactatacatatccaacagtgtaagataattgtagcacaaactacaaacaagtggaattacaacaacaacaagtaactgtggtatgatatgtctgtaatttcaattagtcaacatgtgagttggtttccccatacctattttgtacaataaacttttggttctaatcagtcaagaggaatctatgttaaccttcttttgcttagtctgtacatctcagttagaatttatcctagtctctatttgctactgtaactgtttaacttcgactcttatcatctacacagtcggttcggatttgaacttctttgtaaaaccaggaggaggagaaagaatatgctcctgtaaaaccaaataatggtatatgtatatgaagaaaagaaaatgattaagaaagcagacaataatatctgatagagtaatggtgtttgaaagttgaaacctgattgtagtatttggtcaattcttcttttgtaacttctaagtgttttcttggcacaattacgtcaacccttccaatactaattccccccaccatgtcaatttccatgtcctcatcagctagaaaactagagagctcctcttgtgcatctgaaagaaaaggtttatcgtttgtgctacggaagattccccataagaactgctttgattttgatgacaaaacatctggcaaaataccaaaaaaaggagatctagcatatgtattcccattaaggcattttggatacaatctgatgtaattcatagacacatgagattacaagagaaggtaacaataagaaagaaggtatcaccatgtccataaacataataaaatggaaaacatataaaactctttaacgaataaacaaatagccaacaacttgatctaccctcaagtggcatagtcatcactcttatacttattaatgtcaattaaatttctaagaagaaaaaaaaagaaagaggtcatttctatacgactgtcacaaaatgtttcagtttggcactactttggcaacattgcttgagagatttccaatgcagccaagaaaggacacccccacaacatctaaaatagagctttgttcatcaaaaagatttattgatggctgatgtaaaatatcaataatggacagtagactgtagaccatgagctcaagaaccagagtaattaagaacttatgaaatacttttacttactacctagaaaaattttcaaaggtaggacagtaagaaagagcaactctatgcatcatgaagattgatctttcctcaaaagtaatcagagagattcacttttaagacatagaaccaaaaagacattacatgagatgacaaggttttacatggaaatttccagctcactgagaaacaagtcatcacgactgacaatattttagaaacatggatgacaggaattgagatacaactaaaatgctatggatagcaaaaaacttactctgtgaatcgacattaagctgtaaagatgtaaatattagcagctcaacatcatcaatataacatctcataattgactcgtggatctccatttgttcaaccaacttcaaaaaattctgtcttgatctaccagtaagaaaaaacttcaattgtaatgagtaaaaacaacataattcagaaagcattctaataaatcagaagttaaaatagacctttcaatgttttcagctgggaacaagtacattgccacatctaaaagatctggacactcatcctggaagagatcaaccaagaaacggtgctgaggcagcagattaacttcaagaactggaggcatctttcttgaaatttcattaactttacgatgaattttgcaaggaagttgtgcctggaacctaccaaagacttcacatggattccaattaagaattttgaagcctcccctgaagaaagaaaaaacagttcaaatgttttagtatttgggagtggaaaggccactcctatagaatccccattcacttgttgccatttcaatgaaggaataatcattaaatttgaatgcttattgcatcagttagggaatggactttcataaattatatggtagaaatccaaagtcttcccaaacccaatattttacaatctaaactgcttttgaatattccacattgtgagatatatgcagcgaaaatttcttgtattgaaaatttcacttcactcccaagtttatcttttcacggtgcaagtacctaaagtatccaatatttagttgcacaaccgttaactttgcgttagactttgattaaatgaatatttgtagcaaaagtacttatatcgtgctaaaagttgcacttaagtatcttaagtatagttagattctgccacatcagctactaaccgtaaacataacgataagtacttcaaatgcagctaaaaattaatcttaaatattttagctgtcaaaaaaatataaaacaatttctttcaatttatttatatatatatataagagtgatacaagaataaaccaatacatattattaaattatgtggatatttcttttccatttctattttctgttctcacataaacacttcatttcaatcccttctatttgtacacctaagcactaaagagtgctagactcataaataaatgcctagttttttttataatcgtgtacattctaattatataagaccatttgtaaattttcaaaaaatctaaatagcttatcataccgaaaataatgcttaaatatttttctctcatatgagtggtaaacaattgtttcaagattattttcggcaccataatctattcataacttttaaaaaatttacaggtgatcctaaatagctatagttacatgattataaagtctactagaataactcttttaggggtgcactaaagattttttctatttatatattattttttccaagtaagaagaacgagctcacagcagcacaaccttttattaaaaattctaaaattttcaagtaaaagaaaataaattaaagggataagttacccactcccaaatcacatcttgagcaggaaaataagtaagatacaaggcataactacgcggaaaattttgtagatctccttcttgaacatttgaatgatcatgttgagcaatatccttagttttaccacctacataaacatagactacacacttgaggcaattatcttactaattcaatccacaaaacattttaaggatcaaacgtttatcaatgtaataacaaaaaactcaatcgagatgtcctaatccttttaagcattcttcttcttcttcttctactactactactactactgttattatgacatgaataaaatagatgtcccaatcgagatgagtgacatgaaaatgaacttttcaaggataaaagagatgattgtaataaactaatgcgacacaacaagtttcctcctgcttataattcttaacaaaaaaagagagggaagaaattaagctctccaaaaataaactaaaacatttatacaatcagggatgaaatttcacaccaatgaattactttacctgtattgacaccaagcaatgatggcaacaatgtgcatgattctttgagtagttcctttgatatcttttaatttgaatttttcgtacttttctaggtgggtataaaggttggcgctggcgtgttgtttggttagaggatctttattgcatgaggcagcagctttttctctgaaatcataataggaacaccaccagactattttatgacaaaaaaaaaaaaaaaaatcaactatgataaagtttcatgaaacttgcgaaattgtgaacccttcaatctagagaaggatttaatttcatttaccaaacaaaaagaaagatgcagaacagatgatgcaattattgtgatcatgatgttacctacctggatcaacaggtcttgaacatgaaggtgatgtttttgttgaattctccatcttattttcaaaaatgacacaacgatttttgggaactgagatatcatccatagattgcttctggttagcatgcaacttcccagaagctactggacttaattctgaagctgtgatgagaacaaaaccccaatataaattattattcacaaatccatttataaagacatcagaaacaaagtatgcacttcatatgaactaattgttttctaaatttttctccacggcatggacagttttttttttcttttttgagaaagagacagaagtcaaaacttgacctctcaccaaatttattagggaacctcacttatgacagaggaaaagataaaatgcacttaaagcgcaggtgcatagcaaacaatatatattatcatcctcaagaaggataagaaaatagagagagatccaacagtctagaattcttttttctaaccaaaaatatcatgaggcaacataaaacgattatcaacgaaatgggcagaaagagaagaagctgttctcgagataagagctacaaggaagtagcccacacaaaacaaaatatagcatgttgcatttgcaaaatgttagtcttgaacaacttcagaactgagacaagtaatgtaaagacttgtagactttaatattcaaatttgatctactatgatgtaaatttgcaggatatatgtgtccaacaaagcttaagaaagtaaaaaaaaaaatcaaactgtcaagcgtaagaagataaagctacatacttttagtaattagaaaaggatgagtaccaatttcaagacagcctaaattttatagcaatgcagatgctatgcacacctctctccctattcaatattaagctaacaaagatttctgaccttttgattctttgaacgttcgtgacatctgttgattaaccgtagagcttgtaagtgtaggatttctaaatggccccgtcaatttgtgaggtttacatggggatgattttactctgtcagagaaggcctttggattcatagttctaaacttatgtgtaggcctttggaatgttgatttcctacggcttgaattacattttgtttctgcagtccctgaagatagcttaatggcttcttcatgagaaataaacttaactttaccagtttgcacaggcttttgcctcttggaatgaagttgtgaagctgaaaattgctcattccccattgcccttgtgacagcttcattttcgtgaagtgaagatgtcacatgagcatctttcataccagattccttcaaaatcaagtcaattccagttaggcatgatccacagacccaatcctcagggacctctctctttacttctcgcatgcaataactgaaaaaacaaggaaaatcatttatgattatgatcaaagaagtttttatgatacagtattgcaatagaaacagttatgttaatatgtatcatggtcacatccaatcaagagtaatacttcaacagcataaatgcaacaagttaaaaacaaaaattcaacaataatatctcagagaaaaataaattccctaaaatcataagctttatttcagatgataaacaatcatctttcaacaatatatgtttctttcataaagataattcaataatcaattagagaaaatcttacacatgttcacaagttgagttgcatttagagcaagttgcaagtaaagattcatcaagacgatgatcaccaccacatatttcacaaacttttgcctgaaaaacagagggaataaatcatatcattacttttgataaacattaaaggaataattacaatcaaactagaacagctgcagcaaagcaccaacagttaaactcacaaactgaaataaataaataaaccgaaaaaaacggttttttttttaaaaaaaaaaaaaagaagaaaaaagaagaagaagaaaacataaaacagataaaattatcgataaatcccagtttcttaacaagtcagaaggaaaacagagcaaaaactttgacactccaagtacaactcagtctcctcttggaaaatcctgccacatattaattaggaaactgagctccttgccaaacatatttgagatgcataaaattgtaaccattgttatgtaggtactcagaaaaaactcgaacctcaagccttgtgagagcaaacaatatgcctaaacgaatgaattacccacttgagtagaaatcatatttatttgttagaaccatttcataaatttttggagcttcaaattaatacttatagcataagtttttatcaaacatatttttataaaaacaagagtattcatgatcatgttatgtactcataaagcaaattaagtaataaaacaggaaataaataagattggagccaagcacattctcttgcttattcagtctctaagtataaccagtatatcccattgtatccaaccagtactagtgtgttgagtaagtaccaagcttatctttaccgaatctcccggtggtatgtcctaaattacagttttctcaaatagctcacactcctttcacaacctccattcagccaatcttagcttcatcataactcaaatattattacttgaatcaatttggttcagagcatacagtaagcacttgcactcttaattactacaacatataaataatattaccttacaaacaaaaatgaaaaaaaaaagaaattatattacaaccctgattaaagtcaaacacaaaagtgagccccacatgatttttttttttctctttcttgatcacttgcccaaactgatccaaggatcaaatgacaatcgatcacattacatgatcaatgtgtagaaaatttccttgagtttaataaaaaaccaagtagaagtagaaaataaacactactgttaccctaaaacacaggtggtaagagtaacattttctttttccaggggaaaagacatagcacacataagaacccaacatgttaatgatcggtcttggagagagaaatgggtattc

SEQ ID NO: 298288 - DNA, 5387 bp, Cannabis indica
aaggtgtaagtataccttatcgctgattatcatgccagttcgaatacagtgtaatgacaaatcatgggacttaaaattttaaacatataatcatgattatattccactgttttgaaaccactataataatgaataactatataaactcgatttaatagagtttatacattaatcacataagcatgaaataaatcatgtgaaccatgcaacataaaatgatttctaatcttatattaattagtaaatcttattatattgaaataagttttatttagggcacaaaacccaacaccagattcgttagaccactattacccgtccgttttgagctggcattcaacaccatgatctttgtagcagtgtttgtgccatgcataattgtgttaccacttgcacatccagctggtacaactttacgctctttggtactagcctcaccggtcaaaatcagaacccccacttttaccaccgtgttattttgccaaacattgacaggttcttcctgagcttcacaataaatctcggtgcccaacaaagcaagctcaatgttttctattattggcaagacattttcgtgttcatccacctgtctttgggcctcctccacatctcgttgcatacactcaagctcatatggggcatagtcagatcgagaaacaatctttacaacgtgactcaaagtgcatccatgatccatacattgaaatcgtccttccaaaattatctgaatcatgcaacgatgcattctacaaccagcttctttgtgacccttagtgccacacgcaggaggttttgatacttaaagtagcaccacaaccacaagtttactccttttttcatgggaagtatgtgttccactagaagcggccatttgagttggaattgcacctagaacttgatgtattcattggttgggaagccattgtgccacatatcaatactaaaaaatgatccaaacgtttcggcaacacgaattgcattattctgagactagaacccagtttggatatcatatactctaacccaaaattgtgtcaactagagatccgcagatgcccacaagccgtctttcgggataggcttggcaaacataaacccatcacaaacattcaatggtccctgtttgatcatgtctcagcttcctttcattgcatgaactgggaaataaatgggttttttgccacttttgtaagcttccatccttgtttgagcttccatttttgggagagaaatgaccaaaggagtctcagaaagatgaccttcttagagatgactcgagccactagtgattgttcattcaggtctttacccaattcttcaaatctttctaaagttactgagagatctttgacgtgaaatcactgttcgcttcattatcctcactatacatcactacattactcttgtctaccattggcaatgaagatggtagaaggagaaaataaaagaaaagggaggtaaagaggctaagcatacaaaagatacagagtaaatgaaaccctagaccacttaacagacttaaagcaggatcaaagcgagagttgagtaggttatacgagagcattttcaccctagatcattacatctcaactaaactaatgacatgtctagaaagaatggatccccatgatggacaaaaaactcttgaaggaattgaaaatttggcaatttttagttatatacgtaattaacaaaaatatcttatagataacgacaaaaaaaaataaaacatcctatatatgtacatgcttatcgaaaattaaaaaaaaaatacctatttaactaaaaaaaatggcaacccaaaatttttaggcaagtatcgtttgcccaaaacggtgtgtactacacccttactgagcaatatatattcatctgagaacaaaaaaaaaaagaaaagtttcgatcaaccaacaaaatccaaactcgatcatcgaagctctccaatcatgtctgtggaacctagcaactaaatccaccattaaagctacacaaaagcttcaattctctgtaatcaaacaaattttcaatctcagactcgaatttcgcaccattcgaatctccaccattgaagctcttcgaaaatctcagtcgaagctactagagataccgccaataaaatttcatcaatcttctctcacgaaataaaaattcaccgaacaacaacaaatataaagttctatcattcaaagtttcaccattaaagcatcgacatagcaacttcaagctcttcttacgtacaaaaggaggaaacaaaaataagggaacttgatgacaactactagactgttttcacacaatagacaactaaaaaattacagttttttttcatacataaaaagaaaactaaaaaaatagtttatatactatttgattgctccaatataaaactattactctgttatataatagaatcatggaacctttgttagtggtactttactacaatagaaaatttgtagataattatttgtacacagattaccaagtcacaggtacactgataccaagagctttctcataaaacgatctaatacattacctacatggacagagtatgcactcacagttgctaactacatcacagaaaagactggacaagcactcaactcaagctgggaaaacaaaacaaacatcatcaaagatccatggattgacacaataagagatgggcaaattttccaagacaaagaaacaataaagcttgccatgagtctatatgcaatcaaaatgaatcaacaacacatggtaaaaatattatcaacaaaagactacagcctaatgtgtgttgatataaattgtaaatggtatttcttggcaacaaaataaggaaaaaaaatttgttcaaggtcacaaaacttatagaggatcacacatgctcaataaaacgcatccatgacgatcaccctcaagcaacaagtaatatcatagccgactgcatcaagagaaaaattagcgatcccaagcgaaactacaggccaaatgaaattgttgatgatgtagcagaagactatagtgtgtcaatctcttaccaaaaaagcttggagagcaaaagaaaaagctacatacaaggtaataggttgcccacctaattcatacaatgaaataccaggcactctacacgtgattcaaaaatgcaacctaggtgtaaatcaatttatctaatgtcaaatttatacttaaaaagaaacatattaatagctctaacatactttcatgatcttgcaggaacaaaaataatgcaaatttctttaaaaatgcatatggaggaacattaataattgctagcgcataagatgctgacagacacatatttccactagtttttttaatagttgactctgaaaatgatgcatcatgggaatacttcatgcaaaacctcaaaaaatctcatggtgagcaagaagagcagtgcataatttctgacagacacaaaagcattgctaaagcagtaaagttaattttccctaacttgatgcacggggtatgttgcttcgatttattccaaaatataaaaacaaaattcagaaaaggaggagataatctaagagatgcattctactgtgcatccaaagcatacaatcaaactgacttcgacaattacatgagggacttagacaacattgatactagaattcgtccttacctaactagtgaagtcggcctagaaaaatggacaaggccttacagcccaaataaatgctactcaacaatgacctctaacatagcagagtctgtgaactcagcattgaaagaaatgagagagctaccgattggaatactgttggaatgtctacgctacttagttcaaaaatggtcatgggaaaacaaaaatagagctttgtccacattcacaacattagcatcaataccagaaaagatattgaaggataaactcgaatgtagtaagaaactaaaggtatctttaaaacttcaattatatactacttatgcacattctgttgcttaaaaaaaatcacaagaaaattatactaatgcttacctctttgacatttatacaggtaaaaacatccaatcttgtcatatacacagtaaaagaattgaaaagatcctatattgtggatatccaaaaaagaacatgcacttgtcaacgatttcagtatgatgaaatgccatgttctcatgcaatggctgtaatatcaaaaagacacatgaaatgctatgaatattgctcatactactacacaaaagaagcatttttgcaacatatgaaggttctgtgttaccaataggtgacccaaagacatgagacttgcctgataacatcaaacaactacaagtattgccaccaatatacaagagaccagcaaaaaggccaaggaaacaaaggtataagactgcactagataaagcaacacaaaataaatgtgcaagatgcttacaaaaggacacaactgaaggacttgcaaaaatgatgcagtcgagttaaaaaaaagagaaaaagagacattgaatataccatccattattcttccatttatccaaatactataaaaataaaaacattactttgaatttgataaactattaagtagctttactaaaagactttccaatatttccctactatttcaaatactataagaataaaaaaaatatctcatttgtgaagactgcttttatgaatagttgtattcatttttaaagtctaaatttagtttttagtattttatatgattgattactaatagaaaactaacacgttgcttaaatgatatattcataaatttttagcgtttaggcaagaaaaatcttggtttccaacaagtattctgctgtctattttatttttaatttatcatacacacaattaaacatatcaaaatagacattattcattattaaaaaataattaaagtgtaccgctaattatgttgcaagcgactaccattgtagaattaagttagaaaaatccgcttttacaacatgaacgtttatataaaaaaaaattaaaaacaaaactcgaaaagtaacatatataaatgcttaatcaaatcaaaaacacataatcatagatatctccacaagcaaatatttactcataacatcattaaaaagaaactaacaagtaagttttattttgaaataattaacttaaaaataaaaagtaatacaacagtattacattgatcaagcacaaacctagaaaaaatctacttaataaaaaactaattagtaaaccaaccaaaattataactaaaaatactactaaatcataaactgttaataacatacacattaaaaataaaaaacacactaaaaaacctaaaataacaaatatatatacaatccattagaaaattatacagtaaactgttggatatattttaccacgatctagatttactaacaagtatgttttattaaca

SEQ ID NO: 298289 - DNA, 4454 bp, Cannabis indica
tctctctctctctctctttgatgaccacccccactcaattcttaccctctctcaccacctccacctccctttctctcgctcctcctctcagcgaacccaccaccaagcttcctcaacctccgtcaatgtgcgtacctaccattaagcctccacctcttccttatttaggtactaattttatttatttattttagatattaaattcaatttactcttatgggttttccatattccataccaacgagtaaataaattcttgtttgatttcgatttgagagtgtgtttgtatgggcgatgttattgttagttcaactttgattttatttgattgattatttgtgtcaatgttaacgtggatatgtaattgtatttacttgtatgaacttacattaatctaattttcttgttttacagttaggtatctaatttgtgaaaatggaatgagacttttaggttttatattcaagtttcattacatgagggttttttttagatttaagtttatatatgtatgactatttttatttgaatagaaatcataatttgtagtctctcaaaaatttgagatcatgttgaggctatgctgagatttggttatgtgtttacctggtctaacaaccaagatggggctagcagaatatactcaaagattgaccatgtctttgctaatgaggagttgtttgattcgtttcctaatactaaaaccctatttaggtgggaaataattttagatcactgttcttgtttaatttctacagtagtctctgaaatgatagggttcaaacccttttgatattataatttttgggccaatcatccagaattgaaagaagttgttttgaataattggaggaagcctttggctgctaggggtctcctttctatatacctcaatatgatgagattgaagcattgcctcaaaaaatttaatcaagagaccattggagacattgggaaggtgtatcaagcagcaaaagctgagtatcttgatgctaaaatgtgggcacaatctaacctaagggatcctttatttcaagaaaaggagaaattggttgcttataagtttctttgttaagagaagatgtattattgcttcttgggacaacgtagtaaggttatttttatttataaagttgatgagaatacctctttttttcattcttgcttaaagaaaagtaaaattgagaatacaattatatctttcacctttaatcaaggtgacattattgacaatttctctgaagttgttgaccattttatttcttatttttgtggtttcatggggagcaaaagctacacttcaagcaatctgaatattgattgtattgagcaggtactagacttagtcttgatcagcaactaggtcttctcaaaactttctcaaacaaggaaatcaagaaagctttattcaacatcccgaatacaaaatcccctggtgctgatgggtttaggtcaggatttttcaagaagttgtggccagaataaggagcagaattctattttgctattactaattttttttagcacatgtattatgccaattgagcttcatttgaatttaatttctttcatacctaagcatgagagtcatgttaaagctgcacactacaggccaatcacttgttgtactatgatttataaatgtatatcgaagcttttgtgctctagacttgcaatggtgcttcctggtttaattaatcaaaaccaaggagcatttattcaagtaaggtccatagctcacaatgtgatgattcctcaagacctcttgaaaagttataagagaaagaatgtatcttcgacatgtacaataaaaatatacattagcaaggcttatgacactgtcaattaagatttagctaattaggattttttccctgaactttgacatgtaccaaatcatgccctctgaacttttttggccattaaaaaatcaaagttcgggagaaaaaaatcttaattagccttaagattttttaaaggatttgctagctgcctttaatatgcctcggaagtttatacagtgggttatggtttgtctaagagctacctcttactcaatagtcatgaatggtagagtgtatggtaattttaaaggagagaaaggactgaagacaaggtgacccaatctcacctcttctctttgtgtttattatggagtatctcacttgaagacttcaaatggttgttgttcactctacttacatgttttatccaatgtgcaagggcctaaaaatcatcaatctttgcttcgcagatgatttgattctatttagcaagggatcaaggctttcaatattggatatcgaagaggttcttgatgactttagctttgtttctagtttgcacatcaactttggcaagtcccaaatttattttggaggtataaattgtaaggaaaaattggttattcttaatgattttcaattggttaaaggcttctttacactcaattacttgagagtccctctaaggctgactaaatggaaagttgaggattatggaattattatcaataagataaaatagagattaaatacttggtcaagtaggcacctctcattttctaagagggttcaattgatccactctgctttacttggtcttcaaaactattggatgagcatttttgttcttccacatagtattaccaaggaggttgggaaactttgtagaggctttctttggggtatgaatggaaatagaattaaaattcacattattttgtgggataatgtttgtctccaaaagtcttatgatggtcttaggtttaaagatggcgtcaagtggaaccaagctattcttgctaagtatgtttgggcgatttcaacaaaataagatttactctgggtcaaatgggtagataacatctatctgaagaaagataatttatggtcttatgaacttaaacaagattcaagctggtattggcgtaaactgtgtcatttaaggaaaaaatttatgtgttctaagatccaaaaagcaggtacttctggccagtttaagactaactagttgtacaatagtagattggtctaaaactaggtcaattttaacaaggctttttggagctctttaaatgtgcctaaacacaggtttgttgtgccaaatgatgaattcccatcttctcactagggacaagttgagtcagtttcatatagaactgaactccctgatgtgtccagtttgtaaagatgaattagagactcatgatcacattttcttcaaatgtatcatgtttcaaaaagtcatggacttgatcatttcttggatgggattcaaaggttggcccttaggtcttgttggctggactggttgtattgctttgaaaggtcaaaaccagattcaacagttcaatatcacgattttggcactagtgatttgaaaccattggctcaacagaaatatgtgtatttttaatggatattctagatcattttttggtgttgtaaatgatgtaaagaatattataaagtatatattacaaatagttaacaacagaaaaatgacaaagcagaagagcgattatttgttgaggttgcaatgtatttattttgatttttaggtgttggagctgctggtttggagccgtggtgggcttttattttgtttgattggtgtttgtatgtgctttttcgattaatgaagtcatttcttattgatcaaaaaaaaattgagttcattagaaatttggagaatttttgagtcttctctcactaagtattttgatttgaatatgcaaagtatcataattttatttagataaagttaggcattgttttatatttttgaaaatataagctatattttaatattttttttgtgaaatttaacttatttttagtaatattgcaatgtacatagctaaaaaaattcataaaatgtctttagtatatttgaattaaaattttaatttaaaaagattcataaattttttttatagcattttaattttaatgtcaatattgaatttgttacaagtaaaaatatatatgtaatgtgtaattattttaggtaaataatctttttagtgtaagctttgtagtttaagaaaaaaaaattagtatagttgtaacatttagccatttattataagagtaaaagtttatttgtatacctttcttattactgtacctttgattagtatagtaatctaggaaaagaacttggaggttcaagtcttattttaattgaagatttttttgcattgtaagtgtgactcatgatgttgagtccaaagtcttctttttagtaatatgtattgtgtgcataggtaaaaaatttctagtatttgtgaaaaagtttcataaaatatcttttgtattttttaagttaagttttattaaagttaataaatttctagtttgggtaaatagcagcataagtactcaaagtttctagtttgtaagtgacataaattcaatatttatttttagcggtataaatactcaatgttt

SEQ ID NO: 298290 - DNA, 1897 bp, Cannabis indica
tttttttgttaaatgaaactccttttatttcaaaaaaaaaaagagaggaaaaaaaaactaaaggggtatttaggtgaaattattttgaattacttaaaactttttgaaatatttcttcttttcaacaatattatgttatattaattttgtttgaaatgattttgcagaaataaatgaatgcctgagttcaggaccaattaattgtaccaaaactcagtactgtgtgaatataccaggaagctatatttgcaaggaaagaagccaaagccaattcacactcattaaaatttccattggtatgtcattaatcataattaaataaattaacatacatataattattagatcaattactaaatgattttattacttttatgatctatataggtgtagcaattggatttattgccttgtttataagcacttcttggctctacttagttttaaaacaaagaaagctaatgcaactcaaagagaagtttttcaaacaaaatggtggtttaattctaaagcagaaactctctacactagaaaataactcatcatcatcatcttcagctaaaatcttcacagaagaagagttaatcaaagctacaaataattatgatgatagcacaatcattggtagaggtggttttggtactgtctataaagggtttttaccagataataaaatagtagctataaaaaagtcaaagattgttgaccaaaaccaaacagaacaatttatcaatgaagttgttgttttatcccaaatcaaccacaaaaatgttgtcaaattgttgggttgttgtttagagacacaagttcctttacttgtctatgaatttgttcctaatgggactctctctgaacacatacataatagagaaaaatacactaagttgagttgggaaactcgtctgggaatagtagccgaaacagctgaagctttagcttatcttcactcggcggcctcaacaccgattattcatagagatgtgaagccttcaaacatacttctagacaatttcactgcgaaagtgtctgattttggagcctccaagttggttcctcaagaccaattggaattggctactatggttcagggtactctaggatacttagatccagagtacctgcacaccaaccagttaactgaaaaaagtgatgtttatagttttggagttgttttggttgagttgttaactgcgaaaaaagcaatctctttcgatagggttgacgaggagaggagtttggccatgcatttcttgctttctttgaaaaaagatagattgtttgaaataattgaggttgagggtaatattggaattgattataaagagcaagttttggaagtggctatgattgctaagaggtgcttgagtgttaatggtgaagataggccttcaatgaaagaagttgcagttaaattggaaggactaagaaaaatggaaaaacatccttgggttaatgagggtggtcaattgattaatggtaatttggaatatgagactgaatatttgcttgctcatgatcaagacaatgggaatgaagataccaataataataattctacttatgatagtattagagatcatctatcactggattttagtggaagatgattataaagagggaacatatgtatatatataagagatttttacataaagtatctaatttgttttttttcttttcgttttacgaattttcttttaggattttgttttttacatgattttatttgtatttttttcataaaataatgttatttcatataaaataagaggtttttattttacatttgaaagctaatttttttttttgttatttttacgaaaattcacataacaatccttatagcaactaacggaataacttaaatcacaatcaaaattcacataacaacctccat

SEQ ID NO: 298291 - DNA, 4764 bp, Cannabis indica
tttttttttttaaaaatagttagtaactacatctgtgcaacaatgtcacttatgtcacaaacaaagtgtatatctatctcggtgtgtttgcacctagcatgaaaaatagggtttgtagctagagaagtagcccactgattgtccacccacagaataggagcttccaaaagggaaacttgaagctcaggtaacaatggtaccaatcattttacttctgtacaacattggcaagcgctttaaattcactctcaatgctagaacgagctactacaggttgtttctttgcggactaagtcaccaaattttcacctaagaacatagcatagccatcactggattgtcgatcatcaagacagcttgcccgatctgcatccgaataaccatagagagacaattgcatagttggtttgagcaacaagccttttgaaataatgcctgagatattgaagtaacctttttgtggcatcctagtgaactgttgttggagcatgaatgaattgacttagtttattaatgatataggcaacatcaagtcttgcaagtgtgagatactgtaaggctccaacaatacttctatctgaatgatgtcttcaagtggcccctagatgacaaattgagtttgtgagctgaaattgtaggattggagcacggttatgtacttagtttgggaaaggtacatacctttcttatttcttcgaacttcaatgccaaggaactagtgaatgtcaccaaggccttttagggggaaatttgagttcagattagatattagtctttgaattaggttggagtttggccctgtaatgaggaaatcatcaacataaaccagaagctgtataagatttgtcctagtggcaaaaataaatgaggtatttgattttgattgctagaaaccccaatgaaacaatgtgtgcttgagtttatcattccaggccctgggagcctcttttaaaccatagattgctttctttagtttgcaaacgtggtctggcttggagggatctacaaaccttgttggttgttgcatatataccactttattcatagtgtcattgagaaagacattattgacatttagttgttttacaatccaatcatatgagatagcaatggtgagcattgttctaacagtagcaggcttgacaaatagactaatgtttcttcaaagtcaacttctggtgtttggaggaaaccctagcaactagtctagatttggacctatctaaagtaccatccaaatttaacttaatcctgtgcacccatttgtcggtgatgacttgcatattaggtgaagtgggtaccaaagtccctgtctttttctgtttcaaggcatcaacctcatcctgcattgatgcatgtcatttgggatttctaacaacaacagtttcaatgggaacaggtggtgatgagggcttaattttcataggggagcactcatattcatctatagatagaggtgaaccaaggtcaacaactgcattggaagggagaggttggtcctcttgcacagatggaactagatcaatggcagttgagacactagttgaagttgtttgaaattgagcttgaggcaaggcactggtgtgttgaggagaatccagaataggtggcaaagctgtaagaatgagaattgtgtttcattaaagaccacatttcgagcaatatatattttgtcttcttcgttttgacaaatgtatcttttacgattaggagagtagcccaaaaatctgcaaggttgagacatgaaatccaacttgtgagaattacatggcctcaagtgaggatagcaaatacaaccaaatggctttaaagatgcatagtctggttgtttttccgaagaagcattgatatggactaatattgtcaagaatcctagttggaagtctgtttagggagtacactccacattgaaaggcatgcaaccaataagataagtccataccagaatgtgcaagaagagttaaccaagtttttgttatgtgcttgtattttctttcagttcttccattttgctcatgagagtgagggcaaggatgctggaactgaataccttgagcctgcaaaaaaagagcaaacactatattgtcctccccagtcaaattacatagttttgataggtaaagaaaattgtttctaaactaggcacttgaattttaagaacacaaaataggattcaaacttgaggtgtaaaggaaaaatccaagtgaatctacttaaagtcatctataaaatgaatgtagtacctaaagccatctattgaaggtgtatgagagggtccccacacatctttgtaaagtaattgtaagggttgagtagcatgactgtttgagagaggaaaatgttgtttatggcttttcccttttttgacaagcatcacaaaattttaattgctttagaaaacatggaatagatagggatgagagtgttttctgaagaatttgaggtgatggatgtccaagtttaatatgtcaaagatttatatcactactagcacgagagaaaaactcttgaggatttttaatagcaaaattagaatctttatttattgaagagtgattacaattacatttatttgcacatgtttgagcaacaatatgcttattacattgaacattgtaatcagctgaagaagaactagtactacaactagaactttgatccttagcagaattggaaattgtggcaagatggcactgaagtgtggaagtagatgatccctccctaagcacatataggccatgtttgattttccctttgggtagaaccttctctgatttcttgtccttaacaaaacaacaatttttgtgaaatttaaaaaatacatcattgtcgttagatagttggatacactaaccagatttttcttgatagtaggaacaattaaaacaaaattaagtttaggagaagtattgtggtagaagggattgtagaagggcctatgtgattaattaaaagtttcttaccatcatcaactgttagggattcagatccaggtttgaagtggtatgatcaagatgtttcattccaattgcaatatgctttgttgcccatgtgtcagcatactagagaaaatcatctccaaaatcagggatagatttggatgaatatgcttgtggatcaggtgtcttagttggttcttgttcagttaggaaggctctagaaagtgtagaattaccaatccctgagtttttcatggattgagtaaatttgtcatatatgtaatgacaaataacagtgtgtcctattttgaagcaaacttgatagataggccttgaattgttggtggagggtatcttgagtagtttcagccatagtttggtcttgaatattgagaaggcttttgatactctgattcgacccatttcatggaccatttgttgttagattagcagacattttgtttgaaatatcagctacaaaatgatgcctttcaagcctgcattcatgagccattagcagagcttgaatttcttcaagactcttggattcaaggttggaagtaatactagatacaatcggatcatattcaactttaagtctacatcttgatctctgattgtacatcaaacttataacaagattgtcatagagagattttattttatctttacctttctaaatgttggtgagttgactcttcagttgaagaagccttgcctttgattgccctacgattttttgttcgagagctctccaaacttcataggaagtggaatatgcaaaaatagtaccaagaattccttttgtcatggatgattgaagcaaagacaaaaggagttgatcacgacgtttccattgcgagaagagaggattagtttgaccattgattaattttttgggaggagatacattactaaacaagatctcatcaagatcatgtccaatcacggtcggaacaacttgggatttccaggcaagaaagtttactcgatcgagtttgatagttaaagaagtgagtgaatttgagaagggattccattgctgatttgtgttgtcggagggcaagagccactaccagagctacagttgttggtggatcggaagaagacgagtccattgacatgatcaaaatggctctgataccatgaagaattatagtgtttcaaggagtcttacagaaaacttcaatgaattgatagtggaaagcttgaccagaatgtgtgatcaagatgtttatttgtagagtataatgagtacaaaggttaatacaaatctagaattgaaacgaactgccaatctaacaaactaaattgacagagaaaaaaagcctaactaattctgacagaaaactgatctggacggtttaactaactaaaccaaagttagttattattaaaagagctatattacttgctatcactcagctctctagatgggctaataacttgcatgcatgtagcttgtgttggtacttgttacggtaacatcatgagaaatgagaacatagtttcttattttttttttatttttttatgagaacatagtttcttattgaagttgctgttctcttgattggattattttgtagatttggttcacaatataccattttaatttacacacatatatatgtaatatttttcaatgaatattacctattgatagttactaaataaatttaactataaatattaattttaaaaatatgaaaccattagggtttgataatggcgaataataaaaaggaaatttgaatttttatgtttaatttagctatttaattaaaaaaatttaaaaatatcttttttttacattatatcaaaa

SEQ ID NO: 298292 - DNA, 4395 bp, Cannabis indica
ctcgaagaagaccctatctaacataaaggatattcaagatactaaactggattagatgttgttgaaagaacaaacttaatcaaaagcaacaactttcacaattttagggcaaaataaatataattttgttttgaaagcataattataaagtgttttttttaagaaagaattacaaacttgttttatatccaaaagaatgaatcaataatgaaaatggaatgataaagaaaggtgaaaacaattcaactctgaaacatgtattaataaatttttaaactcttagatagatcttgatctagtgattgattacaaattatttataaagggaaaaaaaaaatataatactcgttaaaaatgtactcataactttatagtaagtaatgtaattattattttgaatcactaaatgatctgatgaaaatatgttttgtatagatttttatgattaattttttcttacgcaaaatacattttttttattaaatgcaaatatgcaatggtaaatagtaagtgctatttttgtgtctttttctcttgttttaaattactaataaacattgcatatttttcggtttttgtttggttttgtttgcatttcttttattgttttccttttggtctttttatgaccattcatggcgcatggtggagagcaaaaagcttctactccatgatatgagtgtgttaatttcttcatgttctcaaatctgggtatgcttattttgtgtcttcttgttttcttttctccgaaaattcccaggaatattatacgatgagcttgaggttgtgggtcttctctatactgtattttttttttattgagtgtatcttgtgattttgatatttttcttcatgattttgggacaatgtatataattttttggtattttcttcataaactgagcatttagaaattctcatattgtctttctgtttcagtttcaattatcataatcatctctctttgttattttttcccctgtttatttttgtggggtccctgggaaaacaaatggagtgttgtttaacttttgggattttgaatacttttattgtgattcttcctttctttatggtatgcatagcttatgcataaagttttctcctttgagtgtgcatcaccccaaagaagaaaaaaccctccttattttggttatgactaggatgtttctcattccaggtggggttttaaggttttctttttatttaccttacccttttattaatgttttgagttttagctcataggtcattcatttggattatatattgatatcccagaagtccacacattcagaaatttatggttcttcatgattgtgtatttgttagtcttcttaaatttctttttcaaaaaatagctttctcatctatgaattacatttcaaaataatggcttttctctattgagaatcttttgtactaaaatgccattatcttttttatttaagggagaaaaagtacactggaaaaactgcaccaaacattcttaaagatgagtttggtaaggctgacattaagaaacaatcatccctatatccttctaattctgttgaaggtaaaaaaaaaatctttattgtttgtttcttaactcactactgacatatttatatgttcattgtgatttttttttattgttttattttcttcttttgaattgtagatttgaagagcttagatatggaaaaggggaatcaagagtcaacatctcctagaggagttttagatgcttttgaccctagaactaacaaatattctggtgaaaacagcaaactaatgaagttttcattatcaagggggcttttttattggaataatcttttcaagttatggaatagaaggtctattaaacgtttagcttcctttcctgctgttagtttaccaaaaacaccaaaaagaaagagcagaagtgcaagagagaatccattgttttgtaccttatatgacttcaagacttcattggtcaacttcaccatttctgaactacaagctgcaaccaacaactttaatgctggtaaaacaatgcttctgaagaaaaaagttattttatttttgaaatcatttattcattgttgtgtttgttttgttgacattggattctaatttctttagagaacataattggaaagggtggctatgctgaagtttacaagggtagcttgaaaagtggacaactaatagcagtaaagcggctgactaagggaacaatagatgagaaaacatcaggttttctatccgaacttggcatcatagctcatgtaaaccatcccaacactgctaagttggttggtagttgtgttgaagaaggaatgcaccttatttttcaattatctccacttgggagtttggggtcctacctccatggttggtctataaaactcctattcttgtttttcaaaatgtcttttagtagacggtcttttaatttatcagctaaatcttgaaatactttgccaggttcaaatgataacatacttggttggaaagaaaggtataaaattgctttgggaacagcagatggtctcctgtatcttcatgagagttgtcttaaaagaatcatacatagagacatcaaggctgataatattctgctcactgaggattttgaacctcaggtacacttcaaatttcacagcagcaagagtaacaattgaatatgatggtcacctatatatgttttccattaacttttagaagaaaagtaattgtaaagacaattgccaaagcttcatacacacataatctctccttttcaaaagtattcttctcttttccacctctttcctgctaaatgatttagtccgtttttattcagatttgtgattttggacttgcaaaatggctacctaaacaatgctctcaccacagtgtctctaaatttgaggggacattcgggtatgtaatgttaaaccatttgttttcaccaacaaaagttgtttctaagtcctctgctttttttgaaaaatccagctactttgctcctgaatatttcatgcatggaatagtagatgagaagactgatgtttattcttttggagttctactcttggagctcataactgggcgtccagcattggatcatcatcaaaagagccttgttatttgggtaacttttccattgcatactaacatatgttatcaaacatcatcacagttgggtattcatttcatctcattctatcttcttctcttgtaggcaaagccatttcttgatgatgcagatgctaaggagcttgttgatccttctcttggtaacaactatgtcccagaagagatggataggatgattttgactgcctcattatgcattgagcgttctcctattttaaggcctcgaatgcgccaggcaagtacagagtaatttcctgggagtacatgtaatacacttttgtttctatgattcataattacctaagtaagatatgcttaaatttacaacaacttctgagaaattgaaaattctttattcataattggcctatttgaatcaaagttacttatgtttagtgaaattgcttgaaaataatttcccttcattgtaaatgtgctcgagtttctgactcaaattcttagcacggtgacaggtcatagtactgctcaaaggcaataagtatgtttctcaatctggagaagaatgtaaaaaagaaccctccaaagaacatactcagaagagctcttggatgcacaagaatataactcaacaaagtatctgagtgatatgaacaaacaccaacaggttgctttcggctcttgaactcaaaatattactaaaagatgtggccttattacttgtaacaaacagttaatattattcatatagattaggtcggtcttcttagggagtgtttggtagatagtcctgtggaaatttggtgactgaatattgtttttcatggatgaacttcttttggagttccaagtaaaacgcttgttattttattttattttttttttttgaaaaagagagagaagccattgtcttagactagcccctaactaatatgcatagaaatctctcatttatggtggaggaaaaccttcatgtaaaacgcttgttagagcgagtattgtttccaatggacactcaaaacccttacctacctctacctatattgatatttatgtgtataagcttctgtttcactttgtatagactgaaatgtttggagtttgattttgaaccagcaaaacatatcaactaacattttttttttattcttctcaagttatttattaaggaaattatgtgaagtatgtagttatttttgttaagtttcataaatattggggaaattcgtaaataggtcaattacatatgaatattattaaataattcaattgtatcaaataatttcaaacatattttttaaaaaaataataaacagttataaaaaa

SEQ ID NO: 298293 - DNA, 4403 bp, Cannabis indica
ttgtttttatatatttgtgaaataatctctttttttcttaattgaaatttactacaaaaaatttaacatttttactgttaaataacttttttacaatttcttaaaaaaaaaaaattatattttactaattttatttatttttattattttaattattaattttacaatgttaacaacaataaaaataacaaataaaacaataataaaaataataagaaaacaaaaacaaaacaccatacaaataacaagaaacaaaaaaaaaaaaaactcgaaaacatcattagtatatatttttttttacaaattaaaacttataaaccgtaaaaatattttttcactaccatattttttgtaatttatttttttactttttatgaaaatattctttttctatatatattttcgtaaaatgttagatgcaaagtttatgaggaattatatggtgtactcccaaaatggacgtattttttttatgtttagattgttttgattttaattttttatatatacaaatgtaggtcatagttatttcggacattttataaattttaaagatatttataataatttatgtgccaaaaataatattcaaacaaacacgtttatttcttttattttatacacatgtaaaatagattatttgaacactaatttttatattccattttaaatttcttaaaattttataaaatataaaataactgcaatctatactatcataaaaaattaagataataactactctaatatccaagatacatcaatacactatatatgtagatgcaccatagaagacccaaagttataaaattgaaaatataatcataggaacatctatgttagttctcctaagcaaaaataatcccaatgcttcacaaaataataataataaaaaaaaaataaacactatcaagtgcatataatttttatcccaaattattttaaaataattaatatttttatcttttattctttatattaccaaaccattcttttaaaatatatttcttgttaaatgtttcttctgaaatataaaaactatataattatgttgtttttattaggttccgtttctcttatcaataaaataataaaattaattatttttatatattaaatttattaataattttttattattatttctaattatttaaaatatttattttcaagtccctttaagattatatttaaatcttggggtggtcttacacttatctctggtggcttcactcttcttttagtttgttttgccataatgaacactatacccatgctagtgtaatgtgactctttcataacttgagtgactagttttgatattttaattccataaattgagaaatgttgtttacctcaatttactatgttatgttttctcttatttgtgttcttcatatttaatgaagcaaatgcttccattaatgaagtttgataattttttcaaaataaaataaaataaagcaaatgctaacaaaaagaaaaaaagtcaagggtaatactaaaaaagacctccaactccacacaaaaaattgttctatcttttttcttttccattctcatttatttgttcagtagaactaaatcaaatgctacagttaaatgataccataattatgagttaaatacattatacatatggctttcacctcttcttgagtatcttcttccgaaaactaggtaagattcttgaaaatgaatgagggcaaccgaagaaacgccaaatgttttggcaacctttctcttcaatatcattgtttctatgtgaacttaaactattcaagtaggtcttaccctcgtaaatataacagagctgttgccataaaagaatgctcaacccgatctccactgaaacactcgaaacaaaaagatatacaagaatgagccctctagcagagagcaacgctgcagatcttaacaaagcaagcataacttctttgagagcagtagaagccatattgctgctgtagccatgaatgcgtccgaaggctctgtatgataatggtggccagacataaagacctgcatacgtagacatgaaagtgacgtagatcatactgatgacggctgaaatgaggaaggcaatgaagtatcggtgattcgctgcaccaacacaattccctatctgcataatggtcatcaagcacaagttacatgagtttacaattggaaaacaaatttgtaagagtttaaacctttgtaatttcacaaagttaacagtgactgaaattacaaaggtagtagcaatacagcacattatgacttttcgccgtttagaaaaattctgaaactagaaggttgtacaaaagaaaatggaaaagtaaatctcaactgggattttaaatcttaaggtaaactgcacttggtctaatctatctgacggatttatattatccctgttggaactgagattttacgtttttaacccttttttattcttgaccctggcagttagaccaggagacttccctgtagccccaaggtttttcagtctgtggagattcaagccttggaacaaatgcctaccagcactttccaaccttggggctgagattttaacttcaaattatggtattggtgcagaatgcaaaatagacaataccaattgataccattattagagtgttaacattgttttaaccatgtgttacctgaactaaatatcattatggccaacttgatatcaatcacaagtaaactgtcgaaattaaaaccaccttggccataactacaatccaacataactaagattgtcctatgacataaaacataacttcaaaaatgtaaggagtttcatgacgaaaagttcaaaacaatttgatctagactgaatgacaacaatttgatctatgttacatctacaatagctcacaactgtagttggtcgactaagttgtccttaatggtggatctgaacctttggtcgccgctagtcatgcaccttgcatagaccctttcatggcaaaatcgcatgtcctatgactattgggctagttatcaaagtgaaaaaaatagtttattcatagaatcataatgatgtttcgaagtgtctatgttcccaaatatttcttctttacactagataatgttgaacaagtgtatcaactcaagttgcattctgcgacctattcaccgaacaccaaagtaccctattgaagatgccccactgcttatgaatggttctttaaaattttaactttcaactcaacggagtcaaatttttcgaacataagagagtgaatgatgcagaatacatattacacaattaggatttatacgtatttaaatataagtaactaaaattagtttgttttaaattcctagagttagttttctagttgattttaggatttttcgtttgcctagataagaaggtgtttccaaattaaggagcgaatacttacaaatggacagtgatgatccatgtctagtatgcactttccacaagaacgacagtgatgtgctctaggtgactttggctttgagcagtagagacagaatgtataattctcaaggtgatctttcccaacagtagggtagcttccccatagtaccattggaggtgtgccagcacagccaaatgccgcgaaacataatgtataaatagtagttacagacaggataaatgtaatgatggaatggaatataccactggaatagctgatggagaaaactacagggtatactgcccacaccccaccacctgcattttaagaatatatatatcagaggacataagagaaccaaagaggaaaatttaaaaaaagaaaagaaaaatggaagacaatgccttcagtacaaagctttaaaatgagtaaaaagagggtattagaatcaccaaagaacaataaatttcaatcaccatggaagagtgagaatgtgagaaagctttgaggctaattcttttaaactaatcaataggaaagatacaactacaatagacatatatgaaactaagtgcaaatatagcaggaaaatgattgaagtcaaaaattacagcacataagggaaagcgctaagcaatatttttaggcaaaatgattacatctttacactattttcgatctggaaaattttaccttcctaaaggcactgatagcctagtaaagtcaaaattaaagttttgtaatcaccaataaagtttcataggagctcagtgatcatttatggaaactacacatgtttctattgctgcttttaagttttgttttggagggtttctttatactatccttttagtgttattttccaataatagtttgtttcttaatggtgaaagaaaaataataataataatggtggcaagacaaaactacacaaacacaacactacacataccaaagaggtgtgtgtgtgtgtggtgggggggtggggggggggggggggggggggggggggtgggg

SEQ ID NO: 298294 - DNA, 641 bp, Cannabis indica
gatggattgatttataattaatggtaacacagctacaagaaactaagaaataatcacgaagaaatgagggtcaaattcatagaagttgttgaatacaacataatatttttaataatagttggtactacccacttccatttgatacttactcagcaatgtaaaaatacttattaatgttaactgttaaatttagtatgctctagtcaaattttatgatattttatatttgtacaatttggctaattagtaaccttagctttaattttaaatatgatatatattttgaaaatccaatcaacaacacagaataaaatttgatccaaaaaatttacacgaaaattcaaactagactagatcaagacaaaatttgaaaaacaacgaaagctccaaaatatggtatgtctaagttattatggagaaaatataaaatagtaggagataactcagcttcatgggaaaagtttctctcagactattcacgacgtataagaaatgttctagaaaaattctaaatttatgaaaatagtcacaatcaggtctaagctcctaaagcaaagaagaaaaactcatcactattcaaagaaacagatactgtaagggtcctactccgtaagacaagtatttttgaggattcacaagat

SEQ ID NO: 298295 - DNA, 2028 bp, Cannabis indica
agagagtttagccgcaaaaaaaaagctctttttaaaatagagtctatagaaaaagactttaatgcttcatcatcacctttaaacttatttttttttaaaatagagatcttcaagtagagtaggttttaaattttttaaattttttttaataatatttttttgtcaattcatttctctctcctactaattattttttctatttttttatttaagtaattaaaatatttaaatatatactatttaatataggaaaactatatgctggaatggaaaaaagttaatgtaaaataagaatgaaaaattttagtgatgtattttaaaaaatatagtataaaatttattgtgagtgctcgtagaaatgatgtgaatcattatactgacacactggtaattttattatacttgaggctagctcaagtggctataaaaaggtgcgtgtatattagaagttttgggtccgagttctaatttatatttatacattgtaatatatattatacattgtaatatataaacgcttaaataaaaaaagactagtaatattgaaagataactataacaagaaattatacttgtgcttctaatatcattactagagtttagttattttataccttaagataaccttaagatgataagtagttttcaaaagaggatatcagattttttttaatattagttattaaattagtatatatgtgctaagatttaatattgaattgcacaaaaaagaaacaaccagaggtgatgattgatcttcgacccatttcattgtgtaatgtgctctataagataatatcgaaggttttggctaatagattaaaagaggtttttctggctgtaattcagatactcaaagtacttttcatccgggacatttaatctctgacaatgtaatggtcgccttaaaaagtatgcactatttgaagcgaaaaaggattggcaaggatggatctatggctattaaacttgatatgagtaaagcctatgaccgtgttaaatgggcttttgttgagaacttgcttctttgtatggggtttagtaatcgttgggtacagttaattaaattttgtgtctctacggtaacttacaatgtgactcacggtggacatacaatggacccaatcaatcctggcagaggtttgagacatggcgatccactatctccgtatctgttcttgatttgtgcagagggtttatattccttgttgaagaaatatgaacggcatcattggttgattggttgccttgtggctagacgtgccccgatggtttctcacatgcttttcgtggatgatagttatttgtattgtaagtccaatgatagagaggctcaaaatgtgattcatcttctaaatagttacgaattggcgtcatgccaaaaggttaatttcaccaactcttcagttttctttagtaagaacactagtgtggatgttcagaactgggtttgtggattcatgggattgagagaggcgtctgaagatagtttttatttgggtctcccctgcattatggggaggaataaaaatgtaatcttggcttttcaaacgaaaaaatgaggaagaatatttttagttggaaaactaaatttttgtcgaaagcgggtaaggaagtgttgttgaagtcggttgcctaggctttaccaagctatgctatgagtgtgtttcttttaacaaataaatttgttcaagtctagaaggtatgatggcgaagttttggtagaaatctcagtcaagctcatcgagcaagggagttagttgggttagttgggagcgtctttgtcaacataagtattttggtgggttaggctttcgtgatcttcgtgactgtaacctttctttcttagagaaacaaggttggcgattgctactaaggaagactcagttgtgagaaggatttataaagcaaggtgttatccaaatggctcttttctaaataatcaattaggacaaaatcctagtttcatttggcagagtatttggtgttgggttttgtgccataaataaaaccctttacaatctgatt

SEQ ID NO: 298296 - DNA, 4603 bp, Cannabis indica
atttctactccagtgctcctttgcctccacctccgaaccctacacgcgattacagaggatactcgccctcacctatactcatctccggctccggctcaagctccatctccgaccccttctccgcctccgccgccctacccactacacctcgtatcccgatgcttattctggttattatccagggtactactcaagcgccccgcctccgccgatgccaccagaccgttctttgatcggcccatgagctacggtggtcccagtggaccttctgctccggtggattactcgccgtacgatcagaagcccaagactgggaagatggggttggaacgggattggctgtgggagctgttgctggagctttgggtggaatcgcactagaagagggtttgaaatacgaagaggataaaattgcagatagggttgagactgacttggctgctcgtgacgattacagtgattaccgtgaacattattgaaataatggtttgtattagttaaggtatgaatattatgatgaccactaatttgcagcattagcttgcgaatttaccgtatgtatatgtgtatgtatatatttgtgttgaatttggaggtaatttgtgtgattttgattatctgattatggttatgtatgaagtaagacaatgcttcaatggttggaaacatttttaatgcttttgggctttgtttgaacgaaataattgccactcttaatcgaaattgctaaactttgtttaactttgattgtgttcattactatggctcacaatgcatattggttgttacactgaatgtagctaactagggaatctcttactgtttctaatgttttaggattgaaccaaatcaaatggcaagaagataagctcttagccaatgtaatatgttttgctaagctaaaactaataaataaagcaacccaaatagctataggcctggaataatctaagagaaataagaaagcaagttcctctaaaggtttgtttgttcctttttgatcaagatatagtttctgctgatcattacctttttgtattgttgggtagtgaagcagatgggaattgttggtttatgagtctgaattctgatcaccaagtctctttgtgtggcagggaaagtgacattgaactaattggtactctcattaatgtgtgtgcatttggtgtgaatcaataatagctagctaagctttctagtggttgagctccgtcttctccatgtttagaattttggattgtttcagttgctcttttgtccactgctgctatgccttctagttcctatttttattttaactagatggttcttgaaggtggtcttttagacttgtgtgttcttgtcagaaaggggagggttttatgctgttttattttagctatggagtccattacaatattttcattttaatgaggctgcaaggaaattgtgatttctactttgtatccattttttttgacagactattggaataaattggcagtatgtatgtgctttatagctggtatattagtaataaataggatgctgagctttctgctgcttaaatattgcggttaggcggaagagctcagtattttctttttagaagcttagcattgctttcctttatttttagaatgttttggtagaatcgtttgatattttggttcttggttcacctattccatgttatcagagagttgccattgagaaatgacttttgccacttacctctgactcttgtatcaatcgatttgatctctttaagcaatataacaccatttagatatgtgtattatgttgggggtacattgctttgttatagatgagtaatattttattaggaactgttgaatttggcactgtgtctttgttagggaccctaagtatgaacccaaaaaataaaacagaagcccatttttgaggttaagctttgtgttggctgtgtcttagatattcttgaacctcttggttatcagaccttacctcacttcctcacatgcatatacacaaaccccgaaggcaatatctgtttctgttccatcatgtttgttttaactttaaggaagccccttaagttaactcaaagtgaaaacaaatgactgcatgacaaatgtggctaagtctgttagcagatgggaacaatgagatgataaaatgcagaggatatgacaaatatgtaggggtggcaaaatgtgtcatcgtgtcgtattcatgtcatatttatgtgactcgtttctatatttcgtgtcagacgtgttgatttgtttttttaactagtgtctaattttttcaactctaactcgtttcaggcgtgtcgtgaaaaatgataaatttaagttccattagaaaatttatatacattttatgtatatatacattgaatcactaaatatatatttttgcataattatattattattattaattttttattttattttatattaaaaaaatcctgtcaaattcgtgttaagtgggtcgtgttgtgtttggcccgtctttatttcgtgttaagttgtgtcgactcgtgtctaatttttctgatcctaaactcataaaattcgtgtcgtgttcgtgtgtcgtgttaatactcgtttcgccacccttacaaaattagttgtttggtaggagagcaaaggggaatgacatctatcttaacttgtcatgattaagcctatgttcggtgatgtcaaacccaaccaaaagcaactctgcttgagctacccactcagtcaactgttcaattgtgccacccactcatggttgtgaaagagtccttcccatttcttttgattgcactggcttggtagattgttcctataaatttggcagcattggcttggtggattgttgctatatatttggcataagtgaggttttgttttgtatttatttttaatattctaaattgaaaatattttgcttaacataatttttggcacaccagtgggactcattctcctttttatatccaactatgatgactattcttaaactttaatattttggtgttgattttgtttatcgctttcaggaaaaatgacaccacaagtgacaatttacttccataagttaccaatgatctcttttagctaaggagaaaaaaaaaatcacttccacccaaattcatagaggatatgaagaaagttatactgactagaaaagcttgaagaggaaaatttgtgaaggatgtctctagaactcagcaagccttaagaggtaaagttgtgacaggcttcaaaaagaggtaaacctggtcaacgaagaggtctatttcaaaggctattaaggcggaagggaagccaacatcgaatggctgtcccataactatatagagggaatggagccagaaatttatcatgattggttctatcccaattttcttgctcactattgcttcaatgatggttatttctgcaaaggaaattgaagcagcactgccttctcgaactctgagaagcaggaaggaaatagcaacatcaccctcacgctcaccaaatccttctaaaacacgagaattggtaaggaatgggttggtcaagcttacaagcgtgatgcctgttaaccaccaaagccaataggcgacatttgttgagaacaacgaacaccctttattacgtctaagactagatgagtgatgtatgacaccttccaaagaaggctagaagtgataatgtatgagttcccaaagcaaaccgtaatccgttcgtaaaatcacatggtgaatggatgttcctttagcaatatcgaccaacaagtgtcacttcaaatatcgaccctacaccttatacgagactcgtaactcaatcaagagcccatgccatgtattcaattcccgttcaggaatctacaaacccttttgtttaggaagttcgggaagaggggagtggcacgcctaaatactctctataagacactctttgtcaaacagagtaaggaggcatctgatgacctcattgctcaatttgaaacaataactattggcaatgataaaaatatgacaatgttagtaactggggcaatcagtagtgaagcgaagatcctggaacttcaaagactactggtcgagagagatgaagtagctcgactcttaacacaattaattcatcaagttaacatgagacaaaaagagagtgagatcggaaaaaattcatcgtctttagcactgcatgtaggcaatacacaattgtcactatctggtgtgcaaccacaactagtcgatgtttagcaacaacaagacctgaaagctcttatcatggagagtatttgagaataccaagttgcaacaagcatgcctactgtgggatatcataagacgtacccgacttactacgactaaatcatgtttccaccaaactatgtaagacaaaagtttgatagaattaatgattctctcacgagcatatgacatattttacttttgcatgtggataatcttcataatcatatgcaccgttgatcagacaatttgtgcaatcactaaaagtaggagtgttcataaaaatcgaaaaactgaaaccgatcagaccgtaaccgaattttcggttccacgtcatcaccgaatttagcggttggtttcggtttcggtttttttgacatggcggtcggtttcgatttt

SEQ ID NO: 298297 - DNA, 1763 bp, Cannabis indica
ttttttattttttttttattatatatatcatattgtcctcatattttttttttactaatatatgcaaaataaatataattataagtatttctatggcccaatgacacatgttttaaacataaattagtcaaaagaaaagataagagaccagctctgtcccaaaacctagtagaataaaaaccacacacccaacatatgtatgagcaaacaaacaaaccccttcttattagctaggttctcttacaatatttattactccataatgctaaatcataaataacatctcgaaaattaaaagatcaaatgttgtcaactttcactgaaacacttgttttaaatagctagatagaacgaccaaggaaaaagagagctatttttctctttcattatttaatatcttatcatttttatgatgatatatgaatttattttcttgatctagaagcagtctctttctgtgcattgaagtatgctgcagcaactgggaggcccagattattgtcttgagaaaatgcccttgtgttgaaacagtctctcatagttggaggcctcacagtttgtcttcctctctgcttaaataagatgaacacaaatctatgaaaccccaccattggttttggagcttcataactcacaatttcctttcctgattttcaatttatttgtacaaaagaatctcatttagattttggtatcaataaacttatagacactaaaataaatatccataaatattatgttattattagtagcagcttcacaaaattaaatgaaggatgaaaaactcaccaaacaacacattagttgtaccagggatgtctgtgactatcctgaaagaggttaaaatatatagttaaattaatgaagtgaaatttaaattaatttataaataaacagtttatactgaaatattacaaaccagtgaaggtgttcttttaagtagggatcactaggacttggggcatctggatctgtcataatctttaagaaatttaacaaaaacaatcattcgttatttttgatgaccacacacatatatttatatatttataagactataatgatataaacttacaagtgtataagatgttctcatatcttctcctccaatctcaactagaggtttagagataaaaagagaaggtgtgagctcatgaccattgataagttgcctgttggaattataaatgacagtcatttttacagtagggataaaattatccaccacatctcctactattctttccaaagttaaatcaacacttagatcctcactgaaaggtttgaagactgaacttgacgacataatataattgaaagggaaaataaaaatatggaagggccgggtatgagtaagagactagtatctctattggcttgtggtagtaggagacagttgatttatgggggtatttataagcccaggaaaggagagattttatagggcatgaaagtgtaaaataccattgttttcttattaaatttttattgaaattaaatttaggttacatatagctgcttttcccaaaaggccaggtattgtttattctgtgcaaaaaagtaagaaaatgaaaggaatttgcaaataccactttatttaaatatatagtttatatgagcattgttattatgcattagtggtgcctagtactttcttgatatgtcgcattgcgattggctaacgatactccttaaaagctattatattaaattatatgggactcgatatttagttaaaccaataacgatattaacacatagaa

SEQ ID NO: 298298 - DNA, 2537 bp, Cannabis indica
tttttattcttgcacacaactaaagaaattccagttgtcagatcacatcagagtaacgtatcaagattataggggaaacttctataataaatattatacaattaatctagattaattgcccacaataagtgtacgcggtgttaaccagatcaatctaaattcgatctgcctagccagcagattgtcttctctatgggctggacttcatgagaaagcccaagagtattatttactataaactccctaatagaggaaaatggaaaacctaatgtaattctcaaactactataaaaacccccacaaatcttatggattagggttgaactctcttacaaacttttctcatgcaaacttgagaacatacattctgtgtatttcctaaggaatttacaagaaaaaggcttactgaataatactgactcgtggactaaggctagtcaacgccccaaccacgttaaaaattgtttgtctcattttacactttatcttttgattatttattcttaagttgttattattcacattctgtttctaaaaatcttgataaacacctcaaaaccctcctcacatacaaagtgagtcaccagcccaaatggcatgcctaaggtgactaagtttcctaacccatgaccaaaatgcccttacttgcttgctaagtaagctagtaaccctagggataagatgatccaatttcattaccccactaaaccttgatatttaataatgtctactaatattgtctcattaaatatttgatacaaacccgtatctatgtgactttaacgaccatttgttcgtatttccattgttattgggcataaaattatgaaaatattagaatttatgtatatcctctatgatacacctagaatttaataaaatctctagaattgataaattataaatcaaatgactatttcttaaaaataggtaccatatgacatgatacacacacataatcatataatgtaaataattaatattaattgtctactaatttcatacaataagtatgcagtcattgcagaatgtcaacctaggcacccatgcgcacctggtgtttccaggtagggtttttttccaaacatgtctctagggtctgaaacttggtcggggcatgtctctcatgtgtcctagtgtaatggctaagaagatttcacataggagtttgtttaaaactgaaactaatgcaagtcagggcacatcatgtcaacctggccgcccagtacttatgctggacccaggttgaattctaagatgtccaggtgacatgcacatcttcatggttcacctttttagggtcattgtgatatattttttttgtcttgttgaaggataacacttaaaaatgacttcgctgaatcttggtgcttacattgatgctccctaattaatgtcaacatgagtactgacacagttcccaacgcataagttgatcacactagctgggaggtggggtcagatgttattctcttctattgtcacatttaagaaatgatgtccacgtcttagcgttagttagttttattaagtatgctagttagttagaggttaacatcagttggttaagtctgttagtttccaatcctatcctactttgtttccctatatatatgttcaagcatttgtacttagtttaatcaattttataataaagattgaaacattgttcttgctctgtttctctcatatggtatcagaataatccttgcccactacttctatggcaagaccttcaactcactcccaagatggcagtcctccacccatggtcgataaccaagtagctgacatcacgtccgattcttatgctgcttccaatctcccctcctctactattcctcgaaaaatcaagcttccaggcctcaacctcaacataacttgaacccaaaaatggttaaatctcaggattagtctaccattgtcgatgatcatcacaccattgctcctcaagccactcgtcctgtcaatgacgatctttctagtcccttctttcttagcactggtgatcaccccggactcgtggttgtgcccactgttctcaatggtagcaactatcaatcatgaaaaagaggaatcacaatggctctcattatcaacaataagattgccttcatcgacggctcccttcctcagccaaaaattggtaatccctatctcaattcttggcttagatgcaataacatggtaatgtcatggttagtccactctgtttcacaagaaattgctcaaagcattatgtattttgacttggccattaacatgtggcatgaccttgttgagagatttaacgaaggcaatgacccttgaatgaaatcccttcactaaaatgtgttgaaggaatttcactaaaatgaaatccctttggaatgagttgaaggaatttcaaccaatcaccacctacacatatggtgcaataaaaatctttttagattactataaccagaatcaagtgcttcaattcttggttagtcttaatgaatcttttgttaggttttatgccctaaataaaactctttacaatctgattagttatc

SEQ ID NO: 298299 - DNA, 2226 bp, Cannabis indica
attctatctcaatttgaaaatcaaacaatataataataacgattaagatcaagatcaagatataatagtactagctatctctttacataatagattcataaattcacattctcaaatatataaaactcatcaaaaacaaaaaccttttagtatatactaaaatggcttccgtttcatcaacccttctaatattcttaatcatcttctcttcttttatccttaataattccatggctgcaaaacaaagcaacaaccatcaccaccaccatcacaaccgccattcttcttcttcttcctcagacgactcaaacaacaacaacaacccaagactccaccaagctttcatagctctccaagcatggaaaaaggtaatctactcagacccaagtaacttcaccaccaactggaaaggtccattagtgtgcaactacacaggaatctactgtgcaccctccttagacaatccacatcttcgagtagtggccggaatcgatcttaaccagggtgacatcgcgggattcatccccgaagagttcggactcctaactgacttagctctcatccacctaaactcaaaccgcttctgcggaatcattccacaaacattttcaaacctcacactcctcttcgaactcgacctaagcaacaaccgtttcgtgggcccattcccaacggttctcctaactcttccaactctcaactttctagatattcgcttcaacgaattcgagggcccacttccttcccaactcttcttgaaaaaattagacgccgttttcgtcaacaacaacagattcaccagcttgaatttcccacaatcgatgataaacggttcaggaacggcttctgttttggttttcgccaacaacaattacggttcaggaaaaacatttacgattcctccgagcatagtgagtttcgccaattctttagaagaatttctcctctccaacaccaacttgtctggttgtttgcctcaggaagtgggatttttatacaagcttaagctgtttgacgtcagcaataatcagatcgtgggtcccataccttacagcatggctggtctttttcatttggagcagttgaatttggctcataacaagatggaaggtcttgttcctcctgggatttgtatgttgcctaaattgcaaaactttactctttcttataactttttctgcgaagaagatgagatttgccggaacctgagtagtaatgataaaaataaagggaaaagagttgtttttgatgatcgtagaaactgtatccccgagaggcgtttccagaggagtgagaaggagtgtagtgctgtccttgaacatccttacgagtgtcatgattatgatcaagttgaacattatagttttggtggtaccggagtaggacctgcttttgctccagttccggcgccggtgccgtctttgtctccgagtccgacgcctacgtgatatatatgcatgcatgtatattaatgtaagcgcaggagagagtacgaaatgtgttttttctatactaaatattataattaagaaactagtaaattaattaatacataaggtggatcgagtctcaagaaatttggtttgttattgttttcttaaataaacgatgattgtttgttgtttttgttagtgttactgattgtataaattaattttcacgtgttccttcctatatatacgaatgaatatatatattgtttgtgtgcgtttatatatagcttcttatatatttttttttttgaaatgatatagcttcttatatattggttgtgctctgttttaaaatttagcgaacattgctattaggcaccagtgatgcctagcatcttctcgacatatggcgttgcgatttgctagcgatactttctaaaaactattatatcaaattatatggactcaatacttgattggaccaatagcgatattgacacataaaaatgtgctagacattacattttagcatttctctctaaaattatacgagaatgctaaaggctacagtattttgtaataattgtcatacgagtacgaggtgtcgtacttacctaatttagaaaaaacattaaactagtacccgtttagtaaggatagtttaatttttttttcttaattacggaataaattagaaaattgatactttttaatacaaacgaataataataaatcatagagaaattctgtttatgtgttgaaactaatttagtttttccattagtcttgtctt

SEQ ID NO: 298300 - DNA, 1103 bp, Cannabis indica
aaagactcgttccacaatctaattcgtagctaatcatgtcagtaaacacattttttttttcagaaatcaaccatttagtatatataaagcagataaatcttacagttacaagctcatttatcaacaaaggagacaatccaatatcagccaatttaaatcccaaagtggtggttgttagattgtagagtcccgcccatttaagcatctcctcaacgctttcaaaaatgggtctcgactcatgactctcatagtatttcaaaaaatttccaacagtttcctgcacagtacaaatatgtctcacaataactaactcaattcaatcaatctctcactcaaaatatttagtacttgtataaacacgcagaattttacctgaacaaatgtattcattttgagaagcgagaagccgtagcgaagaaccatgaggaccgaattggcgaccgaaacaatcttctgaacaaagggaaggccggagttgaagcttatggttttaaagacaaatttcttaccgtcccaaattccgaaagctggagaagcagaacaagatgatgatgaaggttctttaatggtgagattaagcagcttggtgtaattgagagtgtggaagtttttgggatggagaatggaagctccagcctcgaagaagtcgccggagacattgaccgtggccgtacggcctccaacgacgtcgtttcgctcaaagatgcggatgtgaaaatcgacatcgggagtggagtaaagccggagaaagtgggcgagtgaggagcctccgatgcctgcgccgacaatgcaaacggcggcatccggcggtggtgggttggttgctgatgagacagagagaaaatagagaatgaagatgagtgtgagccttgataacaccattgttaaggaattgtgcaaagctccaaaagctacacgtgttactcttctttacgaaactttccgttgtttaaaacgaatgattatagctaagcaggacagtgaagacttttttttttaattatttttagcataaattagacacaagtgcataataattttatttttatgacatggtcttttattattattattattattattattattagaaatttttacat

SEQ ID NO: 298301 - DNA, 1431 bp, Cannabis indica
tttgcaaaatacaagatccaaaattgcatttactttttaaattttaacaaattagtaattatatacatacaagaaacaatatatacttgtggctttggggttcaaaaaattaagaaaaaaaacgatgaaaattctaagtttaaatgtacacatgcatgcatgttattattagcacagatctaatattgatcattgtaaaaacatttaatttagagtttaattataaaaaattgaggtttaggtatcaaaattttaattgtaaaaaactgaactttagaccagaattataataagaagcattttattgatcttgaacacagttactgaacaacttcttaacataatcaaagtgaacatatgtaatatatggagctataattattaaagagcacaattgttcatcattaatttatatgctcctatccatgattagctaggtttacatgatatgattaaatattaaaactgcttctgaagattttcaacaatctttttgtccaacttaaaggctttagcaagaatatcaggattgattggagggttggaaccaaacacagtattagcagtggtagccaatccagggttttggctattcaaaacagtgaaagcaacaactggagttttgcctatattaaactcaaaatggaccaatccaattgggaagacaaataaatctcctgcgtttaaaacctttgcatagaggcggtttccatcttgtgcggatgagacgaagccaacatagagggttcccacagtgagagctaagatttcagaggcacgagggtgagagtgaggtgggtttacaccatttggagcatagtcaatgcgaaccaaagataagcctagtgtgttcagtccaccaaagttgtctacgttcaaagttgtcacacttgatccaagtgggttattagtgtctcccggactgttcagtcctgagctaaagaaatcatttggattggtcaactttgggctcttgcaaaacttaccattcgtatacactgcatccattaaattaataaaatattttattgttattattatagtatatatagtcaaccactccctcaattatagtgtccaaacatatgataaaagtaaattataatattacattagcttatatgcgcaagctccatgtcataaatatgagaaattataagaaacacattgaattgaaggtgtcaagtaccacactcgtggcatatattgttgcattttaatattgaatttcatacattttaatataatagtaatataaaaaattgctaattaattataaaatatggcatccatataatattgaacatttaaagtgccaaataataacattcatcaattataaaataaatttaactgcaatatatgcttctatttataaaaagttgttgccctttttaagtagagttaacttcttttttttttttgtttttt

SEQ ID NO: 298302 - DNA, 6855 bp, Cannabis indica
atgaattccatatcctcatttattgtataaattgtctacactaatagacaacatattaactcggtatgtctaaccgttactactcagtcaaaatcataagatcccacagtacataattcgcaattatgtctttctattccttctatgggatctcctaagctgatctactgacttagcttagtaacaagttaagtattcgtttctgatagatattcaattagagcatttcttatttccacccactaatatatactcatctcaataacttgtaaatttctacttattaacacatcctttcttcttgataatctctggaatgactaccgactctgcatcctaattaatatgaatctttttagcgtactttgtcctcactcatacgcttttcgagatgactcctcgaaagattttcatgctttaatacactaccgacttgttatattcatattgtacgatcttaattctcttatactacttaacaagatcatacatactctatataaatatgggattttcagatatttattaattatacttctataattaatgaattcatttatcttataattgtattttatatattgtataatatattatccattaaatacttacttttaaggcataaaccctaacaagcccttccatgaaggtaggcccactctagacggaagatgggcccaagtccatcttaagccgagaaggctcacttctaaaagaaagctcgtctagatccggaaggctcccaaccttaccgagacgaaagaaactaagccctccagatgagcattgggatgtatccgaagagggtcttcaaagaggcgccttcgtaagccttcatagggtgacgtggctgccatttgacgtctggtcccactgtgtcagatcttgtctcctatatcagagcacgttagtacgcaccaccaaaaggaaaaccttccttttgtctaacggtacgtacctgacacctctgcatactagaacaacgctcgcaaggcacctgtcctagaccgtgtggcctccagtcgtacggatgccttcgctccacgagccacaatcctgctagtggaccttaagtcatgtatttaccccaatagtgaccgaattttacacaaaacccctagcaggtcacgagtatgcccagatctgaatcttatcctataaataccctcttataccttcataaaaggagacgattcacttcacttttttttaggttgtcttcttctctatgttagaaaaatctatgtgagaaaatatacgaagaagttaggatttttgaacttgtaagatctgattgtaattcgtaaaactattcgccacaatacattaacttgtaagttaagattaattaacactcgaaataagtaaaagtcttcatcttatatttatttattcaaactcttattaaatggatttccaaaaatctcagtcacgacacaagaaaccttccagtgtcataagttatgataaacataatatattaagacgatgaaatattttatgaggaaacacatagtagaagagagtggacgccatggaaaacactctaactatactccacaatgccaccatcgtcaccatggactccggcgacagagtcttcatcaacggtggcatcgtcatccaacatcacactatcatcgcccttggtcaatcttcctccattcttcatcaatattcttctcttgctcatcaaattatagatctaaacgctcacatcttactccctggtatctcccccctctctctctctttctccatctctcactttcctctctttcctaactaactaaaccaaattctctctcatgggttttgttaggactaatcaacacccacgtccacacttctcagcagctagcgagagggatagccgatgatgttgacttaatgacatggttacacagccggatatggccgtacgagtcgaacatgaccgaggaagattcgtatatatctactttattatgttgcatagagcttattcactctggggtatgcaaacgcaagcccctctcttttgagctgcatatatatataaatttgatttttttgtttgatgggtatgtcgaattaggtaacttgctttgccgaggctggtgggcagcatgtttctgggatggccagggctgtggagttaatgggcctgcgcgcatgtctagctcagtcatctatggatgctggggacgggttgccaccgtcatgggccactcaaactactgatgaatgtattcaggtttgaccttaataccttattattattatttgggtccactcattttcagacatttgctataacttcaaggaatcaggcacagaaagagctttatgcaaagcaccataacactgccgatgggcgtatcagagtgtggtttggtattaggcagattatgaactccactgatcgtttattacttgaaacgagagacgctgcaaaagaactcaaaactggaatccacatggtatgtgtattactcatttctcaatatgtttttgaattaacatctctgcctaaccctatacatataatatattggagataaggcaattacagcaaatgctatgtagttgcccattatcagggctcggtcttcagactttgtgagaccaaaccacattttgagctaccccctcttgggtgtttaatctgttttggggttggattagagtttagacataaggaattgtgatttctaaggagtgttcatgttaaatattggtttgatatgtttgtccaattaggaaagttttgtctatagaattcaaacttctgtttcaattcgagatttagcattagagtattgatttctaacgttttactcttttctttaagacttagccattgatgcacaacatggtttagaaagttgagtctttagcttctaaatttagatggttctaaaaaagatgcagaagctgttattgacagatactttctcatcatttcacttcattctaggtttatttctagcaatgctactcataaaatagccaagcacgcacaatagaaagtttacatggttggaagaataacatctgcatttactgacttttttcaatcagtattgatcttttgtgaaaatgggaaaaaaaacataaacacgcaataaaaaaaataaaataatcattgctcattagtttagaaataaaaatttgggtcattttataattagtcatatgatctatgagggggctagggagggtcatggcccctctggcttttcttgttcttttgttattacatagttcagtatgctgaattttcaagatctttcaaatgtatgttaagaaaaatcttgactctttcaagcataaagtaatggatattttctggtaaggaaatactaggtgaagttgatgaatgatcttattcattatttagcatgttgcagagatagcatttgagaaccaagttgtggttgagaaaagaaaagctaatcatggaacagtaagttatttggaaaagatagggcttctgcaaaataatttgctagctgctcacacagtttgggtcaacaatgaggaggttagttgtgcatgataaagtaatattttggtcatataatagcatggaaaattaattcatgtttctgggtgttgttgtacttgtactattaccactacaatcattcagattgagtttctttcaaagggtggagtcaaagtgtctcactgccctgcttcagcaatgagaatgcttggatttgcacctgttaaagaaatgcttgatgctggcatatgtgtctccttgggaacagatggggcaccctcaaacaatagaatgagcattggtttcattttctcattccataattatgtcatgttattttcttcttcttttattactaaaagacatattttctccttgtttatgaaacttaacgagggaaggatattctacaagtaaaaattctcaatgtgtcgttaaataagagtaatgtaattgttgggaatagtataaaatattttttagttgtgtataggaattttgcattaaactgttcctgttgtttatgcctgaatttataatggaaaagaagctaaaagactacaactagcttatttagatgggttttaagaatagtaaaatcaataatcctatgatattcactttccccagatttgttttccttaccacttttttattccctttaattgtgagattctaagattagcaactgcaaatcaacaataatgttagaaaaaagaagattagttctgtttctattgcagaaattatatatgaagattaaaatggagctagttcataacttcgtatattaggaatagcatgttagccatgaataatttatcttaactcggataagccttctttctgtattaaatggattgctgttgtcattcagcttaattttatcacatcaaattatcaatgtcatgtcatgttgatatttctcaaactgttttgtgatatatgtgtggattattttatcatcatcaaattatcaatgtcatgtcatgttgatatttctcaaactgttttgtgatatatgtgtggattttacctttaccttgttttgcagttgatgaaatgtaccttgcttccttgattaataaaggaagggaagtatttgcaaaagggacaactgatcccactgcccttcctgctgaaaccattcttaaaatggcaacaattaatggtgctaaatctgttctttgggatgatgaaataggatcacttgaagttgggaaaaaggttcaacttctagcttggatcaaatttggctctcttctctctctatacatatacatacaaacctttatatataaatattattgagacgggtgtagtctcactccagaaacggtcttattacatactgctttagtgattcttaaattacttatagtatgcaacaagacttgtttggagcgaaacaccatccaaaatctatatgatatcttttagatgatttgtttttggataattttacaggctgacatggttgtagtgaatccttctctctggtccatggttcctattcatgactggtaagtgttacatattacttcttgtttaattctctaaatcactataggtaggcacaaaatcataatacattttcaagaaccccacacacatgttttaaacttaggatgtttgctaattacataaatttggtattcaatatataaaaatatgattttattgtagtattgtggtcatagttggaatatcactaagagaaaccactcttattaatcacataaaatggccataagtggaatttgacggctgaacttctacatattaaaatctatatttcagtaataaatggtatttctatgaactccataaaccatagcagatcactaagccacatgtcctattcttcttatctgttatcgtcttgggttcccatcttttctaattaaatttgtttatcgccctctttacttatctttcttttacttgtctttaactcccgtgagagttttgttaatagcttggccattgatatttgacaaaaattatatagttttttaattgttacttggcaaaataattttttttttcttttttaatggatattatgtataaaaaattattttttctaaaatgacataaaatatatatgtaccaacactcttaatgttcttgttttgctaattatgcagcatctctagccttgtgtattgcatgagaagtgaaaatgtagaatctgtaatgtgcaatgggcagtggataatgaaggataagaagattttgaatatgaatgaggtatttggtttcagatccatatttgagtcatcactattttatattagattataagatattactaattaaatgtaaaaacaaaatgataattgggcagggagagattatttcaatggcaaagcatgcttcttcagagcttttgaaaagggctggcattgaaattcctaacagaatgaatatgctctgactgcctaaacctttgttactcatgtttccaaacaaatgaagaaaattatgtaatttatgaaatgtattctgataaatatttataaactatcttatgttattttgcaaaaataaattgataaatgtgtcttatactattttgttaagtattctaaaattttattatagatttttctgacttttatttatgatattctacggtgcaccgataaactctcaaataattttaattttaatttttttatataatagcataaattgtagttatctaataagatattttgtaaatttttaaaaaattcaaaataatttaacacactaaaaataaagttgaaataatttgttgaatgtgtgcctctttgattttatgcgtgtaaaataaatagtttgaatcatactttttgtattgtaaattattttaaatttctaaacttttttggaaaatatcttaaataattacgatatatacttttatataaaattttaaaattaagatcatttggatgtcacaaatagaaatagggtgcatcggtaatctgaagaagcaccctataatattggagttttctaacaatataaaaaaaatagtttttttttttttttagagaaaatcaaaattattattatgttatttattaaaattaagtaaaagtataatcataatggactgaatgatgaaacaaaaaagttgagtgaattatggagcagaggtaactagagagtcattattaagaagtcatgaaagcataatgcatttgttaaatgatatggctgattttgactatcattggcattgagatccttcactttagggttggagtcaccaatacccactatattttccaaactcatcccaaccaattgaagaggaagatcatacaccgtcacttttagaaaaaataatccaattggagtgtatggtaaga

SEQ ID NO: 298303 - DNA, 1856 bp, Cannabis indica
caacaataacagtataaataattatttaaatatctataaataatttgataattaaacatgattaactgctaatttccgaattaaactaagcggtctttacataaagagactatccttgacttctttgtatctttgaactgaaacaccatcccttttattattcagcttcttcaactcagtttctaaattttttattcggtgatttagagttcctgtaatctctgtaccccgtcaactcaacttctcagcacacagctgcatcttgtctctgaaactatgatcatggccctcgtcccaacaatccctcacaatctcaacacaaagtggttctttcaaccaagaattctcaaaacgaaaacgtcgaataggcatgaaattattcagagtcttgggttcaagaaatataggtgtatgatcagatgttgaataatccaaattagtgagagaagcagatggaaaaatctgatgccaagtcgaggatgcaagggctctatgcaaacgtacttcaacccaattattcgagcctctccgtttctcccatgtgtacgggtgcccctgaattttagtatccgtcaaatcgcattgttgcaaaacactattgaatcccgtaatgagccattaggggtacggtcggcctccccttttatcctcttgtcttaccacattgttaatgtctccaataacacaccatggtaatttcgattctcctgctaaagtaagtaacagggtccatgtttcatgccttctacttctatttggttctccataaacccttgtaagcctccaattaccaaagtgtactgaattaacaaccatatcgatatggtttgtagtatagcctaacacaacaccatcatttactcttccacaaaagagcaattccacccgctaaaccaactaagtcaacagtgaagactccctcaaaacctaaaagattagccaagctatccaccttagacttttgacattttgtttcacataggaaaataaaattgggtctcttttgagaaataatttctcataggaattgaacactctgttggttcccaagcccctgacaattccaacttaagacattcatgatgcttggcgggcttggaaaccaagacccaccccactgaagttttttggactgtctgaaaggcccaacagaacttttccaccatcattcactatatccatgtgagcataaataatgttttcatggattctatatgcctcctcctctgcttcctcattcgttggcccattatcatcaactaagcccattcttctccttttattatcaataaaagtcagcccgttatttaaattattctcagctggctccttcacaacctctcccccatttaactcccttgaatcaagggatttttcttcccctattttacgtgcctcatttaaatgcctattcaaataaacattagtacgtgcttgatttttggataatgaatgagcaccttgatttgtagcaatcatactaagttgacgatcttctcagactatcaccagtgccaaactactgccgcaattgttactggacgaagccctaaacatcgaagaatcatttttcgtagccaaccctaacttcagccaccttgaaccgtctgcataacgtcgtcgccttggaaccgcacgtaggtccgaatcaaaactttttactattttctcttttggagtatcaaacaatctttcgcaaaatctctccgtgtggccaagaataccacagatgaaacaaaaggttggcaggtcctatttggaaatattttaccaagacctagatttactaccaagtatgttttattaacatcctaatatgaattctaaaacaatgaaaataaacacataagagttta

SEQ ID NO: 298304 - DNA, 6757 bp, Cannabis indica
tatatatatataattatataataggggattctggagtcaaaaagagtagtagagatgacaaatattggacatagtcttattacccttaaccccatgcatgttaggtgtgtatatacagaggagttggtagtagtggttgatttgatgccttaatttgttgctccctctataaattctacaactaattgaccaatctcaaagtaaagcaactaatagcttttactacaaacttcaagcatttgagtcatctcatctattaattgtctatccatccatggctaataatttattctccaaagtaacactacttggtcttatggtcatggtcatcacatttctgtcagccacactcaaccaagctcacccggccaccggggcgggtggtttcaacttcggttggggtggaggagaaggagtaggaggaatatcaggagggtattttggtcttttccctgaatactatcagtcttcatgtcctcaagttgatgacattgtcgtctctgtcttggagaaggccattgcaagggagcctaggatggctgcttctttgcttcgtcttcatttccatgactgctttgttcaggtacctaattaattacaatatttaataattcattttcatgtgtagtacgtactaaattactaatgtaacatataaatctataaacagggttgtgatgcttcggtactattggacgatagtgcaaccataggtagtgagaaaaggtcagtaccaaacaagaattccataagaggattcgaagtgatcgatgagattaaggttaagttggaagaagcatgtcctcacactgtctcttgtgctgacattcttgctcttgctgctcgcgcttccactgtactagtaagttaattaattagtaacatttattttattctttgatgaatattaatgatctagctaatgttgttttattttgatttggataatgaaacagagcggtggacccaattgggtgttgccattaggaaggagggattcaagaactgccagtctaagaggtgcaaacaaaaacattcccccaccaaactccactctccaaaaccttgtcactttctttaaacgtcaaggtcttgatgaagtagaccttgttgctctctcaggtattaatttattaattacaacattaatttcaaataataattctctttattaattaataattatatatataaatatataggtgcacacacaattggggtggcaaggtgtacatccttcaagcaaagactgtacaaccaaaacgggaacaatggccaaccagatgcaagtcttgagaagagctattattatggtttgaaatcagtctgtccaaaatcaggtggtgacaataatatatctcctttggattttgcttctcctgttaggtttgacaacacttacttcaagctcatattgtgggggaaagggcttcttacttctgatcaagtgctttggagtgggaatgataagaacaccatgcaacttgttaagagttatgcttccaacgaaggacttttctttcaacattttgcaaaatccatggttaagatgggcaacattactcctttgactggattcaatggtgaagttaggaagaattgtcgtatagttaattaattaatacctaacaaacaaaaggaagagagaatgaaaagaaaagatgatcagtactactgtgtttattcaagtctattgtgtttgtacgtactactatgttaaatttttatgtttaccaagtaatgaattgagtttccaaaagtaattaattaaagtttgcctttaatctttctttctttctttttttatttgtttatggatacttttattatatgtttttacatgggacaaagtaactttgacaaatatgcacgttgttgtgcttacctaaagagagaataactgaagaattaagtacttaataagaagcgttttatatatgtattatgtattactttttatttttgtccaccaaaatgatatatatttttttggggttgggaataaagcaagaattcgtgcaagaaagggtaaagtatctaatgttacattcttttctgtgttgatggtctactaactttccagaaacatgaaattcttttccaacctaaaaataaaataaaatgttcttttccagtttgcctttgcttcttgtttctttctctcttttattctccctatttttttttatttttcctcttgtttttgctttcattaaaaactttctcactccttaattaattacgctactttccacttttttcaaattatttgtccacctgtaacgataaagcagaacctttaaaaagaccatcttccatacacattataacttttattattaattttcactttaatccatttttagttacactaataatttgtgatcagaataactaagaaaataattagtaattaactcttgagatttttaattaacaatttttttttttcgataaaacaaaatcttgagtaagaagtaagtaaagccaagcctagtgtgcgtaatttagaagcccaaaactgaaatataagatccaaagcccaatcacattaagcccattactggccatggcggtaacgacactaatccaacagtctcctctctcctctcctctacaaaaatggtgaagcttgatggatcttcatcactaacttcacactactactaggactagctgccagtacagatcggagaagcagcagagcagtatgagatttctgaaaaggtgttaatggttatgattttttaataactgatgtgagctaagagccaagtaagagaaggaaaacaataaagtttgtttgaagattaatggctaaacataatagtagtaacagtcataatgcctggatggggatccagaagaagaggtgggcgatgatgattttagcgttgttttctctttcgacggcgattgttttcctcatgagaacagcgttcgattcatgcagtgtccccaaaggcggaggcaatggttttggaagtcctggagtaattgagaagagagatattgtggttcactcagaactaaatccactggaattcatgaaatccaagctcgttcttttggtttctcatgagctttctctctccggtacacttttctttcgtattaatcttatattatagttttctttttctttttcatatggttctgttctcggaaattggaaaagaatgaaaagttaaaaccccaaaagaaagtttaaagaaattaaaagtgctacaatgtgattgggtggctttctttttctaatgtgtcttctttctttctcttaatctcaacttttttccttttttcttttcccttctcaaaaaatatgaaacaggagggccattgttactgatggaattggcgtttctattaagaaaagttggagcagaagttgtttggattactaaccagaaacagggggaatctgatgatgtgatttacagtctcgagcggaagatgcttaaccgaggagtacaggttgagcatctttattacgtacttaatttcatcttcaaaattggcttttattcttcttatttttcttcccctctaaaatgttgcagttaattatcattcattagattcatatgaaatttggaactttggggcaatgctgactactttatttttatttttattattattattaaatttaaagtaaagctctgttttttcctttcacttaatcttcatcaaaaattggataaagctttctttatgccattatttttgtttaaaggctttgaattttagtactgggtcataggcactaatgtaaaatttctggaattcctctttttcttttccttttaatatgtaagtagtagtcttctaatttttaattaaactgggaattccaggtcttctctgcaaagggccaaaaagctatagacacagctcttaaagctgatttagttgttctaaacacagctgttgctgggaaatggctggattcggttctaaaggaaaatgttcatcacgttcttccaaaggttttgtggtggattcatgagatgcgagggcattatttcaaagtggagtatgttaagcatctcccttttgttgcaggtgccatgattgactcacatgcaactacagaatactggaaaaacagaaccaaggaacgattggggtatgcttcttacgcattgaaatttcatataacatatatggtcaaggccattttcatgttatttttatgatgatgtatgtgtttcaattttgtggtctgtagaattgcaatgccgaaaacctatgttgtacacttggggaatagcaaagaactgatggaaattgctgaagatagcgtgtctagaagagttcttcgtgagcacattcgagagtctattggagttcggagtgatgatctactctttgccatcataaatagtatgtaatccttgtcaaaatattactcttttccagcttcaacctgtctgatttaaattgaaataatttgtgcttttctctttttcgtttcccttttgtttcacactttatacctttcttattttgctacttcgattttttcagattgaagtttgaacaaaccaactatgatcttttgggcttttgtgccaattttagtagccttttgtgttctgactaattctttcttttaaagaggattaatggatgatgatgatccatgttattttttgttattgtggttgattatccatgcataattaaggcagattctatgttcttgggctctttctcttttgttgaatattctctaattgtaataagttggcaagttcttgttctcccaactgttctccagttattcatcaaaattagctaacagtttggcatcttttgaaactttatgttatatccttgattgtattttattttaattgttatattaatgagccttggatatcttctaattataggtgtttcacgaggaaaaggacaggatctatttcttcgggcattttatgaaagtctgcaagtgattaaagagaagaaattgcaggtgccaacgatgcatgctgttgtagtgggaagtgacatgaatgctcaaacgaagttcgaaacagaattacgtacatttgtgtcggagaaaaatattcaggacagagttcactttgtaaataaaaccctgaccgttgctccttaccttgctgcaattgatgttcttgttcagaactctcaggtattgttatacatggcgtttgtcaaggttcatttgtatattttggatgccttacctgtatatgattattcattttgttctatattacaattgagcatatgaagcttaaatctttttcgtgtgtaggcccggggagaatgttttggaagaataaccattgaagcaatggcttttcagctgcctgtattggtatgtcctttaccacattggcctcctttttttatatctaatttaccttttttctagatccagtgtacttggagtttggtaatttagtgatttttcgaaatgagatgtttgatagtgatgttactaatctgatcggatccaaaaccagaggagcactggaacagagaaattatagaccaaagaaaggattatattgctgaaattgaaaggaaatacagaaagtgataattcaggttcttcaaggtgacgtggagactttccaagagctcaaagctaaccacgaatcagtcacacttttcctactcctttcctaacccaccccacatttatataatattctaaccacccaaatactcatgctaacaacccagtaaatcccacacgtgaaagctatcctactacaaccaattcctaacataatcattatgtgatctctttctctctctctttgttacacacagaattagacatctcatgaatttatggcctgttttggctatttctttagctgatctatcacccaaaaaaacctgcacaagaaagacactttgctgtctcatctctggcttttgttgggctgatacaacttggattaccatgcacagtaggaaaatctagagacatcaggtgtcttaagacgattctatgttatctaaatttgtttctaaagagagacgataagggtcagctaaattaaggaaggataattgccatcctttagaagaaacttttttgtattgtctatgtagatttgttttccaactaataatagtcttctttcttttctttcgttcctttttgacaatatttcagggaacggcggctggaggaacaatggagattgttgagaacgggacaacagggctgttgcatcctgctggtaaagaaggtgtgattccacttgcgcgaaacatggtgatgatggcgacacatatagagagaaggctgacgatgggcaatcaaggatatgagagggtgaaggagaggttcttggaaccccacatggcacatagaattgcttttgttttgaaggacattttaagcaactcaaaaccagtcactagcacttagttctcccactttcaaacatggaacttaaagtagtagcactatctgcaagtaaagaatgaggcaatgcctctttttttattgcatttatttttgtatcataataaagataagataaaagatatagcgagaggaaatttggtaaatgtaaaatgagtagttgtcttgtgagaatgtaagtcatctaccctctttttaataggatggtgttataagggtagcttaagagtttttaaatacttaaacaaatacgacttacattttctctttttgacaataactgttattttttaattctacaaacaaaagaatgaagataggaggcgtttggttgggagg

SEQ ID NO: 298305 - DNA, 1930 bp, Cannabis indica
atcaaatgtttctttagctgcattcataaattctcaatatttacaaaaatgtaattttcgtctaaatagactagatctgttttaaatttattaaaagcaggtttgaacgtagctcatattacatgtttccgtctgaattccatgatttagaatctctgctatttaagacactaacaaattttatacttacaaaactgaagaaaaattacacttttgtccacatatgtgtgtgaaaaattatactaacaaagtaacttttaccagcgcattttgcaaactgcgctggtaaagaggtcaaagttttaccaacgtacatttgcagtgcctaaaatctaacttttaccagcgcatttacgtactgggaaaagtcatttttgccagcgcttttcattttatgctggcaaaagttctaatactaacattgatttgcaaacccccttttgccaacacatcacaagtaaattctattttaccagcgcaataccaacttttgcaggccagcacaaaaatgtgctggcaaaagtgacatttcttgtagtgtcatacctaattgtaccaacagtgatataatacattggaagatactaaacactaataatatcttttagtatttctctttttaatttaatgatggcaagggaccaatattatataaataatgataggttaaaatttatgaattttatcgttaatgtgaccaatattatagaattacactaatatctattctatataaagtgtgtagtttgcgaactaggtagatgcggttagtgctgatttgtatggtaactgaatgggtgctcaattagaaatcatttatttatgttgtattacgtgtgctccagtagtggagattgtaaatagataaagtttttagttagtttgtgtaaatattccttgtatatatctaatcgcctaaatttagagggttatctatggaagatcagctcgctttttaattattattaaattttattataattacactataatatttttaaaatcttttgattagtaaaagtgagaacaataaataaaaaacttgccttagatattaggacattacaactgcaatatataataattatgatgatcataataaaagcatatccatagtggtcctataatacatttaattcatcaaagctttatttcattattcatgcatatccttacaaagagtggaagaatgatatctagctagctagggtagtggtcctataatatatttacgtctttcactatcaagacagaattgaacaactctcttacttacccaccactcatcagtatggaaagctaattaagtatgcagggatactgctcaatcagatcttgctatggcttcgatgacttactcggtaatcggacggacaactcagatcggagaaattcttaaagctagagttaaatgcagagtttgacctcggtattaattttctaatttttcatttaatattgattaaataggatattaatttaaattaattttaggatcttttccatttttacacttctaaacaattttttttttctatttttacgaaattctaaactagcgcgcaacctaaattaaacaaaaaaatcgtacagaaactgttatttttgctagcgctacaagcactttaaaaatccaaaccgcactacaagaaacgtcacttttgcgttagtaaaatagaattttctgtgatgtgttggtaaaaggggttggcaaatcaatgttggtattagaacttttgctagcataaaatgaaaagcgctggcaaaaaatgacttttcccagcgcataaagacgctggtaaaaattagattttagccactgcaaatgtacgctggtaaactttaaccgctttgccagcgcagtttgcgtaaatgcgctagtaaaaatacttttacctagtgcagtagcgaactgtgctggtaaaaagtg

SEQ ID NO: 298306 - DNA, 2000 bp, Cannabis indica
accggagaatgtttgctgacgtgcacacgagaaaccagactatcgtatagggaaggtacgtatccgagtatccacattggaaagcaacaaagtctacaccaattcctacccgttactggttttgacgaacactggattaaaaaaaaatgggggaaatcgaggtggccatacggtttgcctgcccgtctttgttgcccgacacgtgtgcggcttacgggcagccattgctcccaagattacactatctccgcccgcttggggtggctcaacaagaggctttgcgtggggccgcgacacgaatggttgccacgtggctcgcgagatccgagccaccgttggggtccgaagttgttgggtacatgttggatgctgattcgcacacttggagcatgagaaaaagcaaagctaattggtttcggatcgtggctgtactcgcttggctagtcgggttggccaaatggttagatgatatccgtagatggaggaacccggttacaacggtgttagttcatgtcttgtatttggttcttgtttggtacccggatttgattgtcccaactgggtttctatatgtgttcttgattggagtatggtactaccgattcagacccaaaataccagccggcatggatacccgactctcgcaagccgaaggggtcgacccggatgaactcgatgaggaattcgatacgataccaagttcaaaaccgcccgatatcatccgggttcggtacgaccggttacggatattggcagcccgagtccaaactgttttgggtgattttgcaacacaaggagaacgagtacaggctctagttagttggagggacccaagggccactaaattgtttataggggtgtgtctagctataaccatgatactgtatgtggtgccacccaaaatggtggccgtggcattaggattctattacttacgccacccaatgtttcgagacccaatgcctccagctagcttgaacttttttaggcgccttcccagcctttcagaccgattaatgtagatcaaaaaaatagtagataattagacatatattctctatatataatgcaaaaaattgttgaggcaaaagaaagtaacaaaattcagaaaagtgattccttaataaggtttttttttaatggctgaggagtgaagaaaaaggagtgggggagtgagggggttaaagtagagaaaagtgggaagttgtcatgatgttctttattattattattatttcaaaaattttggtgtttgaattgaatattattgatcattgactaactatttgagaaattgaaataagagaaaggaggaggcagaatgcagtttaggtggggagaggaaattgtattgagaggatttgagaattggcagtgagaacttgttgtaatgatgttttggaaagtatgaacacacttgttttcttttcatgatatatatagtctataaaaccatttatttttttattaattcttttactacaatacttgtgttaataaatctctctttcattcttttttggatttttatgaggtgaataagttctggcttttgccagcaaattgccacttacctagagaaatgtatcttggttttaagtttgtcatgactcatgttactttctcttctttgtcaaacttgtgaagaagcttatcagagggtagggtagacttcaacaattaaactccataatttctttcattttccttcctctagaaaagtttgaatttcttcactaccttattatgggacatgggtcaggactcaggagccatagccaaaacttcttatattcacacttaaaaggggtatgttattgaaaatttcaatattccgatccccaattttaaaaacatgaacaaactactgacttagagctcgttcggttttgttttcagtttttaaaattgtgtttttaaaacaagaatagaaaataatttttgtcattttaaaaacttaatagtgtttgacacaaattttttaaaactatttttaattt

SEQ ID NO: 298307 - DNA, 4274 bp, Cannabis indica
atgctctgtacgatagcatgtcgtgggagacaacctttgacgttgtacctgcaaaagcccggttactacgtagcctgttttggcgcatcttcgagatgccttgatccttctgggtaaatcccatactctttacgggagcaggcgacttcggttcccgggactgggaagacttcagctcacggatgcctcttgcattattggtagtcgagggactcctagtcacggaggccctttccatgagttggggcctttgttctcccggagcattagttgagaaagttggtcggctaatgacttcttagcctttcttaagtaaaatccacgtgtcatgattatgaaaatgcgaataacaaagtggaagagaggtataataaaatattatatttttttggatgatttgaagattttttagcacatttaaaaaaatactaccactactttaagtatatatattttaaaaaattatacataaaaatatatttaatattattttcccatataattactaattattttgccaaataagatattaagaatttatatgtaattactaccttatatccaaacacaccttgcattttaaaatatagtgtaattactagattgtgtaattatcaccctaataattaccctacctagtaattacacagttacttctaaacacatccatgggctatgacccatgagaattggagagtgtaattaaaacattacatggtcagacaaatatgctaaattgtataattgtttctaattacatacaaattcaattacatgaatttctaaacataaccaatgtaaattatttagaatgtttgaaaaatgctgaatgatattataattaaaagaaacggtatgaaaaaaattggaaaaatattcccgtgtatgatttcttccacgctgtattcaataaagaactccatgtaaacaaatgaaatgatggttgagtcctttccttaagacggctacaacaacggatattagggacaaaatggtattttcatctttcctttctcggttccctataaaagttcctgaacctttccctctccaattttaaaccctctctccttttatctgagaagtcggaacgccaaaagaaaatcaaagctcgaagaaggagaagacaaggaacaatctatatatgtatgtatttatatatctgtagaccgaaatcgaaatagaagaagacgaagaaccagatcagagttcagtacttgttgaagaataacaaagatgtttacaatgttcagaggaaaagaaagttctcctagtgtttcgcctcaatcgccgtctccgtcgtctgttgcaccgtccatgactggaccagcgagaccgcttcgactggtctattgtgatgagaagggaaagtttcggatggatcccgaagcggttgccacgcttcagctcgtcaagggaccgatcggggtcgtttccgtctgtggccgtgctcgccaagggaaaagctacattcttaaccaggtgaagtctatggttttttcgtttcttgctaatgtacatgaaacatgctcagtatttttttttgttttgattttttgtttagggtttatgattttgtccattgaagttgattttctaattttagtgattttaggattaggaaagtacagtgtgcgagtttcctgagtgtttttgttttcttaaattgccagaacgataataccagactcaatttattaagtatgctttactttttttttttaaattgtagcttcttgggaggagcagcgggtttcaggtttcatcaactcatcggccatgcactaaaggtctctggttgtggagtgctccaataaagagaactgctcttgatggaacagagttcagtctcttactattagacagtgaaggcatagatgcttatgatcaaacggtcagcttctaattatttgcctagaaacatgcttttgattcaattatatatttattgtaagggagtttctgtttcctttcagtttaatacatatagatataaatgtatatgatgctgttgcactttatggtgttcaatagttcgggtgtcctgacattttttttctttgccagggaacgtacagcacccaaatattttccttagctgtgctattatctagcatgtttgtttataaccaggttcgtacaacttattttggtatgacaaatgtctttgatttagtagggtcttactgagaaggtttcattataaatgtggagatgggttgtggaacagaatattatgcagtttgatgcgatatttgatcttactcaagaagtttcatttcattaatctcaaacattttgctttaattagatgggtggcatagatgaggctgctttggatcgtctttctcttgtcacacaaatgacaaaacatattcgtgttagagcttctggagatagaacttcagcttctgagctcgggcagttctctccaatttttgtgtggcttctaagggtaatttcttcatttcttattggtctctgtagtaatgtgatgtagggacaattacatttttattttgttcttgtagatgctgtgtaaattgttactgttattatttggtgacaaagggttctattttttgtagtcttcaattgattcaatatgtataatctatgttgcaggacttttatttggatttagtagaggatgatagaaggataacaccccgtgactatcttgagcttgctttgcggccagttcaaggtagtgggaaagacatagctgcaaagaatgaggttctatccaactctaactttttactgaagcattatgacgaatcaattgtaaatgattttttcaagaatttcttgtcaaagtaaatacactggcacataaaattacactttccccattggagattctaatttcataatagaattgatcaacagattcgtgactccatccgagctctgtttccagatcgagaatgtttcacccttgtgcggcctttgaacaatgaagctgagctccaacgacttgatcaaatttcagttagtatttatggctctaatgaattctcagtctatcttttggtagtggtttcttttaatgataaaccttattggttggttggttttctagatctcgatggtttacatttttcttttattaagttggtagtcatgcaattcgctatgattgttttcaaactttatcttttggtagtcatgcaattcactacgattgttttaataaattttctgttagggtgtgtgctgaaacagtctttttatatgcagttgaacaagctaaggcctgaatttaaatctgggctagatgcattaacaaagtttatttttgaaagaacaaggcctaaataagttggggcaaccataatggctggtccaattcttgttggtattacgcagtcttatcattttaatactactgcaatggtaatattattttatagtgtgtatataaacttgaaatgcagattctattgttgttttttggtctatgtggagtttttctaatatttatatatacagttttcataatgagtattaatatataataatgagtttattgtttattgatatttgcttgtaatgattatatatatatgtatatatatatatatgcagggtgctaattggggctcaggggagattataatgtgataacgaggtaattgacaagtttgattttagaaattaacaattaatttagactaaatgttgttacttaaactattattatacatatttaggacaaagaccacaacatcaaaagaagaatgtgctttagtttttttactgtatgaagttattatataaccttttcatcttactatatttgtgttaatgatagtgtattttagtgcaaaaaaaaaaaaagaaactttgagttggagcttccttaaatgaagtaggaagagcatgatgaagaaaaataaaggtatatgggataagtgatatctaaacacttctaagagttttgttctaatatgtgtttttttgtttcctcaaatcttgatcataactgttactaaattattgatgctaattgtaaagtttttattattgatcaagtagaatgttacttttgttataatacatgagtaataagtgttatgattgttgctattaaattttgcattatgtaattatagttaatttttaagatacatgatatataagttttaggattgtttatattgataattttagtattatataattagttaatagaatcgattattaattttatataagttttataaatgttatttaaacttttcttgtattatttatttactattatataa

SEQ ID NO: 298308 - DNA, 4479 bp, Cannabis indica
agtcactctccttcttgactgaaaactagagccttctactggtagtatctcttcaggtgttcagcattccacgctcgaggcactactgtgtcatccattcgagctaacttgtacgttccagaaagaactacttgggcgacgcggtaaggcccctcctaattttcccccaatacacctgctgcgggatccctggtttttgggaggactttcctcaatactatgtccccaactcggaaggcacagagccgcacccttgagttgtagtattgggccgccctctattggtgcactgcgacccttatttgcacttcttctttcttttcttctaataggtttaagttccccgccatcacctcctcgttccgcacttcttcaaagtttttcaccttgtgggagcttacctgcatcttgataggtagtacataacagccaaacaagtcgtttccttcatcaataggttcatcattttttggtttggggtcccctataagatcatcactaataataggacgatagcgtacttcacccaggcccttcctgtgggtaaggatcctatcagatctatcccccacacgtcgactataattcgcatgcctgtgacatttatcgcacttcttggcaaattcagtggcgccctccaaggagggccaatagtacccttgttgcaaaatcttttatgacattgagtatcccctggcatggttccagcactcctcctcatgtatagcagacaagattcgtagtgcttcttcctcgcccacacaccgcaggaggggggtggaaaatcctcttttgtacaacaccccatccatcaccacataacgggtcgccatatacactaccctcatagcttctttattgtcggtgggtaactctcctctttggatgtagttctgataggggaccatccaagagtccttactggtcaccacgtatgcctgctcctcttcgatggtaggcttctctaggtactccacaggtattgactctaaggtgtcaatatcccgtgttaatgccaacttagccaatgcatcagcattgacattatcatcacgggttatctgctccattatgtagtgttgcagttgtcctaagtaatttttcactttggctaggtacgccaccaccctattccccttcacttgatattctcctttgacttggcatacgactagctacgagtcactatagatatctagcttagtgattttttaatccttggctgaacgtaggctggctagtaaggcttaatattcagcatcactgttggaagctatgaacctgaatcttactacggaataaatcttctgccctccaggcgcggtcataactactcctgcacctgtgccgccatcgtttgattccctatccacatgcaacttccacctccttgtttcatcctgcgcttccttctctaccgcttctgcgtgctctaacttgtcaggctggtaggtgaattcaactataaacttggtaagcacttgcccattgatggttgtctgcggtacataggagatgtcaaattgacttggttcaattatccattttaggaggcgtcccaaggtctctaacttgtgtaaaacttggcgtaagggatagttggccagcatggcgattgagtgggcatgaaagtatggtttcagtttccttgaagccatcactagtgtgtaagccaacttctccatatccaggtactaggtctcagcgtccaccaatcttttattgacgtagtacactagttaatgttgtttcctctcccctcttactagggccacgctggtggcgtgtttcaacacacccaagtaaaggaacaacggttctcctttctctggttttgctagcagcggtggctttcccaagtgttctttgagcttttggaaagtttcttcacattcctctccccaggttaactgcttgtttcctctaagtgtaataaagaacggaaaacacttgtcggctgaccttaagataaatcgattgagtgctgctaccctccctgtcagacattgcacttccttacggttcttaggtgattccatgtctattagggcctgtatcttttctaggttggcctctattcccctttcattaacaatgaagcctaagaactttcccgacaagttcccaaagatacacttggcgggattgagcttcatttgatacttcatcaaggtggtgaacgtttcatccaggtctttaatcaagtcccttgccttttttgacttcaccaacacatcgttcatgtatacttccatattgcgcctaaactggttggtaaagattttgttcacaaatctcttatatttggccccgacattcttgagaccaaaaggcatgactcgatagcaatagagtcccctatccgttatgatggatgtgtgtttctcgtccgctgggttcatggggatctgattatagcctgagtatgcatctatgaagcatagcactttgttcccagttgttgtgtccactgtctgatctatgtggaggagtgggaagctatcttttgggcatgctttatttaagttagtgaagtccacacaaaccctccacttcccgtttggcttggggaccgggacagggttcgacacgcacaccgagtggaaggcttcccatatgaagcagtgcatgtcgagtttgtccacttcctcttttaacgccgcatatcgcactgagttaagggcccgcctcttctgacttatcggtcaggccagcgggtctatgtttaggtggtgagatatcactgtggaacttatccctactatagcttcatgtccccaggcaaagacatctaccatcctcacaaggtattgctttagctcacgtttgaggtcctcgtaaagccctttcccaatcttaagcactttcaatagatgctcagatatccccacttcttcagtttctttgttgggctcaacatgaacctcctcctccctcagccttgggttcaaatctaccccggttctttgctggcatgcctccttgtcgcaaacaaccattgccatggagtcctggggttttttggccaagggaagtgttgtagcactctcttgcctctttctgctccccccttgtggtagcgactcccccgggagtcgggaacttcatggctaggtgataagttgacacaattgcctttaagtggtagagcgagcgtctcccaagcaccgcattgaaagctttcgaactttccaccacaatgaaagtggccatcacagtcacctattcgggccgctcccccatggtgaggggaagctcaatcattcctaggggatggattgaggcccctgtgaacccatatatgggtgttgcgcatggcttcaaatccttcatgcccaaccccatttgttttagggcgctccggtagagtaggtccatcgagcttctattgtctacgagtactcgatggaccctagcattagccaattggacagccaacaagagtgggtcattgtgggcaaagtgaactcctcgtgcatcttctttggtgaacgttataaagtacctctcctctttcgaattcttgggtggtctttgttccaagttcatcactataggtggttgtctggcttccctgacgtacctgtctctccccttgtgagtgtctccacctattccaagtcctctgcagatagttctaacatctcttatcaccttaggggcctatgggtgttctcgcctttgctcctcctgccctctctccttaaggcgtctttcttctctccggtagccccccaagtaccctctttggatgaggtcctcaaattccattctgaggtgggtacactcttccgtggtgtacctaatatctttatgaaatttgcagaatttattgggatctctcttgaacggcacctggtgttcgtttcccataaagatgtgttccctggaacatgtgagcccaatgtaatacgtgaactccctacgtaggggctcctctttccttctaactctcttattttggtcgtttttacctctatcaaacttcctcttccttcgtgactcttcatgcgtgccagggttggccaacccaccgggctcgctctttcccttggtgagattttttgtgcccatccttgacctggatgtattttttggccctttcgtagaaatcttctacgccatccaattctctcttgagcatgttgttccacaacttactctttagacggacacctgccgcgatggccatcttgtgctcatcttttgtcagcctgcctaccctggcttcttcagcattgaagcgctagatgtagcttttgaggatttcaacctctctttgcttaatatttgccaagctcgccccagggatagtataatctcaggacgtgcggtgttgggccaagaattcatcagtgaattacttccaagaggtgatggatccgagcgccaaacttttgaaccacttgtactatacacccttgagtgtcaccgcaaaaaactggcaccttgctttgcttgttactgttgggttttatg

SEQ ID NO: 298309 - DNA, 1908 bp, Cannabis indica
aaaaaaaaattaaaataaaaaaggaaaagatgatatgatatgtatcacgtttttgagctaatgtattaatgtttacgttttgtactttctagcttgttgtatcgtgtcgtgcttaaattcatatttttttttgtcctgcctaagtacatattttctcgtgttaaatcgtacttgtatctctcgagcttgtacctgtttcatgccttgtcaaaaatctgagcttagagcacctatagataatgcccctattggagatacttgcactgttttttaaatatacaaatctatttttcttaaaattttcgagttttcaaattagacattaatttcacctttctctaccatgtccatttgtttgctattaagttaaccattgatatgacatgagttcatattttgaattcacctaatttgatagtcggctatgctttcacctaaaaggatatacatctccaaaaaaaaaaaccatctagctaaataagttgttaaaaaaaattatttattcattcaaataacatacacaactaatttataatcaatcacattgaccgtccaatatacatgattaaagacactcttaaaaatttaaataacatacttactacattcactaacaatcatcataaatctactttcctataacaaattaacaatgatcctagttctgtttttatttttttttcctgttcttggtttatttatactttaaccaaatgagctggttagtgacaagtgaatgatttagctagaaaccactactaaaatatatattttactagtttagaaactatctattattagtttagtatctagttaccttgattactggtgttattattataattttgttggtgcattttaattttaactcaagttcttatttcgtagattcttttttaatggttattattttaatgttgtctgttaattcttgacaagctcttcttatctacaaatccaatatttttcttttgttgtttattttttggtcttagttaataaattcctttccaaagtatacatattaaccacttctttcatcattttaaagagatcagccaacaataaatacttttcaacattatataggttaccacaccatacgtttgaaaaaacaaatcaatatttgttcacattttaataacttgttttttatagccttgatattaattttggagaacctgaaaatgcaaagggttgttggaaaagaaggcatctaaattaccaacagtaacttgaaacagagcctcaaaagattcgagagtgaaaacgccccaatgtggagagagaaccacattgtccaatccaatcaattcctgaggaacatttggttcatcctcaaacacatccaaaccagctcctccaatctctcctcccaccaaacactcaaccaattccttctcctttatgatttccccacgccccacgttgattatcactccatcttttcccaatgcacacattactgttctgtcgatcatgtgccgtgtttggttattcaaactacaacatattattaagacttcattatcattagcaagctcacaaatattgttgtagaaacgataagaaacggagtctttcttggtccttgagttatatgaaatcttacacccaaaggcttccagtctcttcgcaacttcactcccgatccttcccagtccaacaattccaaccggcttacctcccaactgcttatcatcaaaattaatagggcattttacaattttgtatatattattttaattaattacaaaatatgtgtaaaaaatttattatcattttcccatactaaaaacttttttttcaatttcatcaaaaaaaaatttcaattttttttaatatatatagtataatattgattattatatatatatagtaatattggatatgtttatttttatgttt

SEQ ID NO: 298310 - DNA, 2035 bp, Cannabis indica
gagagagagtccaagatcataatgagtgtgtatggagggatgtaatgggagtataactcttgaagtgatttccctcaatgtgagatatttctttgtaattattcattgtgttgagttttattcttagatatattcaattatgtactattgactattcaagcaataaatatccatgattcattctcgagctaagtttattcttgtccatttcaattaagttctagttttgatattgtgattagttttagttaagttagtgcattcttaaatattgtaactcccgtaacaacctatttttgagagtgagcattcaccacacctatcatggtcacaataagcacattgatgtttgattttattttgttcattaaattatcgatgaagggaatgttatactctaaaaatttgagactgtagataaccttgcagatatgcttacaaaagtggttaaatagagattaagtttcaacactacttaaacttgatcaacatctctcgaacttagagtgcctagggcgcatgtggaggcatcacttatgcagggacagaggtagaagttaagaataaagggggccaaaagataaaaaaaaagtaattaaaggaggccaaatacatattttttgaaaaaaataaaatttggagctaaattagctccgtccctgcgcttatggttttttctccaaggtagagattgttgaatttggctcaaaagtgaaattttttaagtttcaaatatatggttcaataatcaagagatttgaaacctattattttgtcaatgatgctatgcaatatctattgacttatactctctcatcaattacatacggttgggaaataagctacatctcattaattacacatgattgggagatgagttttttcttcaataaatatgaaactttttgaagagcatttgtaatcggttcaaggttgtgggaaatctgagagagagaacattcgtatagtcaaactttgaaagagagaaaatactcactaagtatgagtattttatgagcgtaggaaaatacttttggaaacactttagaagtattattaattaattaataagaaatttgtattttgtatattttctacttaatttaataatatcagttacttaattagacgaattattgaaccatataattatgtatattttcactgctttgatatatattaccattatttattactttcatggacaatatatatatatatatatatatatatatctccatgagtgttataattatatattaaaaaaaaaatatacacaataataatatttcattattcttcctatacatagtaaaaatttgacgtgttcgagttataatatagtacatttcatgaattaatcttgaatggtaagctctagctagtacaattatatatttatatttagaataagaaaaataatatgtatatttatcatcataacaatgaaaaagttagaggaaaaacgtttctcacatcacatgtgttccaataatatcattatagatatatcatatgttatgtgtatatataatttatatgtataaacaatattaattgaataaaataataaaatggacgttgttcaagccgttgattgatttctcatccaatattaattaattagtttatttattttcattgtcgtgttgaaactttataagcgtggattttatacacactataaatattgaccaatatatattgagacaaaaaaaatatatataattctcatcatatatcatatatagtatgtatatttattatgtgttggaactaaaattagaaataatgtgaaaaacatggccatgaatatatattggtcggctcaatttggattttactcaaaataatcatcaaaatttatagactggacatctttttcagcactacgtatctatatatatatctataaactagcaaaaactacgtgcgaggcacgtatactaaattttatgctagtttttttctatgttatttgaaagtgatacaataaaaaattaaagaaaaaacattattagttattaggtgagat

SEQ ID NO: 298311 - DNA, 3618 bp, Cannabis indica
  modified_base (3602)..(3602): a, c, t, g, unknown or other
ccagaagtccagggatatatggctgaaattgggagatagaaattcccgatttttccatgcctcagttgcagttcggaaaagaaggaatcatatatggaggttgagagacaaacaagacgttctatgggaatcgagaggtaaaatggaaggaattataaactcttatttcaatgaaattttctcttccatcgattcgaagttctctgataattttgacagcctatttcaaaatcaaattagccatgaagtgaatgaggagttaactgccttaccctcaccagaggaaatacgaggagcagtttttgaaatgcatccgctcaaggccccaggtcccgatgggttttcgagttgcttctatagaaagtattgggagatcattggtccgttggttattgattcaactcaggaattctttcgcacgtgaataatgaatactcaggtgaaccacacattcatttgccttattcccaaggtagatcaccctgagagaattgaccaattcaggcctataagtctctgcaactttcaatacaagataatagcaaagatcttttccaatagacttcgcacgattatggaggatctagtgtctccggtgcagtcagcattcattcctgggaggtggatcgcagaaacttcaatcttaactcaggaactagtgcataaaattcgtcgatcgaaggggaaaggaggactcatggccattaaattggatatgcacaaggcctatgataaaatggagtggagatttcttgacagagtactcatgaacgaatggtttcaatgaaaaggttagaagccttattatgacttgtgttacgggggtttcttattcggtgttactcaacggaagcccattgaagaagtttgctcctttaagaggcctccgtcaaggggaccctttatccccttttctttttctgctgtgtcaggaggttttatcaaagctaattttacaagcggaaggacaaggaagaatacatgggattaagattgctagagatgcaccaagtgtctcccatctaatgtttgttgatgacacaattttgttcactcgagcaaatgttagagaagcttctgagatcatgaaatgtctatcaacgtacgaagcttggtcgggtcagacgtgtagcaagacaaagtcaagtgtgcttttctctcaaaatacactaaggaaggcagaggttcttcaggcgctgggaattgatcaagtcaatggccaggaaaagcaccttgggaacccttttgtgtttaaaagaaggaaatcagaggagtaccagttccttaagaataacatgagaaagcgattaaaaggctggaagacaaagttactatcctacgcgggcagacttacgttgattaaatcggtaacatcttccttacctgtgtataacatgtccacaatgaaaatacctctatccatatgtcgttctatggatgccatggtcaggaaattctggtggataggatcagcggataaggatagattccttgcttacaaggcttggaataacatctgccagccgaaatcatctggggggcttggcataagaaggtttgaaaatttaaatagggctttattatacaaaatcgcttggactgtggctcagaaggaaaacaggtcgtggattaattttctggttagcaagtattgtagatatgagaacttctggacagtctctccaaggcatagtgactcttatggttggaaaaatgtgttggaagttcgaaatgtcatccttaaaggatctcttgctatggcaactgatggaagtctgatagacgcatggagacaaccatggattccttggttgaaccatgaagaattcggccagctgatggaacaattgaggagaaatagattcactttcaaaacactagctgatctgtctgatggaacggcttggaatgaggaaattgtatttcaagtctttagggaaggcatgggaaagagaattattgaaattccaaggcttccaccaactcacaaagatcaagttatttggaaagaaaacaagagtggagccttctctgtgaagagtgcctattgggttgaccagggacaccgcatgaatcctaaaaaggaaatttggaaatggatttggaaaggtgagatgcacccaagactctcagtgtctttatggagatttctcaatgaagctattccaactaggaataagttgccttttgtggagaataaagagcgcctgctatgtggtcttgaacaagaaacttgcctccatatatttagagattgtgaagtctccagggccctctggatctctggtatttttcctttgacgataggcaacttccccggatcgtcaatgatagagtttgtggaacttgtgatgaagactatcccgattggtattcgtcctaatttcttaatgcacatggcatgtgtctttgaagaaatatggagattgaggaatggaatcatattcaaaggaggtcagcctaatttatcctcatcaataatgcgtgttagaaagaactatggagattttatgagtataactgagagggtagagccaattcctatgcctcttctagaatccccctgtagctccagaagggacttcgatgtggttcttgtcactgatgcagcctggtctgagggttcggctgggttggctgcaattttaatcaatgtaatagatggatcctggatgtataaggtggaaaaggcagccgctggttctgcactggaagccgaaacaaaagcaatctggatggccatttcttggatcaagcaaaggacagcagcaagaattgtggtgtgctctgattgtttaacagcaattcaggctttggcaaaaagaaaatgtgtgcctgattggcagttttttaatatttccctagctattttagatttagttaacagttttagactttgtagtttcagatatgttaagcgtacgaacttggtttatgtcgatgggttggccaaaagtgtgagaacttctgcactttcagctggtgtttatgtaggggagggcatttcccctgtaatgcccattttattttctcagtaatgaacttattgttccttcaaaaaaaaaaaaaaaaaacacactctatacataagctctctctagctaatctcatcaatgaaaaaattagctcaaactaaacattatgttcactcaaaatcaaaaagataaagaaaaataagagagagttatacaaaattagtgtataattttggtaagctaaattgtgatcctttacacttttccaatgctcctatttatagaataaatttacttccaaaacacatgatttagtggagaagtggctaaaaatgctcatgggaaatgggaacatgggacacgtgctggctcaagagaaactcgacagaaggtgggaatgttggattccaaccaatctttactcacctagcgtatgtttcaccaaacaaaaatagtgggcttttaataacagagttaatcttgggcctcagttttactgaagggaattaaagcccatgttgattgaggtgtcatgagcttggagtcattcaggtgtcgtgtataattttgcaaggaaacttacaaaaaaactggaatttgggttaatttttataaaatactgtcacncggtaaatattttcaa

SEQ ID NO: 298312 - DNA, 8442 bp, Cannabis indica
aaaaaaaaaaaacttagaaaaatgcaccttagtttttagagtaatttgtggtataaatactaaatttgtaaataaatacttaaatttaatttttagctaataatatataagttatatttatacttcaaattaatctagtttttatgtattttaatgtaaagaacaaactctacactgtattattcatcagttttttaaaatgaatatcttctcttgtctctttttaagaatgaaattattattgatattgaagataatttccaaacacaacagtacagccctcttgctgcatctgtttgtctctacaaattgatatcaccttaaaatcttccaacttctctccaaactcgctcaccatgtctgcttactactatgtctctctactctactctacatcactcatgcaatgatgcaaatacaaaatcacatagaaagtaaccattgaactatagcctttcttgttttgatgtcaagatgagaagcaatctcatagtagcttaagtgacaagtaaacatagaggctgcattagccaaaaaagaacttgctcggtcgatgagtagccaaacaacgagtttaaggtctttaagaaagcgaatttgggcctcaaatagctttcgaaaggtttttacaggtccaggagacttttcttttttttttttacttgaaaaacttctgaaaatttcattaattagagaacaatggtgatcacatgaggcatcatcttccaaaaattaacaaaaccagaacaaggataagttaggtcccattttgcaagagcatgggcagctctattatattctcgatccaaactacattacatccagtgctatcaagtacagagagaagtttggcataggaagaagcaacagaccaatttactgcatacctattaaaaacagctagaaaaagagtctgacattgagctcttcaacaaccttgacactgtgaagcaaagcctggagctcaccagccacaggaactcgactgctcacaaccactccaactgtcgtttcttgatcacctatagctacatcaagaaagatttggacacttttaggactttggatcccaacaactcgcctgaaatgtctctccccgctaaaaacctgactcacttctttccagtaacctttaaggccttgaacataagtcgagttgttaggctgcaatgaatgagccgctactgacatgtgatagtcttaggattgagatgttgagttgagacaagctttgtctaatggcacaaccattaatgagatgttttggctaagagaactttatttatacagtgagattgttgagaaaatgagtttttttgttctctcttctttgccatcacaaaatttagtgttctcaagtacatatgggacaaccattttatttcactttccttatagccaaatgattaatttttttatgatactttagtttaattgtcaaatagaattatattgtttttaagatctttaggatcagaaaaattacaatgcttcactcactttcttggaagacagataaaacttttacaagatgtttcaaaaatttaatgccttaattgtcttgattcataaaaccatgttaaattttttctaacaagtagtttgcaagaactaactaacatcaaagccttgttgtaccactggtgagaattttcttccatttaatattctgatttcttcatctgttgttttatcatttaaacggagttgtgcaattgttttggtcatgaattttctgtgtttatttctcaatgaacatgtgcttcttatagtggagcagcatgatcttcaccacgagagatcggaaccacgctagaattctccggtcgttgcctgtaggtcagaacctgatatgagctgctagttgaattgtgtatatgacaaaaagaagcttgaacaaagcctgattctgagattgatgcattgcattcatgaaagccacaattatggcatgacaaagaactagttcagattctgagatttcaacattggataaaacttaatagaagctcttgcaaaaattataaataactaatttctaacgtaaaatcataataacattgagaggattgctctctaaatagagcagaaaacataaaataatttaaattttaaatactaatccatttttattgactaacatttaaaatgaaaataattaaataaaaacatgagtattcatttctaaagcagtattgtagcacaaacacaaaacacggtttgtatttgtttatgaaagaaaaatagcaaaagaataacataaatcacattccaatttgtatatgttgaaatctgcttaccccattttctgaaaatgtaatgttgggtcttatacattagattatatctgatctgaaccagtttgtttgaaaatttagctacccattcaaaatataactagaaatatgcataggaagtctagttataaacatatagatgttcctatagaaaaactgaaaacgaagtcaaatcttcttataaagtacccttcaaaagattggagacttttttttctctttctgatataataatatgatactaattatctacagaagcgcacatgagattagatcagcagacagagtaaggggtccttggaagttggatgagactcggaaggcttccttttatattttgctcttgctccattataagttacttattgctcacttttataggtgcccagctaagtttcctcaggtttaacaggagcatttgctaggtccagaatctccattttgctcttgatcaaaccagtgttcctggaagtaaaatctactttgtccaagtcttctgaaatcccaaggtaaccatataagatattttcctccaactttcctccttcaatctctgtttcaccattaacgctgactgtgccattgtttgaagtagctaactcgaattctgatctcccacgcttacattccatgaagaacttgtgaagcttctctgcatctcccagtccagtaaaagtccccaaaaactttaccaccatgacactttggtcaataggcttccctaggcaaactttgattcgtcccctgattaaaccctttcctgcaattcaattaatatacttttacagtagagttctataaaaaagatattataaagaattttttttataaattactgttttctctttcctactattactatattttaggaaagacgacttttagtaatgatcatgtactaatgaatgtatgcatataaatgtatataaagagtcataaatgaaattcgaaattcgatctagtcacgttcgtattaactgttgcagagttctaatgatcgagattttaaatggattgactaagtgttccctaaaaactgtttcttctttaatactaaaaccactcacctcttatgaaggcttcaagtgcatcaacggttacaaccttccatttctcagggttattgtcccaaaaggtaatgttgtggatgataatgacaggaggccaaataattaaatcctccttctgggataaggcttccgacttgggcagtatctgaggagcccacgtaactgtctcatcaggaataacagtgctccatcccaacaaaacacaaatagctttgtgaagacccaggtgctctgctctcaacccagccttgtgagacatataagcatgtgttaccaaacgccgagtgtccatgaactcctttgagccactataacaacacaattgagcaaggggtatgtcatgtgtttttaaatatgaagattctagaactcataacacacaaagcattaatttaaatatatatgccacacaaccaataaaaatgtaacattgcatctcacaagattcataatgatagtttcggaaagaaataaaaacatagtgtatgatgcaagaataaaaccagaattatgcaacttgactatttcatataaaaacagtatgcactatagcatgtctttataaagagcacatgagaaaagatacgcaaaggagatggcattcagatatgattatcgttacagatagaatgagaatggtattcagttataaagccatcacagaaaaggtgaaaatggtagcaaatgaaataacacggctgtgacgagaaccaattcaaactaagcagctataaaaggcgcaaaatattcctagcacggttttgttggccacgttttgtgacttttttattgaagttatcaccacatcaatagggcaccgaacactcaagtttaactttcctagtttcaatcaatcctctacaaggacaagcagtaaaataaatttcaagttgcaccaaccggtctttaaatgccaagcactagaaacaccagcatatattcttagcaatccaaacatatagtcatttctataagtaattgcatctgtttaacaatcgaaaaaaacagcttacagcccagcccctatacataataatcttctgtgcaaactactttagtctatagattagatggtcccaataccaataacattacccacttcacaatccctatacatattaatcttctgtgcaatctactttgctctatagattaaatggtaccaatacctattaaactacccactttaatatatcttcataccatgaattataaacttaactctacaaactacaaataaaagtcccattctataatcttagtttacttgaaagcatgcctaaacccaaataatgaaaatacttgccccactttaaacaaataacatcactagaaagaaaacagaccttcttccacatacaatgcagaacaaactaccagctctcccgtcttccctgtatcttttctgcacggatgtgttcacattcaactttttagcatacttcagaaacgcttcgtgtaccagttgcttaaattcctcagagtcctcattgggctcagattcttcgggggccacccaatcttcagatggattaccatcattgtctttgtcttcatagtatccatcatttcttttccaaaatttctgttgtctgttaatatgattttttctatcatattggtaggagttataatggcttgaataacctggtcttcgatgactctttatttgtcgaccataatttttatagtatccagttgactgttttcgtgcatgtggcaactcctgagatgagtaccactcatccgatacaaaatcttcagtatggtttggtccttcataattcctctgagacctcctatagccattattctgaaattcagttgttctgggggtatataaatcactcatctcttcgctgatccactcttcattggtttcgtgtagatcctgaaactgtctggctgtgtacaacttacctgaagtagtagttctagaattataagtgcttacatcttcctgaatatcatatcttctttttaccattctatcttgtgatttatacattccaggttcatccctccgattataaattgcatgttcattctgcactcttgcattatatctacggtcatccctcctattctgcactcgtgcattgaatagtctatgctcacccccaacattttgtcccctcgcattatatattgcatgttcattttgcactcttgcattatgtctatgcacttcagcctcatattcagcctcatcgctcacattctgcactcttgcattatgcatacgcatttcagtatcatattcaccttcatccctcacattctgtactcttgcattatgcctatgcatttcagcctcatattcaccttcatccctcacattgtgcactcttgctttatgcatacgcatgtcagtctcatattcaccttcatccctcacattctgtagtcttgcattatgcctatgcatttcagcttcatattcaccttcattcctcacactctgcactcttgcattatgcctatgcatttcagtctcatattcaccttcatccctaacattctgcactcttgcactatgcctatgcatttcagtctcatattcagcctcatccctcactttctgaacccttgcattatatacaaggtcatcccttgcgttctgcacccttggattataaacattaacatccctcatattctgcactcttgcattatgcctattgatgtcattctcatatttagggacaggtgtacgaatcaacctttcctcttgaaactgtggacctgcatcactcccaaaaccataatctatttgatgacctttagatgcacccaaatgcaaaatttcacgatcttgagaacctgtcctgccagcctcaatatgagtaaatccagaactcaagtatcctctaccctgcttggatatatgtgatgttcttctcatgtcaatgtagtctggatctgagtgtttctctaaagcaggattgtagctagccatgccctttctaagatatccacgaggatcatcaatattatcattcctgtctatggcagggcgtgcaatactaggccttgacgtatctctatgatcataaataatttgagcacgactatagtctggttcacctcgtggagacatcattttacggaactcatcatctggatatccatgatcatctactttttcatgtgatttggtgaaaatgtagttctcatcaggactacacgccctccggtaaaatatttgatttctctgaaccccttcagggtctcttgacaaatctaaaattggtctttccttataaccactcaaacctacggcttcagtgagctttgtgctaccttttagttcatttgtatggccatcttgataagccaggaactcattcctggatgttcccaaagaggagcttgcaagtctcttggaatttgatccttgccttgttacgtaggaggcatcccctgtatgtaacgcaggcttgtcttcgtctttataggattgggttactggtaatctattcaaatttatagagtcccggtactgatgtctttcaagctcaaaatgttgttgagggtccatagtacgtgaataggatggcaagtgaccactagcatccccatacactgatgaacgaccaagatttttttgaggtgaacaatacgaccctgcttccatagagtcttctacaaccactgacttttgacttaatgaccgatgtttatcacctgctgacaaactgatattactgaactcatctttactatagctaggatcactatgttcgtacccataaacgcgcctagcatgtaaatcagcactatcattattcaaatttacatttgaaggctcgatcaattcacttctctgccgcaactcagaagttgaaggggttggcgaatatttttgaggtataccaaccccatcatcaaagtgaggccttttccgaggatctcctccagaaaccatggcctggggcgatctcgaccggatccgagcagtcctcccacgatccaaattaggccaaccatggtccctcctttcaatagaagttctttgaatcacagctgcatcctgtggcaacccatgagggctgacactcctctgtgaccaaaggggaggaggaggaggcggcggcggctcacgtcgatcaacttgctcatacgaatctggaggaaccaattccaatcgctgatgatcgcgtaataatcttgggtcagaaggttgcttaacgaaaccttcagtactccgataatccattatatctacaaaacccttaattctctttctgcttatcaaacaatgaataccttcaatttcacttgacgttccaggcaatttctcaacaagatcgctcaaaacaaaaacaaaaaagaaaaaaagaagagagataatcttaacaaagagttacaaaaaaccctaaaatcccaaagatctaaaaaaatccttttaaggtgcataaacccctagccctaaaaacactgtaataattcagatgagatcagaggaaggtgagaagagcaccatgaaaagacaacaattatggaaacccatggaagagaaggattttcaacaaaccttgtggagagaatccatgaacgattacgatagatgtgaaagttgagagctgttattcggcagagaaaggaaaagagaaggagaagtgataattggaacttttttttatctgagattatttggaaatttgggtgaaacttctgagtatattactactgtgttcgtgtttgtgtgtctgtggagtgagtataattgaaattaaaaacttcttttttttttacaaaaaaaaaaaaactcatctttttttattttaataattgaaattaaaaaggtacggccttggcgtgggggaacgggtttctttctttaattactttttatcgcttcaaaaaaacttttattacctattttttcttggttcttccgtcgcttgatctcaaccgttcgttgaataatattttatttgttgggcaatatttttttttgggtaaataccattttgaaccatctgttttgcaaaagttattaattggactctgtgttttattaaatgacaaaatggatcatgtattttctaaaatagtaaaaataggaccct

SEQ ID NO: 298313 - DNA, 3474 bp, Cannabis indica
tctaaacagaaatggtttaggggattgggatgagaagagaagaagaagaagatatatgatcatataaatggttttttttaataaataaataaatggatatgaagaaataataaataataatgttatgtaagtttttattttatttaattaattatgtaatttatttatttattttttagggtataaaaaaaggttttggaggatgaagaggggtggtgggtcacatgggggtggggattagagacagctagcaacagctggtgccctaagaaggaatttggaattagaatttattatacaaatttaaatatttattatttatagaaaacatttaaaaaaaaaattacaatacttttaatagggattgtatttttatttattttagtatttgagagaatttttttagtttaattttttttataatcgtgtacgttgtagttatttaagatatcttgtaaaattttgagacttttggagaaatttaatacgctaaaaatattatagttcaaacagtctattagacgtgtgtcttaaatatttataacgtacacgattgtgaaaaaaaaaattaaattataaaattcttctgaatgccaaaaaagataaagagtgtatcggtgcatcttttttaaggatgagcattgtgaaatcacccaaatatatgtagcatactgttttagtttactctctatttttttaggaatttttttatttttatatttaaaatattttttttttgtatttttatgaaattccacacagaaactcatatagcaactaatggagcaacctaaaacgcaatcacaatttgtatagcaacccacatagaaattactagagaaaccaccggaacaacccaaaccgtaaatttaaaaaaaaaattataaaaaaaatagtatgtgaggtaatttacctttttttaaagaaaaattcaattttattaaccattgattttcgctactaaataagttaacaaattaattaggtcgaataaactcctaattaaagtgaccatcagaatatactatagaagctctaacaaaataatgagctactatattagttgaacgtttaacaaagacaataaaaatatttaccaataaagcaagcaaatgcttacagtcattaataacttttttctttataggagaggctacttttttaataatcgtatacattgttaattatttaataaagttataatattaaaaataaagtttaaataaatatttactatgcttataaaaaaaatgtatgcaacaaaatatataaattttatttttgacacactaaattattttaaatttcttcaaaaattacatgtcctaataaaatagctacaaattgcatcataataataataataaaaattatgctataaatactgaaataaataagaatatatatactaatagaacggcctttaattattacactgaatgtactataaaattacccaattctttatttgctcctatatatatccaaaatataattctattttagacactacatattgtagttatagcatattttttattaattttcttcttaacaaaataaaaacaatttactatctctgaaaataaagttcaaatatgagatcataattttttttttaaagaaaatcgctaaaaaatatcaattgtctctacgtcaatatcgttattagtacaattaaatatcggtctcatatgatttataaaattgctaaaagacattattgatgcctagtattctttttagtatcatatttctattgatataattaagtagtgagtttcatataatttaattaagaaaataatttttagaaaatatcgctaaacaattataaagtaaagtactacttataaaatgtattaggcactactaatatttaataacagtactttatgatttcatatattaactaataaaaaatattactaattaccaattacaaaataataatacatctaaaaaaatatcatagtatctaataataatattgttcattaaatatataacatgaaacaaaaacattatatatttttacggtatatatggagaaaagtaacacctataattatgtattggagaattattatcatctatctatatagtatatatataaagagagagtattaagtggaaagtcttgtatgttgtttaattaataacttgaaggaataagccaccacgtgcctatgtgacccctcttctttggcattccatattataaattatttgtatatggagcattgttaccgagtatcagtggtactcaactctttttataagtagcgtcttatgattagttagtgatattgcttaaaagttatttttttaagttatatacaactcaatacttaattcactacaaaaaatgtcacttttaccagcacagttcgctactgcgttggtaaaagtaacttttaccagcacattttgcaaactgcactggcaaagagatcaaaattttactagcgtacatttgcagtggctaaaatctaacttttaccagcacatttatgcgctgggaaaagtcttttttgccagctcttttcattttatgctggcaaaagttctaataccaacattgatttgccaatccccttttgccaacacatcataggtaaattctattttaccagcacaataccaacttttgccagcacaaagatgtaatgacaaaagtaacatttcttgtagtgattacactatatcatcattgttaatagagtttagtgctaatataataccgatatgatatattatcgcatttagtgttagacataaacagattaagtttatacctagaacctatttaacctaaaaaattatcctcatctagaaatatatatttttttataaattttttttaataaaaagcaaaaaatatttttttatgtatatatagatgataatatgtatggactgtgtgttcttattacttgttagtgtatgatttgtcacacgtaccttctttttcataataacggcaaaacaaaattcaacacaatcatgttccataattcataaattaattaattaattgtcacaaatatatatatagactatattactatacataaatatctatggtatactatagtctacactactacatatcatatgttaattgttttattaatagtatatttatatatatatatatatttatagaaaaacatgacatcatgatacatacatgtcgatttaatgatgatgagatcttaattatatatcttcattttgaaacagctttgattatatatgaaggaaaacatactaaattaattagggtataactatatctatgtaagtactattcaaaaagcatatatattatatattcgtctttggtttgatatttaatcaaatataattttaatatatactaaattatatgtatttttaaaaaatttgtgattaataatatcatttatactaaaaaattatatataatttcaaatttaggtagcaatatta

SEQ ID NO: 298314 - DNA, 1744 bp, Cannabis indica
tatatatattatatatttatatatattgtacagaaaggacgatagccatgattatgatgagagaggaagtgggtttatatatgataattaggtataggttttaattaattagttagtttatcattactatcataactaacaaaaatttaaaaattgcattagaaaaaaagaacaaaaaaaaccattttcaaaatagttttcctcaaagtacggtgttggtagtttaaattgattagttcattaattattattgatatttttatttattaattaactaataatcattaatttgaacaaaataaataaaaatatttaaaaatgagaaaatttgataatatagtttagagttgttctccaatatttttggcacatatgatgtggcatcaaattcacaacaactctggttgacatattgagatcacatgtggaaaagtactattcagtgcagggaaatggctggtttgctcattggcacatggttggtagttaaagagatttataaaattctttatgaacatatttaataaaaataacaaaaataatgatagagatattttcgaaattgattatgtatttatttatttatttcgaaagtagtatttctatttttggtgtaaaagtctttcaagattagattattgcttaattttgtagattaatgtttggaatgaataacttgtggtttgcttcatctatagattattgcttaattagtttaagaatatgtgtgattttcaatattttgtatttactttgtatttgtaaggaaagaattgatatttattttctttattctaatatgattttttttactttgtattttttctttattctaataaactttgcttctatgtttaatgtatatcttgtttaatgtatccacgtgtagtgtacttgtttgaacgaattgacagtttgtttgaacaaattctagtacttttttctttttgggaagattttctacttaatggctgattgtttcttgattcttctacaacaatcatgaagagtttctaaagtgtgtaaagacacttttaggtcgctgattttgatcacatctcttggtatatcattttttaaatcactttcaagtttagagagagtttctttattgtgtgaagaatttgagtctaacaaatttttagtattttattattgtgttatttttgtatgtttctttatgaaatttgtacagtttgaatatacttggatatcattcatcaagctttaggagaagacttgttcatgagatactttttgggagaaaaagtgcaagtgatagactttttaggagaaagagtgcaagtgctacgatttgaagggacttcaaaattttgacatttcaaaaattttattaggagtatagattacaatagttgcgatgaatttaaagagagattctttatttgtataagtcgattcgattctataatcactttaagattcttctaataaattttattttctgggcgtggccccgtggactaatagcaatctaaaaagattactgataccacgtataattttgtgtgctctttacgttatgttcgtttttactttctattggttatctatttaaacatctctttgttctgttcaaataatttttgtgtttgtttaaacatctcggtagtaattaattatttaatttaaatattaatttggtaattataaaatagaatttaattggtatcagagcaatttactaaaaatcttagtgagattctgtgcttattttctattt

SEQ ID NO: 298315 - DNA, 3716 bp, Cannabis indica
atctaaaaatagtatttacctttaaaactatacatgacattacgcaagcactatatattttaatgaaattatatctaggacatataataaattatgaaataaataacatatttgaaagtgtgtgatgttttaactgatcaaatttcaattgtattagttaatattgcatatcgtcattattggtataaaagaccaacactaatcacaccggcgcccttctctcattggtggacaatagtttttattaaaataataacccttataatattatcatatactaaaacaaaacaatatatatgtgtctatatataaaagatcaacaacttaatcaactcataaaaaatggcttcaaaactagtaataataattattgggtggtggctatggctgcaggcactaagagcaagcccacaaaccaagttgttgaaccaaggatgcagccagtacaatgccacagactttgctgatttcttctccaatctcaacgccactttctccgatctcgggactcagcttcgagacggagataagcggtttgcaacggcgcagcaggcacgaggatcagatcctgtctatgccatggcacagtgcaggaactacctctcgagtgccgactgcgccgcttgctttgcagctgcagagaagcaaatccgcaattgctctgcagccaatggtgctcgtgtcatatacgatggctgctttctcaggtaaaacatcattatacacataattaactacataaattttactaataccacatcatttattattctttatacaaattaatattgggattatatatgtgagatttattattgatttacatatatacatgtatttatagatgtaaaatgtgatattaaattatagtttttttttttaaaaaattttttatatgaatagcattagtagtttatgtggtagttagttggtaactatcttcctaagtttttagtttttttcttttttttttaaaaatattttattttaagttaaatagtcaatttttgttttagaatttttttttgttctttcaaaaattttctttttaaaatgtattgatttgattcgaatcagtagtcttaccccatggggcatggttttctttttgatgtcatcccatattaatattattttaggcactaattttgttcttacacttaccctaaaaaaaagaatttattttttatttttttacaaatatttttattatttttaaatattgttctagtctattgaataaaatagttgaggtcatctattgctgaaaaaataatgaggtcattgcttgtagaatttgaaaatgccatattgcttcagcaattagctaatattgtcaaaaagattaataaaataaaatcttatcctaaactttattattaactaatatcaatccaataaaagacaaagagcagccgttgaacttgaaatttatattatatattatatatatttctacataaaataataaaactatataaaaattctaaagttgtgactaattgcaagaagtcccagttacataattaatataacaataaatatactttagtgatatatataataattattgaacatactaaatcaattatacatattttattttttctgtttgacacgaaatccattataatttagtgctctattaactgatagggccatgtaggaaaaacgtggttggactataaaaagaatatatgtataattatgcacactaataaaaaattgaaggactctatagtttattaaatgactatttacatttaaaaggaaaataaaaaatacatacattgcacatataacagaattattatatatattttgagttgattaatttatcaaaagaaataaaaagttaatggatgaaattatatattgtaatgacaaataatggctactggtatagttgacacattaaattttaggtaaacactcacttagcagagccacaaaattataaacttgtggaatagtataattctatagtagagtttttatctaaaaatagatttaagattaaacaaattatattttaattaagaggtttaagaaattataattaaatagagttataattaaaaaaaatttaaaacaaccaaaacatattaatgtaacaacaataacaataaacaatcgttaatactacattataatagaattatttttaagtaaatataatatttatgcatatattataatttagaataaaattatttattctacgtaaataaatttataacatagatgtatatattttattgagatgtaattatttttatatagatgtatacattattaatacgagatttaaaaaatgtatatataattacaatttagaggttatttttatttatatttgactcaaattgggactttaatgttttttttcataataaattagaaattatttttgaatagagtaatcttaaatagaaattctaatgtatattgtgcacacataacaatgataataacatgataaattaaggtacgagaccaatgggttcttcgaccaaactactctcccaggcaatgtaggaatctgtggtaagcaaaccatacctcgcagtgtcgtggctgcgttcacttccactgtcgatgatgtcttatcaactcttcaagccgtgacgcccaagattaatgggtttttcgcggcggaaaagaggcaagtgcccgtgagcgtagcagggggcagaaacttgacggtttatggcgtggcgcaatgcgcgcagacagtgagtagaagtggctgccttgattgcctgaaagtggcctatgtcaacctccaaaattgccttcctgactcggacggtagggcggtcgatgccggatgttttcttaggtactcaaatacttcattctttgctgatgatcagacaaccaatctagctcctttcttgaatggttagttatttattttcttaattaattaactaatgttttgtttattttaattattaataaataataaaacaataatgacaaatatttagcggatcaaagtaatcaatataattgacactaagaaatgctaaaggacacaagtggtgcctaacaccctcttacgtgtcaatatcgctactggtacaactaagtaccgggtcccatataatttaatataataacttttagggagtatcactagccaatcgtaacgcgacatgttaagaaagtgctaggcaccactagtacctaatagcaatgctcaattgacactctgtcaacgtccatctcaatcttaagaaatcagttaaggctaaagctatatatagacataagtcctcaacggaattaacaaattcaagatataagtcagctgccttgcaaacttagtcttaatttttgaaagaaaaacataattcattaaaataaatttgttattacgaaaaaactcaaaaattgtggacaagtatttgtctaaacacaattccctaaattagtaacagaggttgccagtatgtaggcaacaccattcgtcgaatgcggaatggcattacaagaaccatcaccaacaacaactaataaagaatagatatataataaaatagattgaaaaataaaattagtgtgaagcttattaattcaatcaattgccacaatagaatcgctattaatatggataaactaaaatcaaattgatgcgcaagagtcaaacccagatgaatggtaagcattttcgccacattaatagaaaaatcacctaacacacctgatga

SEQ ID NO: 298316 - DNA, 1396 bp, Cannabis indica
aaattatacatccacttataattccaagaaaatccaaactcttcaatcattagaatttcaactcaagataaattacttttcaaactcaattttgtgtgtgtgtgtgcaatcaaatcattatattactaacattcaaatcaatttatgcatgtcaacaatcaatgtttatctcaaaataaatatgcatttcaacaaaaatccactccataagcttaataatcaaatcattctccattaatgtaattacacacagtttaaaagatcaataggactttataggcttatagtgtaaggctagggtcatctccgagagagagacgtctagaaactctcttctccattttctcttgggtaagattttcttaatatttatatatataaatgttaaatatggaaggatggtcatctactgttcttcttcttgctggttttttccttttgtcaccccctttacctggtctatttttctagtattggttttgccgtttggcctctgtttgtgtgtgttttgagtgcagagtggtgagagtgcttttctctttgtctcactggttttgtcttgtcctggttcctgttatgtcccatgtttttgccttgtttctttgctttttgttttctttttcccttgtgtcgtggggtgtttgagtagtgtattgtgagtctgttttgtgggacttgggtgagagtgtggtgagagtgtatggtgctagatttcatttatttctttgttcttttttggtctgcttcgaaccttgtcggccttctttgaatttctctcggtcaactccatctcgtcgttctctccattcggtgactgatggtgatggattttgcggtgccatgaagtcgtccttccaggcgactcgtggctcaagttgtagcatgattgtaactatttgtgtcccttcggccttcggtacatctcgttctacaatgtggatctccatatcaaagcctggttgttgtgtaccaccggttgcctcttatggtattatgccgatcgttggagttgaggatgctagaaaggtccctgtggaaattcctaacatagtagttaataaaccttttatctaatacagactatgcctcgattaaggaggctattttgaataagtttgaattggtcaaaacttatttggagggccatcaccctttggtctcagctgttgatactgggccagcccattctacttctgggcctggtgcgtgtaaagagcaggcggtggggcttgtgcaccatatttctcctttagttgaggagaaagtcgtgggcaagcaaggagttattggggtgggcccccgttacttagttaatggaccagatgggagtggcccaggtaatatgtaacaccctaactagcataggcatgtttatgtgatttttaaacatactgtg

SEQ ID NO: 298317 - DNA, 4549 bp, Cannabis indica
attagttacaccattttgaagttttcagtgtttggtgacttattatgtgagaaatctaagaacataagccacttgagggtagctcaaaagtggttgggtgtgtgtggatttgggggaggggttcaaatccccttgtgtaaaaagaaaatgaggagagaaattagagaacatatgtatataataggttttgtatacctcaaatcttaatagcttaaaatattcggacaactcaactcatttcagatgagtcatttcgagttattactctcaaaccattgatgctaatttgatcttattaggttttgagcaaatgggtagcctctggtctagcttttacctttagaaagatccttgtttagtttcaaatcacaatacaagaaactgcaaatattgaaccatatgcatattcattcatatatgatggcaatttgatttattcaatttatacttatctttatatatttatatatgttgttttcttttaattagtctatacttctttgtacagatctcactcttgatcacctttcccaacttcttatcaaacctcaatcatttaaggctttggaaattgttgcatttgtttccagagttaagaaaagtattcaattcaattcagattttgtactcattctttttggaaagacagccttttttttttaattgtgagccatttaaacacagagaatccaatctgaaatggaaaacccaccacctggattggttatatctatgactgaaccaatcctctcattcctcacatcagcttccacaaatcacaaactttctcaggagcttcaagaaattgcttctgatttctcttcaaaaccaaatgttccctacaagtctctccgaaccatctggtcttcctctgatatcactgaccgccctagcttgattcaactcctttccggctcaaagtttgttctaacaagccccaaacctcgagaaaaggtacattatacttctactcttttgccctaaattactacaaacacatattaggtttactaattttaaattgttagccaatcttttataagtgtggttttgaagcatattagtttgttaatttgggttttgctggttttagagtgaggagctcaaggcaagactaaaaacgcttcaagaaatggcagagaggaaagcatatgcagaacttgtgaaggacataacacccaagaaagatgacactgagcccttttcttcttacaaggatcaaatgggattcggtaagctcacttttctatttggtttgttcggttttgctttacttccaccactaatacaatccattcattctctttacattttctactactatatggtatcaagagatattttccttttaggagttggccacaagaaactcctcttctctactgtcagtacctttttcaattttcacagtcacagtctgttactttatacttgtttctcttttcgagacagttgttccattgttctcttcacctaccactgctgaattagaattcccaaatcgaagatgtatgccatcacccctgctacttagagatcagtttgcctttcccatgtctgaatattttcttactggagcattggtgatgaactcaccattactaaccttacatttgacctgattaacaactgattgattgattagtttttcgtattttatttttttattccgtacttgaacatacgattcaatggtatcttagttaaattttcatttggatcatgctccaacttctaaacagtgaataaattacagggttacatgttgcgctgacgatgtttactggctatatggctggttattttgcattcagagcattattcaaccacagtcctgcaatggtatttccagaaatacgacattaagtttgttttttctgatatttattatttgtttcatggatacccttttcttttatttgtcgaaataaatgttcccttatgtagtttgttttatgaatttgatatcattcaaattttgtctccagaatgctgctggcggagttctcggatttataatcggcatgctagttgaaacatttctttttataattagaacatctaaccaagaagttagatcttctcagaagaagaaagatcaatagtctaggcctttaaagggttggtcatttcttctattctattatgttacacctactactcaacctgcaatatctcttgctaatgacatcaaaatacttcctttatcacattattctcacttcatttttcagtgtaccttatatagttctactttgtatcaattttgaattttggcaaaactcaagaatgagagggaaaaaaccagaaaagtaagtgtagaaaatattgttttactttattagtttaatattcttatttaattcggtatccacatatattgggaaaccaatttgtatatatccatacttagttattttaggctgatttgattgtaattaggtgactttattttatttgtaattactttaaaatattaggccttaaatactaattattcctgtaggttgtacaatgcctatttacatggcataactctcaaatcataaatcgtgaggagttatttttcacatggtatcagagcctaaaagcttaaccttaaaactactgctgctctatctttttgtctagtttttttctacttctttcttccataatggccactgtaaccaacccaaacactcaaaactacctctaatgtctcttccacatcatttgatcaacaaaaatctctccaaattactttacacaagcttaatggtcagaactttctgtagtagtctcaatccatgaagaagtaccttagaggacgaggatgaggacgattggggtatttcactagttttgttcctactccttagattgatgatccctcttatgctaagtggaagtttgaaaactctctcatcatagcctggtttatcaactcaatggaagtgtacattggtagacttatttattcttttctactactagagaagtgtgggaatctgctcaggaggccttctcggtaggggtgtttataaaaatcaaaaaaccgaaattgactatcaaaccaaccagaccataactgaattttcaattccacatcatcaccaaatttagtggtcggtttttttttatatggccgtctgggcccaggttcggggtcaggggttggatctagggccaggctccgtgttcaagtttggggttggggccaggctcaaggttttggtctgggggctgggtttagagttttggtccgaggtttagggatggggccaggatcgagtccggggtccgagtctgtgtttgggtcttggaccctttttaaatatcataatacaaggtaatacaaatcatttgttatgtatttaataatacgattcgtattatattaaatttttttgtcgtagtaattaatacattacaaatttttatccaaaccaaacatagtgttcgttgttatctaatacaatacgatttttatacgacttaccaaacgagccctaaatgtgatttttgggttactcctctacgaagaagggctacgaatgctaccatccttctattcgtcgcgtgtacatctcaatagatgttacattccatgaagatcaatcctattattccaacctttttattcaggagggacagtgagtgatgtctcaagttaggatagccttttaaaggatccctaaaatttcaaagtttctaaatccatctgaatctcagccacctaagactaaggaactcttagtctattgtcggcaaccaaaaaatactcaagtagtacagtccactaatgctccagcatctcataaatctgatccatagaccactcctgatgtaagtaactcttctcatgatcttatttactctaattttcctgataacacttttcatgatgattcttctcataagattgaacctgaatccaagttacctattcctgagagaaagggtgttcggagctgtactaaacaacctatctccagatatgtctgctatagtaaactctctcctcattataaagctttcgaattaaaagttgagcaagtgatagtccccagggatattattgaggcactgtcacagaaagaatggaagcaagtagtctaggaggagaatggggcactcgaagctaacactacatgttgttagcgataaacatgtggtggggtgttagtggatgtttacaactaaacacaaggttgatgaaacaatagatctatataaagtgagattagttgcaaaaggcttcacttaaacttatagtgtggattacaacaagacttttgctcctgttgcaaagttaaacattgttcgagttctactatccattgctgccaatctggattggctcttacaatagctagatatcaagaatgcattctttttgtgacagtcaattgtctcatgatccgtaaggagaaatgctaggtaagctgtgcaatccgcatcgctcagggaaagtcaagtgtgatgattctgagaatgtgtaggcataggactacacagttgaagagggcataaatagattgaagggtattacttatatcaacaaggt

SEQ ID NO: 298318 - DNA, 2933 bp, Cannabis indica
aaaagaaaaaaaaaacagaaaaaaagaaactgtagacagagacaggtaaaaccccaccctacaacacacccctccttcagaacccaaaccaaaaaaagttaataaataaaatcatcaaatttcttctactctccaccaaactcttctttcttcattggattttttttttctcggattcagcacttagggttttcgtaatctctgtttggcttgcttttcctggtaagtatgggtttacttacaggttttttttttttgggttgcttctatggtgaatttctattttttttcagttcattttttactttttgaatttatctgattatcgtcactctaatttgtactgatttttttgtttgtttatacttcgcactggttctcagttgagctttagcttcactgattttgcttgtatttttggttgatttcgtttgttgttgctcttgtaactgtgtaatcgagttgcttttatagggtttggggtttttagatttttagggctttagtttctcttgctaacaaagactcacttttagaaattgttactgattttgtttggttatatatagtacgtagtacttttttccggggagatttcaaaacatgataatttacattcatggttagtctttctcctttttataaatgctatgagcgtctaagcattcacagtacccggtgagtgttatttgatatggaaatgatttttaaaaaattcttgggaacaatataatatatgttgaagaagtaagacagtgtgactggtttcttgcaatcttgtttcgaaatgataacagatcatgatgacttcaactgcttatggaaattttttataaaatagaatgagactctgttttggttggtaatgaaaattcattacaattacaagtaatggttacattctaaatcaattgttatgttcttttgggtgggatagtttaataaagttgtgttatgaagctagattgtttggtattgattaatctccttatcttgtcacacatactaatctttgttatgctgtcttttaacattatgtaaaagatcacaagtttatctttctcttcttcttggaatagcgtattccataatagacacattttagtgtaagttctcttgtttctcattatacttttgttcaatattttatagcagcataactctttacttgctcatctccatatgctgtcaccgtttaactgaaggaatacctgatctaacgatagtatccaattttagttgctgttcatcatccatcaagcattttgttgagtgtcaacttattgttcttaccgtgtatgttataagtatattctaatgtaattaaaaggcataaatgggttaaattaataacattttcattatgtttgataaatggaagtattaaggtgagtgtctcgtcctaaatgggttaagatttgaatgtttctatatttgactggttgatacaatgaaagtagtacagtaggtgactatctcgttctaaactccaacaataagcacagagccttcagcttgcgttggtttgactaataattgatcaagcattttactcacatagcataggtggctttgcaatggatgatgcggggcatcgtgaaaacgggaggcacaagggtgatcagtttaaaccaactcagggtcaggtatctggaattagttttcagaacacagtaagaaactaatctgatttgatattaattattatatgctctttatcttatacatgtacaaaaaaaaaggatttcaaggaattgatgatgttgctttttatgcagtggatgatgcaacatcagccaacaatgaaacagataatggccataatggctgaaagagatgcagctattcaggaaagaaacctggccctttctgagaaaaaggctgcccttgctgagagagacatggcattcctccagcgtgatgcagccatcgcagaacgaaacaatgccatgctggaacgagataatgccattgcaaccctccagtatagggagaactccatgagtaatggtaatatgtcttcatgtccgccaggttgccaaatttcacgtggggtgaagcatttgcaccacccacagccgcatgtacagcagatgcaacacataaatgaagcttcatacggtaacagggaaatgaacacaaatgattccctcccaatgtcagcagatacttcggatgctgtaaagtcacgaagggggaagagaatcaaggagcccaaggcaatatcacccagtaagagggctcctaaacctccaagaaaaattaagaaagagaatgaggagttaaataagatgacttttctcaagtcacaggagtggaagagcgagcagagtatgattggagaaggtgatgatgataacaaacagctggttgtgtctaagtccgattggaaaggtcaggacttggggttgaaccaggttatatatgacgagtcaaccatgccagcgcctgtatgctcctgcactggagttctaaggcaatgctacaagtgggggaacgggggttggcagtcctcatgttgcacgaccaccatgtcaatgtatccactaccatctgtgcccaacaaaaggcatgctcgagttggtggccggaaaatgagtgggagtgctttcaacaagctgcttagccgtcttgctgcagagggtcacgatctttcaaaccctgttgatctcaaggataattgggccaagcatggaacaaaccgttacatcacaatcaaataagatttgagtaaaataatatgaattggaggaacatatgggtagaaaatggcacgtagtaatcaaataggcatttttgacaggagccacactaaaagctggatttgggtaaatttggtccgctctccttgaaaaaaaatactactctctatctctatctctctcttctccacctctctccttttttctctaccaattcgatcagaaagaaat

SEQ ID NO: 298319 - DNA, 4682 bp, Cannabis indica
tttgttctttgctaattatttttttatttatttattaactatgattttttttaatttatttataggatttattgaatattaatgaaggagggtctacatgccaagatgttgagattggaatatagcagcattggttcttttgggggtgataatatataattatatttatatatatttttaataaattaagttcttttttttggagtggaggactgtttttcttttcattttttatttgaagaggaagtttaaggttgatttcttagggggggtttggtcttagtaaaagttaattattaatttcatctttgtattggtgtttttggctgttcactgtacaaatatgtttgcagtttgaagaactctctttttttcttttattaattattagtattaaatcatttttcttcttcttcttcttattttgtcattatctatttatgttacaaaaaataagattacgctacatgatttggatctgattttattattattgaatccagcataaaatattattaatataatatcattgtgtccttttgtgatatctaagagttgaaaaagagtggcaaaatcccaaaaatccatcttcaaaaacaattacaagaatttcacaacttaattaatataacccctaattaatagcatcaaaagcagtattattattgtttctgtatatatcttatgaaaataaggatgatggtggatagtgtgactgtgagccattaatgttgacagctaagacattgctgtttgagggttgaaaaacttgtccagatctcaaggtggatctgtagccaaattataattataaatatttacacacataataaatgcaatgtattataatgttgggtcagtaagtaaaaggctgattcatggtcaaagatgttgtgtgttactgttttcttcttaaaaagcatatagatacctaccccagcttacacccttttacacacaaatccatagccctgcattatttttggaccagagtacatttacgtactggttttatggtacttgtaacttattgcctgccgtaaactaggaatgaaatcaaagattaaaacacacaaaatgtttttttttttattatttctttctttcttgtcatgtcaaactcaaaaacaaaactccccctaatatgaatgattgaaagtaactatataaactaatcaagttactgactttagactcaaaccaagtcaagtaagagtagtaaaagagagttttggttgctataaggatcagaaaatctgcaaacagttaagtattaacatatttgcttgtggattttgtcaaaactaaaatcccatggttgatcacacaacacattgtcagccatccttgtttttagagatgagaaatatatagaggaaagtaagagatatggtatgtatttttgggtacataaacgtttatgacaatgtcaccaaggagctttaacctctttgtggaacttgtgctcgtagctttctgcttgtgagcctagtttctcaatagctgcatcaaatcgaacacatgcgactctcagttccacgatctttgtctcgatgtctttcattccagtttcgacttcagctcgctcttttcttgattcagcatacatctttgcatctacgcagacttctgagtcgcgggaaagaccagtaagacgagacagtcgagaacgtagaaatccaacattcatgcccaaaagctcaaacgctctaagagacttgtcccaggcttcaaaatcaccgcgagaggtagtaagcttgcaagcttttatggcagaagcaacttttacagtctctatgatggtcccaacaatcaatttgtgattcattcccttcataatattgtcatgaaggaaagctttttgactggaacagagcttataatatgctcttctaatatcttcaggaatctctgaatctacaagcattccatctacaagaatattgaaattcttgaaagatttcatgtccttaaattgaaaagctggccctaatatcttggactcttccaaaacttcagatgcaacttcctcactgcgttttcggactgatctgctggcttacggggagctgatcttggtgaaacagtcttctttttctttttcttctcgacaacagttaaaggaagagacttttgacgtttcctgttcgtattgtgacattctattgcacccaattctgcataatctttatctgggtgtaccatccatatcaaatgaaatgaacatgaaccaatatcaaaatcagatcacagctttgaagctaggaaaaagatgcatcaattgtcttacctgcatcactctgtttagattgacaatctaaatttaagaggccaagagctccatccacttcagtcaaatcattcgcccttattacgtaaacctacaaattcaatggccagtggcaaatgaaatacgctagacatatataatcacggcaaaattatattttggtcttcagaggttttctagttctcaactaaatggttttttcttcggatgaattataaaacaaagatggtgtggaattatgcccgactactacttttggtacaactttacagtagtgttgattataagacttgttctttaaaactcaatggaacttgatccattctcatagcactcttattgttcagttttctttgccagtggagcctgagtcagctaaaataaagaaagaaaacctcaaattatcaccttaaatttggtgggttcaactaattggaagaccaaaacatctccctcgagcaatttgtgtgcaacagaaaactgtctccaaccagcactcaaccctgtcttgtatgcaatgtatttaacatgatatcgttttccgtcctcatcctccaaagtgattgtagtatcttcatctggtaagtgtgacttgcaaaatggcccaggaagcccctgccataccaccaacaatgttattctaaacatgtaaatgtcattcattttaccaacattatactcggacactcttaacactacggtctacataccatccagaagcagcttgcaacatgtgatctaactagagatttcacaaaactagggaattcggtctctagatttgatcgaacctcctgtcctcgaatcacagcagatgacttggcttcaccagataagggtgatgcatgaattgcagccttacttggtgtaggagtactaatgaaaaaaacatgaaaacaatattgtcctgggtaaatataatgcatacaacaagtaaaaaatgaaaacatgaaaagacattaaaaaagaaaatagttttacttacttcaaggaattcctggaatggccagatacaacctgtttgagcatatattagtttatcaaaaaactatcaactaataaagaacaatgccatttcatgcatgctactctttggcaccaaattacaccttataacaaattaagcatgattcaggaaatctcttatgcactttggcataaaatcaatagggtatataatgtgaacacccactgatcttaatttatggatctcaattcccaaattgaaaatcaaacaattttaggtttgtaacaagtaaatttcccaaaaatcctgaaaatgaaaactacaataaaaacatagaaagatcataacatataggctcctcttacaaacttaatttcaggattccttttcttgacaatacaaagctcttcttctttctccttaaggttcttcttcttggcctgcagataataatgcaccataaattaattaaaaaaaacccttacaatcatacaaccttaaaccaaagatagatataaaataaataaataacaaacagagagaaagagagagtgattaccgaattggaagaagaggaagaagaaggtttgagctttagcctgggagatttagacaattgggccaaagtgacatcctctggaatctcatgctcaaacgatgccgtttccatcgaaaccctcctcctctctggccctgtaacttcctcctcaacaccaccaatgcaaaatctgaaagaaacccagaaatggatctcgaaaactagagaaagagaaaggaatcaacccattttcatggtgatgattcttcaattttttggggatgaatattggtggggtttgttgaagacctggggacccaaaaaaaatatagaggagaagaccgtttaacagttaatttttaattttttttttcgacacaatttaagagttaatttttttttaccattagaaaaaaaaaacagttaatttttaatcactctaaattaaaacaattaacttttaagtaagatttttttttttttggttcaaatctttaataaagattagactaattaggctttctctctaaatttttcaaggcattaaaaatttactctgaatttagagatggtaaaatagggcattttcgtgtgtagggtcagggccccgccctgtgaggattgctattgaggtctttgtctcgtcccatcttgcgattctattcgggttaggttacatgagattgggcttaaaataaagactcaggttgaatctagggaattatttcacaaatacacaaaaacaataaaaatatgatttaacagaattttaaatatttttacgatttttttattttgtttacagaaaatacgatatttttatgttatactcttgttaatttgttgttgattttttgttatttgtatgttattttttcttgttgttt

SEQ ID NO: 298320 - DNA, 6282 bp, Cannabis indica
ttttatctactccattcctattcatattctcattcccatattttcatttctcctaactaaacgccaccaaatatcgcatcgaaatccaagaaagaagagccaggcaaaagaaacctgattaacctgattatgagatggaaagcatgcattgcatcttaccaaacactcatattctatttctacccaaaatccacagcatttgtaaattctaacaataactaactaccctatactattccccatacaatttaatactcaaatcattattcttattattatttctgttgttcaaaccattttattccgtctcgactcaaatccttatcaatggcatccttacaaggttctctatccgcgctctctgcaatccgttcctctggttgttcctcttcttccatctcatcagccacaacttccctccccatgtttcccgacaccgatcggagaagctcctccttcgccggccgccgatcccgacggaaattgacttgcacggcaatggtccagcaagctgtacaaggaggagcttccagctgcttatgccaaagaaatggagagactatccgctaaagagtcccttcttctcgcagtgagtcttaacttttaagattctatctactgtagtttagttgataagacctaccatttgagctttgaatttgggattatttattaattatttattataaaaattcagtttaaggattctgggggttttgaggctttagtatctggaaagacgagtgattttcagagaattgatgtgaatgaaagaattaccggccttgagcggcttaatccgacgcctcgtccaacgacgtaagcgctcatttcagctgaagattttgtccaagcttcaatttttatgggatttttacttgtttaagctaatcaggtcgccattcttggagggtcgctggagtttcgaatggtttggatctggaagcccgggattatttgctgccaaattcatatttgagtgagtaatttatactctcgtctgctattcaactttgtgaaatgtggtttttagttgttgaaaattacgtggttggtgtgaaatcggattgtgatagataaccggtgatcgtctttgatgtatattgcaactcttgaactgtttgcaggagatttccctcaaatttggctaacttgtcgaaaatggatatggcaatcaaggatggctatgcaagagttacggcaaacatgagagttttgaactcggtattctactctttaatgatgtgaaatttcttaacaaatgtgtttgatagtatgtgtttacaaatttggccatctttttccaattcttcaaactaaatttgatagagcatatggtctcagctaatttcacagaatcgacttttacttattatccaagatgctgaaaatttattacaaatgggaaatagccctgtttgcattttttcttaatgctgactcgatttgtatgctttgctaactacatgggacctcagcaaaaaaaggaaaaggaaaaaaaaactacatgggcacttagctgcagatatctttctttaaaagaaatttattatgttagtttgaatttcagatagaaaccaagtttactctgtcaaccaaattgactgttgaaggaccacttcgaatgagagaggaatacgcagaaggggtttttgagacaccaaaggttattgaagaaacagtgccagaacaactaaaaggtgcacttggtcaggcagcaaacaccctacagcaacttcctatacctgttagggatgctttcacgggtggtctgagagttcctttgagtaagaaaattatgctttattgaccatttttaaaccttaaaatttgagtttgcacctacctatgatcactatatgttgtcaggaagtgtttggtcagatgttgcttattctttgtccttccaaacaactgccatatgggatggaaagatggtcataataatttttaagcctcagagtgctatccctttagcctgttatcttcagcctttgaggagttagtatcctgtaattgacatttgcagtattctagggtcttcctgatttcctttatatagttctttatagcacccaaacacacttgacatattgcagttccctggagttttatcttcagttctttttacatagctctttgtaacaccaaaatgacttcacccatcacagtagctaagaagataacaattagtaattgaaaatttgaaacttgccaaaggatcattgagtgctgactgctgaggatactttttgtactcatatttaattgcacttgatcattatacatttattcaccttattccctagaaagatgcaaaagatcataaaaaattggtacctaccaccaattaaaaaaaaagcaaggttccgtattatattttaagattcaattttaaatgagaatagaatcatgctttctcttatgtttttgcctgctgactaactaggttattactatgaatgtgaatttatcctaaccatttcatcttatgcacgcagatggaacttttcagagactattcatgatctcctatcttgatgatgagatacttgtacgtatgcttaccaaatactctttccaccaaaacatagcttgatttcttttacttcattgttattttggtaattttaaacacgatatcatgtggtgctcatggccctgtgatccaaattctatggaacttagtgaagctaaatcagagagtataaataggcttaggtagacagactaagcatgaatataattacaactgtgcagtgataaacagaaccctacaacttcttatcagaattctgacagcctaaccatatacactctaacactgatcctaattctatggaacttagagaaggtaaaacatatgtgacaggagttgcagcacaatatattcttgaataatgcatggtatggaaattagttgcacctcctttcaatgcctttaaaagtagtaaaaaaatatttttatattcaatttcggatgtagtcctgctgctccttttccattttataagtaatttaacaatcagtgaagtaatttaaaaataaaattacacatatgatactttacattacttctgtatgcaatgtgaccggaccagaaatgagaatgatactacacatctgatctgccgcgtcccccatatttcatatcatatattcaagtttgtatatatttaagaataaatccctttcaagaaaaaaatgaaagaatgaaagaatgaatatggttggacctgtgacattgaatacttgactcacctatacttattgccttagctgtaacattattactcttttttcttgctaagcttacattttctgctgtatgattaccaatatattaaaatttgcgttgtatcttattactgtagagatctaatttattcttctttcatatagttggaaggtatttggagctttatttttgtagtttcttgggttttgacgagtatttagattctagtgtttcatgcatattacagatcataacaagaggatgctgacataaacattttcaaccgtatcttcaaaactaaaggcacttctgaaatgattttaaattctaagctgttatattgatatttgcagataataagggatactagtggaattcctgaggttctcacaaggtcagatgcaccctcatcacccttggctgataccatgactgaatatgagagctagagatccttttttttgtctataaaattgtaaatttttatttttctcatcagttgtgattctgatttgctcttctcctttccgtctctcagatgagatggctactgattttctcatgttattttctttccgttgtattctaatacttcattctgagaaataaaagaagaaaatcttatgaagcttcatacgtcagttaaactattcatggctgcgcaaatgagtcgaagaaataactctagaattcgatttgtttgacaattctaatcctcacctaactttgcaaatggtatattattttctttaatttctttctttcaatattgagtagtttatgaaaaatgtctttacatatataaattaaagcttggtgtaggcagtagtagtagtgtgaacatatgtgactatggtgataccaaactaaagctagttgactaaagtttgcaccactgtcatgtttattctacactctactaatccaaacatgacccctttatcacctagagagccattttcgttttcaatttataagtttttttttgggttgacttgtcttatttttatttataatgagaatatattgttattcatttgcatttacataattgggttttcatttttcttagcctaccacaattctctccttattagtattttttttatctatttatttaagggaccttttcatttataacccattaccattacaaaattacgcatatacgaatacgataacacaggcattttaaactttatacggcctaacctatttgtattcctcttcaatatatcacacacaacctacgagaaacaaacccaggtgctcagaatcaccatctaagccaataattcaatccttaaaatagccaaaaggaagatcaacaattgcaaataaaaaagaattattaagttaaatgattcaaaacagaatcaataaaaaacaaaaaatcaatccatagaattatttaaaaattctttaaaatattgataatatttggatattctatctaaaattttgtgatttataattaccaatttattgattaatttaattagttgtggaataataaaattggtacttattgaccttgtttttagccaacggcacgcagtcagtaaaacgataatataagcgtttttttttcacaaagataatataaatgtttgaataataaaagtaatcaaaaagctataaacgacagaagatattcttagaggttcggctctttttttttttttggaagaataacaacttgttcattagataagatagctgggaagcacaacaggggttccctccctatggtataaaccattcaaaagactattacctctagcctttttggctacagcatcagcagcttgattgtccaaacgagaaataaaataaaaattacaaacattaaaacttggcagtaactgtaaaatctccaaagcagtaggtcttgtttcccaatacggagggaaaatccttttttccaaagcttgcacaatgacctttgtatcagaagcaatggcggttgatcccgtcttgaccgccatccccaactgcaaagcccacctgattgcttgcaattcacactccgcaaccgaacttgctttactctgcttcgcataccacatccatctacccgtccttctctctcaccatcctacagccaaaccatccactccttctttccaggaagcatctgttaggcacacgatctctgtgatgctagggattttggtagtcacggtcggttgtcccaaagataatccttcccccaatctcttatcggtgtcactcgagctggaggtcatctgcaattggttcagctcttggtaacgcctgagaatgtgtcttctagtgttgtgaatatcagttgcctttcctttgaacaagcgttcgtttctcgcttgccaaattccatcaaacaagcatccaatgaactccaaaaatcgccactttatctcaattggcatgcacgaaaacaagcccaatatgatatatttgtaggtggcatcctcgctaacgttgctccgaattgggaaaggacaactaaaccacaatgccttcgcgaaagggcatgcccaaaaaatgtgtcttattgtttcacacagaaggtagttcttgtcacgaatgaaagggagtttatcgcgggttggaatacaatcagtagctaccctccatattatcattgaggacttgatatcgatattctggttccatattatcttccacaaaggagacttttctgcttctctattcccacaacacatctggtacgctctcttgacagtgaaagccccatcagtagactctttccacaccaaagtgtcttcctccgaggcaagtagtctaggaatcgagccaattctggtacctaaatctctcccaaattgtaatacccggaattaagaaatggattagcaaaaccctaactagataattatgtataattgaggaattatattattatataatttattatatgtgaattaatatgaattatgacatgttaagaccccgttggtgagccagtaacattttagtaattatgacccgagaagggtaaaatgatgaaattaattaaattacgtgcttaatagaactat

SEQ ID NO: 298321 - DNA, 2392 bp, Cannabis indica
aaaataacctttaacttgcattacagtctgtggtccaattattagctgctcataaagtttcttttcaatattgaagaaaatgaccaagcaacaaaagacaaaggtatgcatatactcttgaagaagatattgtgagtcattagatgtgatagacataaggcatcaagaaatatattaaagaacaataattgacagaaaataggacaaaataggaaattagagaaagaaatagatacacatagggagagaaagaaagctaatttcttttaataaaagctggtatcaatcatcaagcccccattatctggtaacattaaatgtgaaattctcatctattatctactttaccttggcccgaattgaaatgggaatgtcttgaagagcagaagcttctgtgtagctactctcatattgcaaacgcacatggcctttaatctgattacggatgtctttccccagtctgtttctgttcatatatttgatgagatccgtcattttgtctctaaatttttcagtctttgatccttttactatcaacgcagtcatgttaccgatcagatatgcacccaaaatcatgtcaaaagagacatatatcattataaatatcatttctctcatattgactgcatgtatgtctccataacctgtggcaaaaagagcaacagtgtgtattagtgaaaaatgaaaagaaaaataactaataattgcaaatttcttcccttcattataaaatagttgtttagtggattcatataagagaatataataacaataacatacaactataaaacattgtcaaatcctacaaatagacatgggttcatgaagtattttcaagtgtgaagtagaaaacattacccactgtggccatagtgacaatggcaaaatataaagatgttatgtaacgcttccacaaatcaatatctctgaagcttgaataactatagtcacccaactttaaacttccaatccaagtgtagccctctttagaaggagggagggtggtagccaaatagtagaagatgcaagcagcagtatgtgtgcaatagagctccacagctataagttttataattctggtgacaatgtaattaatacgtatatccttctctaacttgtgaaagaagtcagtcactttacgcacccgacttagcctgatccatagaagataccttacagcctcatgtctcccacttttctactcagcacatatttcagataacaaaaaaaaaaaggaataggcctcaaaactcataatcaggaaagttgatgttatcaattgcacatgtcacattttcatgaacgtaaaatgctcaatatgagtctagtttccaagtaataacagcggacacacagtccaactataaatatatcaaacatttaaagcaagaattcattcatatcagctgtatgagaatctaccatcgctaagtttggctaagtatacatatttgcttatagatagaagtataatataagtaaagttgtatctttttttttctgtttggataggtatgtaaatatttcatctttcttttgcgtttttcatttctttattttccttttgaatcaaaagtttttttctaaagtatttggatattaattaaaaaatatatttttatgaataaattaaaaattataaaaattattttaaattggtctccaaattttatttttttggaaaattagtctacaaatttttattttttttagtaagattaaatataattttaataattttttaatgtatatatatttattgattatataaattttgtatcaggtaaaattttatgaattgtataagttaaaaataaattttaaaatataatttagttcgtaacttataaaataataataatattattatttaagtgtttttaattgttttttttattttgtacatattcaaaaaatatatatttatttaatttgataatatattaatataaaattatttaaaattaataaaaaaataaaatactatcatttaaaagtgaaaactttatatttttaagaaaataaaaatataggaacaaatttgtcaaaaataaaatttgagaaccaacttattaaaatttatgtagtttggagattaattgttaaaaaataaaatttagagacaaagatatatagattagagacgtacaaaaaactcttttatttttttatataaacacttctaaacgggctttttctaattctaaaatctaaaacagagcaaaaagaagctcaatcaaaccgagtctaataatatatattgaaacaatttagtatgatgttgtgagtaccttatatatgatatcccacggcaaacaacaaagcaaatcaataacaaaacttgacttcaagtacctgaagaaaacattaaacaaaaacaaaacaaaacaaa

SEQ ID NO: 298322 - DNA, 7048 bp, Cannabis indica
ttttgatatttttttttatatatttttaagggccccaaaatttcattcgtcttgggcccatatatttttagggccagccctgccagcaacagcaagagaatcagcaagattcttcatcttcaagatgtactcatccacactcatggatcctttcttggtgttctaaatggcaagtcaaagttgaaactgttgaaccttcgattgagtggcaaagaggcttgcaaagacggtccaaatatcagcagcgaattcatagtgaagaacatgtccaagcatagccttaaagagagaatttataagccaactcattagtagagcatcaaaatgagtccaataatcaaaggtagggttaatcgtgttcgtacctgcaagaaatggatctggccgtggagtggtaccaagaagaattccttcaagtccatgtgcacgaacggagggaagaattaacgagcgtcagtatgagtagttgtgtcaatcaagttgaagatttagatgaagaagattattttgaatttgaaattgtggtgcggcggtctgaggagcaatctaagcttctggtggacgatgaggaccgttgttgcaaggatcatcaagatcaaccataggtatgatactgtgtaagagcagagaatttaaaaagagaaaaagaaaagataatgaaattgaaaaaaagaaagctcaatcaaagatgtgagctattatgtccttatatataacttgtaacaaatcgagtttttacatcaaacaataacaactagctaatagaaaaacacagctaggaaaataactaaaatcactaaaagcttaaccactaactaacgctaacagtacttaatgattaatattaagaacgaaaaaaacatttttatattgtagcaatttaattatgagagttttatttgcaccccgcaaaataataagtacactacaatatttaaaaaaatgaaactttaaataatttatacataacacttttaatatttttttaaaaaaaaattgtcacactattttgtgttaatttcaatatttgttaattttattttcatatattttttaaatcatgtataatttttttgtaataaaatttcaaataattttttttttttaaaaaaaactaaaactgaactaatatatattatgtaaaataaaaattattaaaatagagttgatgcattgacggtgaatatttgatcaattaaataaaataatattttcaaataaataaataatctaataaaaacatctttaataggagaccatataatagctaaaaataacacattatttcaaatattatatatttttattctcttttatccacatgtacatttttctgaaaaaaatattacaattacacctccaaaaattatctactatagtctcacatattatattttaaatattaaattaatgaagtctctaagtaaaaataattttttttcctaaacaaaaataaaaaaaaaaaagaaaagaatatataatcattgtccatttttaacaatactcaacatctatatcattaaaatttgtctaaatagttgaaccaatgggaagattacttgaatgggcaacccgcattgaggagatatttggtagtttgttttggtaactatgaagggcactcggtagttaattggttggttgtttccaaaaatgattgcattaataataaataagtgaagtgaagtgaagtgcttagtgtttctgacaccttagcttactctgctaattacattcttccctggtctcctctactctactcttgtcttcacccctctcttaactcaattccaaacaaaattgcatctgggcaaagcgctttcctttcacaacatcacctctacttctcactttgttttctcaagattctgtcggggattcttctgtcttgtgatcccttcgctgcgcattaatgtccctttattcgggccctttctgcttcggcagcgtggcttttctgcctcgcaactcggtaagttttggtcaatccaagactgtgagaacctcagggttttcttctccaccgctcccttcttttgccagattgaatgaaaaaggtactcaaactcctcaattgtatcgtttcgagtgaaaatattatatgggttttcatttttatgtgaaagttttctgtttgagtcgagaaagttatggctttagtggaatgagttgttgaatttggtgaggagagctacaatgtctttgatttatcactgagtgggcaacatcttcagtctaaaagaatgtgatattttcctaaaactgttttatttttcaaaattagagatgtatattttcaattgttgttgcaagaactacactgggaaactaatgggaagatcacacaatcagaggatattgtttgttaatgggaaaagatgggctattctaacactctcagtctctcattgacctggtcactaaaattcactatatggacacagagatatactttagcacttcacttcttttcaacattagaatctcaattatcctgagaagttatttcgtaaattattagtttgattacattgtttcttgttatgaatattggaaagttttgaaacagggaactggaaacatttagtaaataagatggtaacttatatggaagaactgagctagtctggtcagtgatcagggatgcttgtggatcacatacaattgatattcatccaaattgatgaatttttcgctcctcgtggcagctactgattgaattcaagcattaggaaagtttcaaatttggttagtaaatagcaatagttcagatgtaaactgtggctcaaaattttcaggcaatgaaatatattgcctgaattgatacgacgtatatagatttgagaaaagagttgtgcctgcattgcttattagttccttcagcttcttggagttacactacagtatgtttggaaaagaacaattgtcgaacctcaattcagtacaaacaacattttaagtggaccaagctccgtatgagactccaatttgttaagcattcatctagaacacgttgtcttgcttattcatacaaacatgctcgaagtataataatgtacttcttggaacacacgtagaacttattggacatagtaatgcttagtcatggtagatgggaaatcttatgtgtcttttagtatcaattggacatgcactatccaatttgtaatgttctttatttatgtttccagttatatcatgttcagaccctaattaaatgatgataatttttttttctgttcacgttttaagttatagcaaaagcattaccgggagatggatcattcaaaacagaggattcctcacttgtggtttgttttggagaattattgattgatttcgtcccaactgtaatggagtgtcattggctgaagcacctgcatttaagaaagctccaggaggagcacctgctaacgttgctgttggcatagctcgtcttggtggttcatcagcatttattggcaaggtatcggatatctgatctttatttcatttcatttattatcttttaattttattcattcacaaaaataagcaagagattatatgttgattgttttcacatgagaaagttagctgttacaaaaaattgcatttaaatgcttgagaaaatgtgcccttggttgagtaacctgtagaaaatactgttgatttttgattccagtaattcaacttttatccggataagcagtcaatgaaataatagtgatggtggcaagatgataagtcaccaattcgattcacttatgctagaaggaatcgtaagtaatgagaagatttgggggtgggttgtttcttgggaactaattatgatattttccatttatttattttctgtgttgagttattttctatttctattttgtttattttgggaaagttcagagggattaaaggagagaaacaagggaagggaaaatcatgtctgttattgtaattgagtttaggcttgggagagctaccgggactctctcgaatgacctgggagtgtttgtgtttattctgctactattaataaaacttcctcctatttcctattagtttctttggctgaaacagatacactactggtgtgtatcacaagatgaagaaaacaataaaatttccccacttaaaagtgaaggcttatttgtagccagttagtggatagtccaacattgcataaatagcaacttttacttaatttattatgtaaaactgtacttgattggtgcatatctccttttctgtacttgcaacaggttggtgaagatgaatttggttacatgctttctgatatattgaaggagaataatgtgaattgtgaaggaatgcgttttgaccctggtgcacggactgctttagcttttgttacgctgaagagtaatggcgaacgcgagttcatgttttaccgtaaccctagtgctgacatgttgcttgaagaatctgaaattgattttgatttgattaggaaggtatgtaataatttctactcatatagtgattattctaacatgcaattacaaggcggcaactatagaatcagttatttcacacagcagtcccgttttcaccttcagtttttctctactttctttctgtagcagttatgttacatgagctcatcgttctcattttctttgtcttaattgtccatcattcgtcatcttaattaacttctcaatgaacttaggtggcgtttggttggaggtaatgaaatggaatggaaaggaaaggaaacaatctccattctatttctttgtttggttgcatattaaagtgttggaatgtcattccaatggaatggcctttccaccattttagtggaatgacaatttcattttgaaatggaaggaaagaccattctaatacatgatgagaaaatatttaataatttttttatgcattttaaattttattccatttctattcttattcccattcttatgttttcattcccctcaaccaaacgccacctaaggttctttctttattctgtggcaggccaaaatatttcattatggttctataagtcttattacggaaccatgcaagtcggcacacattgctgcaataaaagctgcaacggatgctggtgtggtaatctcctatgatcccaatctcagacttccactatggccttctgctgacagtgctagagaaggtattttaagcatatgggagactgctgatattattaaggtaaaaaaattaattaagggtgatctgtaccgtattggaaacttggaaagttgattttcttgacaaagccaaaagtaaattgagctaccaagtttgattgttctactttatattttcaggtaagtgatgaagaggtctctttcttaacacaaggagaagatccatacaatgactctgttgttcgtaaattgttccatccaaatcacaaattattgctggtcaccgagggccctggtggctgcagatattacaccaaggtaaacattttttacaaattcaacttttcctgctcatctcattttaaatgaatagttttctcttttctgtataatgctcaatcagtttacctcatttaactgtattccccttaagaaggtttacgacatacaaaagtcaattttagtgtgcagcaattactggtcgtttactaggaaactaaagctccatgatgagatcattcatagtcaatcttccaaagctatctttctgtttatatctttaaagaattggatcattgttgtttgagaaaacatgggaattcgtcttctcctgtgatacaaaatcttaaggatgtatatctttgcaggacttcagtgggagagttgatggtttaaaggtagaagctgtagacaccactggtgctggggatgcctttgtagctggaacactatcacaactagctgatgacctctccttgcttcaggtactgcacattcaaaacacagcatattattcagacgtgtttcctttcttaaaaactttcaatagagaaacttcaattcttgaaaaaatatacttgacttgcactgccttttggaagtttagaatttagtattagtttacactattagatggataaagatccatttatggtcttttaaccagaccactatttttgttttcaatttacatctcagctcaaatagtcaattactcaagtcagtttagcatcctacatatacatcttgttttaaacaagtagcaaacaagtgccattaactaagctatgttcttgaaaattctcagttgtttgtgatattgcaatagtctaacttaagatgtgtctgaattgatgttgtagaacgaggaaaaactgagagatgctctcaagttttcaaatgtttgcggtgcattgacagtcactggtagaggtgcaattcctgccttgccaactagagaagttgtgttgaatgccattctctccaaatctgtagcataaattgggaaattaccttgtatttctgtatctaaaattagctccatactaccatctagtgggttggaagttggagccggcaaaaaaaaaaaacccaaaccagtaaaacaaagaattttcgttcaaatattttgagtgtactcaagtcaggaaccgtctgctgttgtatgtatcctgtaagattgtaatacaaactttgtatgtttattataattagaaaattattttggacagttatatttacaccctcataattgttgggaaaacttattgtaattaactacaatattttctctcattgtatgtcaaaaatgggatacttatcaaacatcacaacaagcaattatttaatatcaaccaaagcaccacaagcaatataaaatacacaaatcaaaaataaaagtgagacaccaagatttttacgtggaaacccaatgcgggaaaaaatcacgggaccgtagtccgctcaaatcatccactattaccaaagttcaataaggagattacaaagttcttctctagaaaaactagaggctcacaacaacatcaaggttaaacaatcttggatcaccaatacaatcatcaacatcatctcaaaagatggatacacaaaagaaaaagtttgggtctcaccaagtgggtattgtagaa

SEQ ID NO: 298323 - DNA, 608 bp, Cannabis indica
ttttttaaaaaaaaaaattatcccttataataatcaaattgtgtgtggaagttcttaataatcaaaatctatagggcattttttttttcctctttgtactctccatggcttcatagatagcttaaaatataaaataaatgaaggggaaatgagagaaaaagagggcaaacaactaagagaaaaaatgattatgaagttttttgtttttgtttttttgaattataagaatatatattaattggataagtatgtatctaatcatagaatctcaaatttcctaataaaatttatgattgcacatataattggataagtatgtatctagtcttcaaagccaaagaaaatctcaagtcttagtaaaaactacttgaatttgaactaaaagaaagtgatcaaattaatcatgagtcaatatataatacacataatacatatagctaactaagttcaagctacaaaattaataggtccaaaattttgactagaatgatgattcatttcccacttgctaactagtaataattgtgatacttcttcttagatatttaaaaataaatctagaataattagcttttttagtccctgtacttatgacactatactatgat

SEQ ID NO: 298324 - DNA, 2288 bp, Cannabis indica
ataataataataataatacaacttattttatgcctgcttaaagaagagaaaggaagagaatagaatagcgagctatacggatagtcatggttctatgattgatgactaccccgatgtggttaaacactatcttaatcactttaagagctacatggaagctcaatttctaacaagctggacatgggatgtatagagaatggaaagaggttggatttagctcaacaattgaagttgattcaacctttctctagtaaagaaatcaaagaagatttatttagtattcctagctctaaaagcccgagtcctaatagttttaattcagagtttttcaaggtgatgtggaaggagatagggtctgaggtgagcaatgcagtcaaagatttttttcggacaggtaaaattctttttcagtttaataaaactgttatttctcttattcttaaagtggaaattcctgtgatggaaattgactatagacctattgcttgatgttctactatctacaagtgcatcactaagttgatttgtaagaggcttgctgaggttcttcctgacttggtgcatcaaaaccagggagcttttatcaaaaatagatccattgctcataacatcttaatgtttcaagatctgtttaagaactatggtagaaaaataatctctctaagatgtgctataaaaattgatcttagtaaagcctatgacatggtggattggggttttctagaagacttgcttgaagccctaaattttccctctaaatttgttatgtggatagtgacttgcttgaaaggaacttcttatacgcttatgatgaatggtagactccaaggcaatttcaaggggaagaaggcacttaggcaaggtgatccgatgtcaccattgttgtttgttctcataatggagtatcttactagaagattgaggatggagactactaagaaaactttcagattccatcccttatgcaagaatctgaatttggttagtcttttctttgcggatgaccttattctttttagcaaagatactctttcagctatgtaacatctaaaggctatcttacttcacttttcggaggtgacaaggttgtgtccaaatgattctaaatctcaggtttattttggcagagttgatcccaatacaaaagaagacattctaagggctcttcaatttgttgagggaacttttcctcttagatatcttggggttcccttgagacctaccaattggagaagggaggattgtgaagctattcttaataagatcaaaataaggtaactaacttgggctactagacatttgtcttttacaggtcgtactcaactcattcatttggtgctcttggggcttagcaattattggatgaatatctttatacttcctcaaagcatcataaaggagacagaaaggctttgtctgggttttctttggggtgtgaaggctgatagaagtaagatccacttggcttctttggacaaagtttgtctcccaaacctttttggtggtctcgggttcaagaatggttctaattggaatagagctatccttagcaagtttgtttgggctatcatggataagcatgatatcctttgggttaaatggataaatgaaatttacttaaaaggagctaattttcagagttatgacttgaagacagactcaagttggtattggagaaagatttgtcatttgaggaagaaattcagtaaggctaatctaagtgatgcgacttgtagaggtaatttttctgcttccttattgtataacaaccctattcagttggagacagataaatattatagagttgtttggaacaatctttccctccctaagcataggtttatattgtggcaattggtgcataaccagttgctcatgagagacaattttaacaaagtttcatattatgcttgatattgactgctgtcttgtgtattggggtgagaaagagagccatgaacacctcttttttgactgtgttgcttctaaggctgttattagaggagtctttgactggattgggtttgaagtttggcctaaaacctacaagagttgcctttgttggctgactttgaatgactcaaacaaggttaagaatgttgcagcaatgttgctgttggtttttgctgctatagtgcatttgatttggaaaaatagaaacaattgtgtacataagagttgctgtttttctattaatagaattgtaaatgacattaaagctatagtctgttagaattattttgccagggtctagatttactaacaagtatatttcattaacatcctaa

SEQ ID NO: 298325 - DNA, 8993 bp, Cannabis indica
aacacctttttgtcatagcttttttgaaaagcagcttttagcttttccaaaagctgtgccaaacgggccctaaatgtggtggacccaacaagaactaaggtgaatctattcttcttttgcattcttgtatgattgtatgatatataaatgtattgttgtaatataatttgatttgatggtctcttggagatggcaacaacattgtgcaggatgttgatagcatccgttatccttatccactttgttaatgcttgtcgtaaaggttttgaagctgatgccagaaacagttaagaagggcacagcagggtggtatagcaaaattgagattacaaatgatccaaaagaagttgttatatgaggtgatgttgtatactctgatgtatgggccagcatggggattaagagcgcttagaattagaactttaacattatcattataaaatattaaatatactcccaattcgaagcaagaacaacttattctaatgacatcgtcacctcccaacatcacctatgaaaacaaccatgatttttttgttaatattttatgatgaaaatccaattcaaaactttctaacttaagagttaagatgctaatttatggatatttaaaataatttacctaaacacttttactttgaacaaaatgatacgaggacgaaaaataatttgaacaaaatgatactcctgtaatgcaacattaaggcttcccttgacaactttatttttaatgtcaaaacacgatgcacttgtgatgattcagcaatagtctcttcaaaatttaattgtcggggaaaaaaacaatgctcctacaatgctacaacgatattttggtatatgatgctattgtcatgttcatgtgagtttaatttttgaagcaaaacaatatattgatgatggcactattaaaacctattttttttaaaataacgatactaaaatttagttattatgggaccacgtcgtaaattacccaacataatgttagagaaaaatatttacaaaattcttttcttctgcttttttgtttcttttgcagatttacttttaaggaaatggattttatgtaaaataatttcaatttcattaatctcataatcctcaactagtaaaaccaattttatcgtgttctcacaacacgacgacacaactcaaaaatgaaaataaatgaatttgagtgacatttaataattatgcgtttttgtaattgccataggtttcataatttcctttttaatgtgttcataatcatgtcatgtcatgctatgtcgtgcgtcgtgtgacttgctaattaatcgtgctatgtttgtgtttaaattttcaacacatttaataatcgcatcatgctcaagtttggcttaatcttgtcatgttataatcatatcgacacaaacatgaaatgatgataagaattgtctgctaggaattgcaaatatttgtagcacttaaaactcaggtcgtccttctccacacgaacatctgtaattgtatatccagaaataatatttacttataaattattaatttgattactaaaggaggattacggagttaatttctttctaaatgcgattatggagtagtcgacggattgatagtcatacgcagaaataaaataaacatttatacatatagtatataaatatatattttatgtaacatgttcagactatccgatgacaaataatagaagccccattttccgcttaaattacagcctaaatcctaaagctgcaaaagatgggtgaaagaatgccaacaagatgaaaatgttacgtactattcagaatcagaccatgcgtgcttgctattcagacccaaattttggtaccgttcttccataatgacggtggagaaaaactctaccgttcttctacgttgaatctattccaagcctcctatagacaccaatgtaaggcagaaaatattcaaggccaagcgatgaagctaataatgcttctccaaattgataatgatactaaaatatatatatgcatatataagtcataacacaggaactcacctttaaaagatcgaaaaccttttcacaaatgtatttctgctgaatgtttgcaccccgttgctgcagcttgtcgggatgaaccaaaagtgtagctttgcggtaagccttcttcacggcagcagctgtaaggatgtctatcagaggaattggctgccaaccactatcaggtccaaggatctacacaaaaggaaacatctaaataaataccattttgtgataatttctagccataacaaaattcaaattagaagaatataacataaccaaaatctataatattctatttattctccgcaacttcttttggtctatcataacgtgatacactaaaaaactgtataagtaattcaaagtcattttcactcaaacttgtttcgcatctttgcaaaattacaaattctaaatgacaggctccctcattaaaattttgatgtcattagtaaaggcaaatatatgcattgaatctacatagagagatagaaggttaggcattacatattggagtgttgacagcaatgcacgtaaatttccctccttcccactagaccaccttttgacctcgatatcaagagtttcagctaatctctgccacaagaaaattagtttgagatgataagaaacacttcaagcctaagcagtctttagcgaaaagttccttaagaagacagaaattaaaatttacatgtctctctgcttgctccatctgtgcaagtagatcacgcctattcttttctgcaagagctttttcctggagacaaaagaagaaaatgaagaatgcttgttttgtttcaatgttgtaagcttgagtataaaggggtcaataaacataccgcacgttctgttatcctatgatgcctttctgacctggctttatgcctctcagctgattcgtcagtggttccatcaaatctctcagcagtgttggaaactgttaagcaaaatataagaattagcttaatatgtgactatagtctccttcaaaatgatattatgatagtaagccaatatattttattctatgtattaacttcagaacattattattaccatgatctgaagaatttgggtatcttgaagtgcttgcagaggatgatcctttatgttgtggattctgctttcttgcttcagatgcaaacttgccagacatggctttttcaagagcacgctcacgggcctcagctgttgctctctccacagcagcacgttgtgctttaagtttggcttccttatcaggctctgcagaagtctttccaactctttcccgtgcctcagctgttgcctttctacgagctccagtagctgctcttcctgcagcagctcgttctcgggcttcagcaaatgccctttcacgagcttcacggattgctctttcaacagccatcctctcctctttcgctctttccctttcctttgcttcatttatttttctcaggtgttctttctccagtttcatgtccttttgccaactatcactggtttcactctctttcggagtgacagttgatcgatgagtctcctcattggtttccatactttggcatggcaaggtttcttgactattattttctttctcctccacacttattggggcttcttgatattcctgatctttttctgtactcgagcttgtccttggctcctcatttagctctatagttatcccttctccttcagaagtatcggataactcggatgctttcatagtaataccattttcagcccatgtttgctcatcgctaccctcagtctcagtgctactctcgtcatcttcctgactcatgccaagatcagattctttatcctcagctttgtccatttctgaattcacttcttcaacatacagttttgaattacaaactaactcaaactgtgaggcatcttgatcgtctggattttggacaaaattaatggcaaaagtatctacattttctgtatcatttttgtccaaaaaggtactctccatcttatcttccattggcttcactatcttggtgagttcaagacctagtgaaaagccatgtgtttcaggtacatatctgtcccccatgtcatagttctcttcaatagattctagtttattcccacttacatttggttccaagaaagcatcacttacctcttcggatacttcaacagaatcattttctgcatgtgaagtagatttctgaaatttactcaagttgtcacttttgtccagttggcatagatcatcagctgccctgagattgtttccctggttgcactgttcctctagagttgttttcaccttctcatcatctcctggacttggatcaatttttgcttccacattttccatctccgccctttgacaagtctcttcttgtctgttctcattgacttcctcgtgagaagcatcctgttgaagtatcttctcatttcctcctgtctctccaagattatcatttccttctgatttgccatcaccaacaagtatgtttgcaatttttttccctagatgaagttcaaattgtgtcttctcaattatttcttccccgttatctctgctaacgaaccttttgccaatgtcttctacaccatagggattgttatgttccttttcacattctttgggctcgaagacttcctcttctttcttatccttttcaacacaatcccgtgttggtgattgtctcttcatatgatcgacatcctccagacactctattgggtatttttcacattgattgctctcatgtaatgcttgagctatcttctcattttctcccttcgtccgggcaacttgcttctgatcaattttctcaagatcgaaaacattgacacctggcattgatttaccaccgccaattccaaagtcagatattccactaactccattaagtctacttatttcattaaatttctctgggtgattttcttcttcagctggttttggtccctcaacaaatggttgtggtttctcatatggttcctgctctcttttcttctccttcacatcattaaattctgatgaagtaatccagtttctatcagagttctcaatttcataaaattgttctgctgcctctaatggttcagcagtttcctgtctgtgatccccttcacttgatctaaggctattagaaagtgtttccctggttgactctttggtgcttgaaacaaactcctgaacttcaatgtctggtcccattgcattttgatttcttgtcatagcagaaacagacgatggaatattcaaatctatggttgtagaccaatgttcacctgtgttctcaacttcgtaaaactgctctgtagcatctgatgcttcactttcctccaacctatgatctacttgacttgatggtctctcccatggtgtagcttccctatcaatctctttgaaaagcctaacttcttcctgaacttccaagtctgcagttacttgaaatgctccaactgggttcttctcttttgtcctggaagaaacatgcaacggaacatttacttcttcgcatagttcatgattcttcttctttttcaatttgtttactttgttagcaaccatatcctcctttctttcctcgggtttcactctttcattagagctcaatttcacacgattttgcataccagccttctttctttccattaactcctttgccatttttatccttgcttgagcctcctctattgccttcgtcaaagcagctgcagaggtagcagcaacagaattcttgtctatttcctcatacaaaaatggtggtgaatcagcaccacaagaaccttcgggagtatcagtcctaaaaatcccttcacccttgcctatattaatgttagcttgcaggcttgaacaatgctgtacttttggttttgaacaaagagtttcgggtctaacttcatctttgtcaaataacttatctgttggatgagacttaaaccagctagaattattttgaaattcagcaccactaacagaagtctgttttccagtctctcctgctgggacaactctcttgactctactgacattatttccttctgttatcccctcacagacattggcttttgggacagtaccatttacctctgagaatactggcttatcatcttcatcaattaaacgtgcatacccttgaacagcatggagctgagctatataagtcgttccatttgtcccaagtgtaccatttgcattgccattgttgattttattgtatgacacgttgaatttcttgacttgatgcactgtttcccctgccatatcatgattcaactcgttgcaactggattcttttgcagcctctggaggcgataatctttgagctggtgtcctgcatatttgcaaaaatatatgaaaattagaaatcaaagtcaaaagtacaaaataacaaacactattccattcaatctctacctctggtagttgtgactctaattcaaaagaaactgtccatttctactcgataacattacgtaatatacaagaaaaagaaaactatcaaatagaaatggcaaaaatgaaaagacttaagttatatacaagtgaaaaattatacaagaaaagttttcctgaagaaatttagaaaagaaaataataagcttggttccaaaagagaaaagtttatgaaaagcacagatcgacctctgctgctaaatgtaaataaatatttgatgtactcctccataaccattcactcaagctagaaaagaaatatatatgtgtgtatgtacatatcgatcacattcaaaaatcgaagaaatttgacatttcgcattcaaatttaaaataaggaaatacagtgttatgcaacttttctttttaatctagtttaaagaaacaatgaaagttttagagtactagtaactgcacactacataccttgctcgctcagattttttccttttgttcgtttcccgagaaaattcctcataaggcactgcgaaagttgaatctccaaaaccaccgaaaatattagaatagtcaaggttcgagctccgaacgtcaaccgaaatcttcggctctttaagctccggaagttcaaggaaaggaatcgatgagccaagagaagcttcagaaccaccaaaaatctcgcgataatcttcaacaccagtcgagaaattaggagcactaaacttcgacggggcagcgaaaacgccgtcgtatatggtgtttccggagaaactgtggccgttggagagcttcttagagaaagtcagagacgaaggttggtagtccatggccaggtctcaagtctaacgcgctttctcttcttcttctttaggcaaaaaaaatctgcgaagccaaaggagagggggaaagagagaagagacttccgtgaaaatgctgtcttaactgtcagaccaaccgtacaactcgtccgagtcggcgatttattataagctcgtactcgtcgtacagccaaagactcgggaatcgccgcaacgggttacgggcggagccggtgattgagagagactgtgaccttgagtcttgacctccctcaccaatctccatgaaattaatacttatttgattgggtcttgtcgcgtagcattaattaacttttgaatcaactcattattactagtactattagcgtcgtagaagggtattttcggtatacaattaattaaggaaggaaatttttatggaaaaattatatttaaagaacactttattttaataatttttattttattaaaatttatatctttaattatattaaattttttaattcaattcatatttttaaaaaatatacttattaaataaaaataaattatgaaaataaaatcaaaataaatattaaaattaatataaaataatgtgaaaaaaaaaattaaaagtaatttttaaaaattatttgaatttatattttttttaataataaagtatgtttattattttattgggtacaaatagaagtccctaatttttatttacccaaaatttgtactcaccctattttaataatttaatctacataaaatttgtatttttaattttactaaattttgtaaatttttttttttgaatttatattcttaaaaaatatatttattaaataaaaataaattatattttacatgataaaaattatgtaaaattttcttaaaaaatatacataatttaaaaatatttatataaaataaaattaaaataaatataatataatgtgtagaaaaattattttaatttttttttaatagtagagtatatttattataaaagggtgcacttataatttctcttcggttgttttcttaaacaaaataatattatttgaagacaattcataacatcaaactgactttatgaatatttataaatatataaggtacataatattatctcatagactcaaaccttactaaaaattaataaatggaatacggaatcaataatcgtatttatttttactctactttttatgtttagacaactaagccataaacattgttagacattttactttctttccttttttccgtttacctattttatagttttacataatacttcaatgttttttcttaagttaaacgaaatttccattaacaagtaaatgggacataatccattacatatagtttataaaggagaatcaataataatatactaaccaaatcatttataataaatatgtaaaaaagaaaaatatcttcaatttaaagactcataagtagtcaactataaaaacatcacaagaatgaaaagaatacaattttcatcctgaatgaacatatcacaaattacacttatcaatggcaattaaccaaagactttttaataaaaattgaatagagatacctcaataattcaaactagaataaaaagaaaaaataacaaaaccaatcaagccaaagacaaccctactgaaagattgatccatagaataaaaagttaaataacaaatctagggataccacaaactaacaccactgagctagagaaattcactcagaataaaaattaacgactctcattgatctaatgagagggtgacag

SEQ ID NO: 298326 - DNA, 2918 bp, Cannabis indica
ctctctctctctcttctctctttacacgtcacacacatacaaagtgtgattggataatttttccaatcttagtttacaatgtctcatgggttaagtaaacaatacaacagaaagatttatacatcatattaaatctataagcccacttatatcttgggtgttgaggctgatctaaaagatcacatgtggattcttcatcaaagccattattggattagatgattgatacattatacgaaaagattcaaagaaatcctgataggtaataagaggtaatttcttaatctaacaagttagatttagtttacgtaattttttgttgagatctagggtataaggttcatatcagattcaacaaaatattaattttaaaaacaaatcatatttctacttttgctacgattctgatatgaatttaaaaaactaacagtggtcgcattagccttggctctagtcctcgttctgttcctaggaagggaagggtccttggatcattctccagttaacgtcactctgcaagaggatgtagcttcaagtgtaggcattactatttttctcttggggttgcgttccatgagcccaagaaagtcgatcatcagcgctgcaaaatgcaaataaagaatagttagtaaataggaatcagcatgctaaataaagactaccgcccacattcatgtacatgcgagaccaaaagctgcaacatgtgttactagtgacagaaggaccatctggcgtaggttgtaatcgttttttatggatgcaagttgtgtttcactatgtgtgctcttgactggaggttcaagctcataatctttgtcagcaacattctcactctcaatggctaaagtcaaaagctctaaggccattttatttccacctcttgcagtttttaaggaaaaattaggtattgtatgctttggtctaatgtactgagcatatgagggttaataagagctggtaatcatcgagttcatttttgacgacccatttctcaccataagatgattcgtctaagctaatttaggttaacgcaggcttggtttagctcaagtaaagatgtttcaaaagctggaaatggaagtgaagcttgaaaagtcaagacaaaatttcttaaattttgaatttggagggctagttcttgtaacaatggaatttcgtcgatgttgttgaaatcattgagttgcgttctttgagattaaaaaaaataaaaattgcctatggaaatgggaatcttgagacatgttgaagcaagccctagcagaggtctcgaatttgttattggcatgtggctaaggaagataagagagtgatgtgaatgaaagtaaatgttgaactctcatatttataacaagatctcatataattctaaggcaactagaaaatcaatgaaacattatctttttttgaaaattttggaaaacacccagatcatagagaatctttgtaggaggccaaaaatgaagataacgtgccaaaaagtgatgccaaactcgtggttttgaataaaacagacatacaccgtgttgataagttagcatgacacctatgtcatactgacttataggtaaatattacccaaaaaattgacccgatgacatggaaaaaacttttaacacgtggtaagaaggaaacaaccctagggcgtaaccactgaaactaaaagtggtcaacctgggcattaaagttgtgtcaatgccctggttaacaatagtgggggcccaggtaggcactgagatctagagaagacatttttagtgcctatcctttgacaaagttcaagtgaacatgactcagttaccctaaaacgatgaatcataaagttaaggatgtcaaatgggcatcccagggctcaacctatgtccaacattagtgttgggcgtctaggttcacatcctatgtgccgtcttgcatcagttttggtttctatctaattttgatgagcaatatggttagccattatcctaagatacatgagagacatgccccagcatagtttcaaactttgcaaatgagttacatgaaatggaaactgggcatgaagaagccctaatgggcgcccaggttcacatatagtcaatgtgagcgaattgttgctagctttaggtttcatgcgacatacctgggccccggttcctcaaatccatcaaagggaaaatgtaaggacatgatatttcatcgctacatctcaaaggagcccatctacaactatgggcccctaggttgacattctaacctaagagctaatttgtttcaccgagaaatgcccgtgaaattttgatgaagctaaaattcttggagcacttttcactaaagagaagattgggcatcaacagaactaatttcgaagatggctcccccacatggacgtgtactctatgccttgaggccactctgcttgtatttatttctgctgaactttctaactcttatacatagaaaatgagactcaatttttttactagcttatatatataagaatttttctttcactcatatgaatatctaatttagtttatctattcgaataatgaataaaaaattgaagatattttctccattcaagagagcctaggttgattatctcaaccaagggtagtttgtcaattatttttagagaagtttttttgggtatttcccttatttttgtgcacgagaaagatataagtgctttgagaaagcaaacaaagccatctaggccccatatgaaaacctgggcacccagggtgatagctgttggaattatttttaccaggatcttagatcaactcacaagtatgttgatttaacaacctaaatatgaacttataaaacgattgaaaattaaacatataaaagtaagagaaatcttacattgggtgcagcggaatatatgtctcctcccactcacatctctaaccccttgattcctttctgtcgca

SEQ ID NO: 298327 - DNA, 983 bp, Cannabis indica
tacccttttgatacccataacataattggtcacttaattttgtatcacactttataatagcatatacattatacatatgtgcccacaaatgatttttaatccaacactgtcatgtaataatgtcgtggttaaaaatcaaattatgatgaggtaatacaattaataatgttaaacgttgaaataatatatatattatggccaatataaattctataagtgtcaccctttgatttcatatagggttaagggattggttggaatagtgggccttattacaattagtgacaaatgtgggcaataatactatacaattttggaatttgctgtaatttgcaaaagctaccctttattcttcttataaataaattacctttctttctttaatcggctttttgcttatgtatgcaatcacaaagatttatatagcaaatggctctatatactatataataaaaacaaacaacaataataaagtttctttctataggggcaggtaggacaaccttagattgtttaatgaaactttgtcactgaaaaagaaactcaagatatagataataattattttttaagggcaaaggaatgagtggaaagcccattaagatcgaagaagaatataacacctggcttaaattatagaagtttgttggagtctatgtagatttaagctaggttggactagtgtaatatgattggcacaacaatatcttcaattcttcatcttacaagttattaaattttgttttgttatttttattcaatttatatatgatatactttttgagcaatgtgagacaaggtatgatgaaggaagagaaggaaaatctatttgcacatggtcattcgcttgctataacattccattaattatatatggaatatctacatatataggagtggattttactcagtcaccgtatagttcgctggtcattttgtggtcattacaaccattagatcaagaatgattagatctaacggtt

SEQ ID NO: 298328 - DNA, 1601 bp, Cannabis indica
gagagagagacatagctacaaactcaaacctcaatcatagcatccctgttgtttcatgtgtctaatgtatatctccttatcaggaaatagtggacaatcaagcaccgggtttgatgaaggaagctgaaagattcttggtcttaagcaatattgatcggttgtggaaagaacacctacaagcgctgaagtttgtacaacaagctgtaagtttgcgcggatatgcacagagggatccacttattgaatacaagcttgaaggctacaacctcttcttagaaatgatgggtcaattgagaagaaatgttatctactccatttatcaggtttgtatgataattctatgatttatatgtatcataggtttagggtagtgttttctgatgttgatatgttttaatgtggcagtttcaaccaatgatggtaaaaaagaatgaaggtgacaatgatgatgatcaaagaccaaagaacaagaagtcagccaaagtggtgaccaatggtagggctaatgaaaatgttgggtcgtcgtctgcaactgctagcccccaagccagtgtttaaattttacgatacattcctttactgtcatattgttgtatagagtcagaataatcattcattatttcatcttgtaacttctgcaaatttgactattaacagagcaaaacatattttggcaacaatctacagaattatatgtaaagttgcttccatttttattcttggcaatactctatagaattatattacaaaaaaatctcaaacagatgagtataacactagtgttgtgcccttgttagctcattgggtttctgcttttgttaaatcacttgcaagaattgttattctgaattaataaaataaaattagaacgaattaccgaataaagattctagttgagtcgcggactatgttgctctttttaagacgttttgtggctctgcttaaagtgtgcacagtagtctaacaaccacgacgtttccaggataaaacagcctttgtacaaatcattttgctttgaatgatatcgctatattacactccaacaaatgctctgagaaagatcggaaggaagaagagaaattttttttgttgtgtttgaaaatatgtattattccgtagttttgatatgacttacatagagaagtcaatatttattttattaaataattttttttgtaaaaaataaagtgaattatcaaccatgcacacaaatttaggtgacccttaaagcatttttaatgctaaaattttaaaaaatgctcggtgaggtggatatttgaaaatatattaatttagttgatatgataagttgtacaacaactttaaaaaaaaaaaatactagcgttggtatattgttaaaaacaatagaaaaaaaaaaactaaatagtatcaaatttagtattgttttcttttttcacatttttctatgtgaaaatcatcagtcataaattgatctttgtttttgtgagagaattatttaaaaatatattaatttagttaatatgataagttgtacatatatatacacatttattaataatactaggtgattgttacgtgccaagccacgtagtgttagttttatttaatattttagtttt

SEQ ID NO: 298329 - DNA, 4650 bp, Cannabis indica
tttttttaacttttaaatatatatattgaaggattagccattgctataaagatactcttataattcaatattaagtgccctgtgctatgatttggtctgattcattgaatggctcttacctttctcctgtgaccttgaagttggattctgattttttgttattcagatatctgctagatggtgtccagatgaagcatgcaggcccgctcttgttgaagcacctatatttcatcctactgtcgaggtatttgttttctgaggaaaatattcttaattaggtttgttgcatcactaacattatatgtgttcaaatctttttaggagttccaagatacacttggctacatagcaaagatccgcccaaaagcagaatcatatggtatatgccggattgttcctccaccttcttggactccaccatgccctcttaaggatgtcaagatttgggaacatttaaagttttctacacgtattcaatatgttgacttgcttcagaatagagaacctatgagaaagaaaagcaaaagtcgaaagagaaaacgacggagaggctcgagagtgcgaagtgccaggaggaggacagaatctggttcagaagctaatactgcttctgagactgatgagaagtttgggttccaatcaggatctgattttacactaggagaatatcagagatatgctgatcgtttcaagaagtgttactttggaatgaaggacaccaaggaggaaacaagcactagtgcatttgaagataagaaaagatgggagccgtttgtggaggatattgaaggtgaatattggagaatagttgaacaaccaactgatgaggttgaggtgagacactggttgtaaatattttttctgaccttttaaatttaatatatatgtatatatatatattcatttatatataaaactctgcttgcaattgatgaatgctgttgatatgtcattgcaggtgtactatggagctgatttggaaacaggagtatttggaagtgggtttcctaaatcatccaccgtggaaactaaaagtgacatggataagtatgtgacatcaggatggaatctaaataacttagcacgcctgccaggttctgttctgggttttgaagaaagtgaaatatctggagttctagttccttggctatatgttgggatgtgcttttcttctttttgctgggtacgtatttatcattgtgattgctacttgactaagttggttgtaaacaatagttatttaccatatatcagtggaatttatggggttggatgagttagattgtgtgtttagagctcggtagtgacattatggtttttcactacttagatatattgggcttcactatctataacattacagtattatttatttatttttttcactacttacactacttatagtattattattattataataatacagcattacagtattattataatttcccataaagttccaagaaaaattattattattccctaaagggtcggagtttgttataagataggaagttacaaacctaccaacttctggacatgctaaaaacacctatattgaattgtctatctatatgcataatgattatactcatgtttagtttgcattgcacaacctatgaagaagaaatactactttcttgcattagtatggttttattttcctgttgcaattcatgctaattttaacttccacgaggcttggacagcatgttgaagaccaccatctctattcactaaattatcatcactggggtgagccaaaagtatggtatggtgtaccaggaagtcatgcttctgcattggaagatgcaatgagaaagcacttacccgatttatttgaggaacaaccacatttacttaatgaactggtaattcatttgtttttctcaaaattaaataatttccatagatgattgaatttagacattagtttttggatgacataaatctgtttcttatcttatcttattatcctttggcaggttactcaactgtctccgtctgttctgaaatctgagggtgtacctgtgtatcaagcagttcaacattctggagaatttgttctcacctttccaagggcataccactctggatttaattgtggttttaactgtgctgaggcagtgaatgtggcccctgttgattggttggtgcacggacagaatgcagttgaactctatagcaagcagtgtcgcaagacatcaatttcccatgataaattgttactaggggctgcacaggctgctgttcaggccctttatgagctttccacgaatggaaagaaaactcctaggaatttaagctggcaaagtatgtgtgggaaggatgggattctgactgaggcaattaaggtaatgttttgttcattcctacgtactatttttgtttttgaaaattatagctggtgtttagtcacataaactaattgatgtcttcctaagtggagaattctcttgagcttcatagttttgttttttccaacagactagagtaaagattgaagaagaaagactggatcgtctgccaatttgtttgaagctgcaaaagatggaatcagattatgatttgaaagaagaaagagaatgtttctcttgcttctatgacttgcatctgtctgccgtcagctgcaagtgctcccctgaccgattttcatgtcttcaacatgtaaaccatctatgttcatgcgaaatagagaataaatgtgtcctttttcgttaccccattaatgaactaaatatgcttattgaagcattagatggaaacaaagaatctttagaagtatggtcatcagctcatctagttgcatctgttgataaagaaggtaacagtgtaggcaagccaaagatggaaaatggtaactggagaagtgactcacttgatcaaatggaaacttcatcatgttgcccaggaacagggacagaagagaagttgaacacaaatgcttcttgcagctcaaatggttcttcaaaagaggtccaatcaggaaccaaacagggaaattgtagtttgaacacatctaatgtcactattcatagtcataatagcagtggtgaagctgcaatcacaaaagaagataaggtggatcaacagtgttgtattgatttaaatgttgattatacctccgatgaacatgaaagcggggtattgtgtatgtctgataaaagtaataacaatactgtgatggatatggaggagagttgcacaatgctgtgcaatgaaggaaaaggttctgcttctgatgtaggaagagaacaaaatgtgaaggagtttgatagttatcatcatttgtctactactgatggcactctgaacaaagattacccaatgcgttcaagaaacatggacagaagaaatcgagtagttgattgtaataagttgtttggtgttgatctcttatcttcaaaatcacattcagaagttccatcgttcaacttgactgaaacagaaattttgaacactttggatgtaaaaccttctacttctgacctagaagcttcattatcaaaattggatcctcgtatcgagcttataaatattgggtatattgtctttggaaagctatggtgcagcaagcaagccatatttcctaaaggtacgttataggagtagaactatagccttgaaaatagctctaatttctttagaattacttgttattgttcttgtgttgtttttactgaatgggttttcctaaatttcttgttgcaggatttaaaagccgtgttgaattttataatgtgttgagtccaactacaacctgtacctatatatcagaagttcttgattctgggctgcttgggcaacctctgtttaaggtctctttctctcttctctttcagttaaacacattcaatttaatagggcctccagatataatagtgcaaattcaattagtttttgggtcactttttccttttcatgattaaatatatcaattgcttaacttaggggaaatttttccgtgatatcgttggtagcttactttgaaatagcattaaaacaaagagaaactataaaaaggaaaagcattcaaggatgctgataaaccctcaatcacgtatacctaatcccagaggtatgctaagccttgtgaggaggctactgcaatggaatgacacctcaacataatttagccagagaatgagagctaatgattagttgactgggcgcacttgtttagtttattacacatttgttaggaataaaactagaggaatgtgtgagggtgccgagaaatgattttctagaagacgctttggctaggagaggtcatacccttaaatttgcctgggttaatcaacacaaactagccttaaatttccatgtctcctctgtttcttgttctctggttatctgtgcttttgcacattcctgtctgactgtacctgggcgcatattttgttggggttatagatctcattattctttattaatatttattttaactttacttatttgcagtaaaaaaactggatatgagataaggaaagtaattgtgtctattacattagctaaccaatctcaagggttactaggggccaaattgtgtaatttatgatttctagcttcatttaattgcctatgccagagaatgagtcataaatgaagtagtatattattttttgtttttcttttattaataaa

SEQ ID NO: 298330 - DNA, 2291 bp, Cannabis indica
attaaccacttaaacaccacgcaaataagattaacttcatcaaatcgaaaactaaaacattatacctgaccttaccaaaatgatgaagagaaacgagctggttttcattccagtgcccggaaaaagccacttggctccgtcagtagagtttgcacatgagttactaagaaaagatgatcgattttctgtaacttttcttctaataaattcttcatttgatatgagtcctattccaatgccggtcagttctaatccccacattcagttccttcgtgttcctcaacctcaatcctcacaacttccctcacgagacctaatgaaagactcctttgtaaactacacaattctttatattaagagtcacgctcctcaaatcaaagatatcatagccaaccgcttctccaccccatcctctaatcacttctccggattgatcatcgacactttctgcaccgaaatcatcgacgttgccgttgaacttggtgttccctcgtacttattcttcaccagcggcgcggccattctgggtttattgctatacctcaacagcaatacggacaagcttgatggttctgagtcagatgtcgaccaccacataccaagttatctcaacccagttccgacgaacgttttgcctacctcttttacggacaaggaagatatgatgaagactcaaggcaataacataaggaaaaccaagggtataatagtgaacacagtactggagttagaaactcatgcggttcaatcactttccgacggagtaattccacctctttataccgttggtccacttttggacattaagggtaaggttaacggtagacaatcagatcgtgaccagatcatgaagtggcttgacgatcagccgcccaagtccgtggtgttgctctgtttcggcaactatggtgctttcagtacaactcagctgaaagagatcgccattgggctcgagcgcagcggtcagaggttcttgtggtccgtacggaaatcccagtcagatggcacaactgaagattacgaaaatcccaatgaagctctgccagaaggattcctggagaggacgaaggaagtgggaagggtatgtggttgggctccacaagtggaggtcctagcacacccggctaccggaggtttcgtgtctcactgtggatggaattctatactggagagtttgttgttcggagtgccgattgtgacgtggccaatgtacgcagagcagaatatcaacgcgtttcagttggtgagggatttggagttgggtgtagaacttacattggattttagaagggacagtggtgatattgtaataactgctgaggaagtagagagatctttaagatgcttgtttaacagtggtgaaggtagtttagtaaggaaaaaagtagaggagatgagtgataagtttaggaaggctgtgtcgaaaggtgggtcttcttacgagtcatttagatgtttcgtggaggatgttttggccaatgtggaacttcaaaattagtgttaagcagaaaccaattgagctgtactttcgtagtaattaaaatatagttgtatatcatattcatatgttctgttgtagtgatgtatgtttaattttcatggcataattatagcggtaatattattataagagaaatgctaatgggcatgtgtcaatgtcgctattcatccaactaagtattgggtcccatataatttaatataataatttttagggaatattgttagccaatcgcaacgcgacatgtcgagagtgctaggcagcaccggtgtcttatagcaatgctcttattataatggctcatttccatattttctctttctaagtttaccaattcattgcctaggagacacttgagtataaggattatttatagagagatgctacaagacagtcgagtactataataggtggtacaatttattattggatcatgcacattttaaatcttacaaaaatactaattttttttattgtcaaatatatatatatatatatatttttacattttttttataaaagtttttaaaatattaagttaaagtttcattattacaaaatagggaccggattttgtcccgttactgtacggacacggattgcaatccgtgatgtactgtaaccgtcggatgggcagttactttgatccaaaggttggggttcagtgtagggttgatgtaggggtatgtagggttaaataaatggataccggctacttttttgaaatttaaatttattaaaaaagtgaaaagtgaacagttacatccatcaatcaagtcctatcaaccta

SEQ ID NO: 298331 - DNA, 3502 bp, Cannabis indica
gggagttagcttaactcttctaacacaactcattggtctaattctatgtatattttttaatcttttgtccaatatcttccaagagttaactttgaataatatatttattattggattattatttgaatgatacggtgacagacaggtgaattatttttgctaatatttgtctacattggacatgtgtatgtatcattaaacacacatttcgtatttaatattaattaatttaatttattttcatctgtagataggagaacttgctgggctggctgtgggctctactgttttactgaatgtgatgtttgcagggtaagacgacttatatgttttttaattttattttgaaccaaaattatcgtattttcttgaaaattgttacgtgtaaaactaattaagggtcatgattatattctaatgtaatgggttgggcttttaaataggccaatatctggagcatcaatgaacccagcaagaagcttgggtccagcaattgtggcaacccggtataaaggactttggatttatcttgtttcaccaactcttggagccatagctggagcttgggtctataacttaatcaggttcaccaacaaaccacttagagagatcaccaagagtggttctttcttaaaaagtctaaggcgtgagaattccggttgatcaaaagatgtagcagtggagaccaaaggacaagtcaaacaaatgctgcgatcctttctctctctttattaattaatacaaagcactgaagccagctactagctagaccagctttctgaccatttcttttctattaggttatttttaactgttgctcaaaattgtggaaaaattatgtgctaccaatgtttatgcccgtatcaagccacagcaagtgatatgaatgttaagcaaaaaaaaaagcaagtgatatgaatgaaaatgtctcccttttgttcttttctgtaatttgctttagaaaattagtcttttctctcctcacttttgattttgtctttaaatgtccttcaatttaataattaaaattagtcttttatctcctaactatttcttgctctcaaactttttatttattactaagttagaatattaattttgtttgagaaaaaactcccaaagaccacctttcaatcgcaaaaggggaggagaagctcactgaattaatttatctcactaaaaataagattgtaaatagaataaggccactaaaccttgctaataacttcctacaagacatatttagctaagaaatggacaatagatttatagatttaggacaaaaagaaagactgacagagtgaaaaacaaacaaattatgcctcataaaactaaatccaaagcaaaaactaaagaaacctggttattaaacttcagaatcacattcaaacaatgagaatcaaattgcacaatctgaaaaaccaacaagtggcattgaatggcttcatttttttagtgctaaagcttctgtcatttcaggaaagaaactacccaacaagtgccaaacagcagaagccaaaacctcacccttggaatcacaggccaccattccaaaccacatcttccattattgtaattaagggcgacatcaacgttaactttcacataccccaaagcaggcagatcccaaatatagttcaaggaagcaaacaaagagtagggtgggtttccagttgagagaggaccatttggagccatatccaaattcaaaaaatcagcaagatattcacgaccctaagaaacaacattgtttggagggagcaacttgtcgttatgtacctttttatttctcctgaaccatattctccacagaacaactaaaatcaattctaatgaggccacgagcaatggatcacgaaacttgaggatgaaatcatagaaatcaatacaagtaacaagagattactcaaaggaacaccacaaagtttacgacaatcagctaaagaaggacaaccccataaagcatggtgggttatttctaagtgaaaattgcaaacaggacatacctcgtttgtcagacgaccatgcttggtcagattacatttagtaggaatccagttacatgaaattcgctaggtaaacgtcttcacattttgcggtaaattaagagaccaaacttttttccaccaccctgagaatcaaattgaagaagatgcacaacccaaccccaacttttgaatggccaaccaataacaactctactgaataaaaatcagagctatcataccccaaattaatttatcccaagtcaaaatggaaggccaaaggatagagagaatggcagtagcttcttcaggtgaaaataacccactaatcaaatcaatgtcccagtcccccgagtcagatctaagtttgcataagtgcttcctactccaaaaaaattaggagacaacacaaataatttagaaggtgagggaacccaaccatcctcatacaccttaatgtcagtcccatcaccaaccctctaaaaagagccaacttcaaacaattcctttccccatcagatattcttcctaataaaagatccttttttagacttggtcatcgacccaaaaggcttatgtttgtgggtacaaaccttttaggactctagcaaccagggaattcgagtcatcataaaggcgccaagcttgcttagccaacatagtttggttgaaaaggtgtgaatcccgaaagcccataccatcatcttgcctatgctagcagagcctttcccacatacactaatgcattttctgtttgacatcatcaccatcccaccaaaatctagcacacatgctatgtatacttttatcaaaggttaaggacagcttgaagagggacattgtgtaagttgggatggattgaacaactaccttaataagaatctcacgacccgccatagaaaaggacttggctttccaactgttatgctttttccaaatacgatcccgaatagaattaaacaaaccagatttataatgactagaaagacaaggaagacccagatatttttcatgacactcccacaacaccaaggacatttatcatatcttttatatcagtgatcgtgatgttcgggctaaaacacacaatagacttatcaaaatttaccatttcatacgaagttgaatcataccaagccagaagcaacttgaacctctcacacgccatcaccgaagccttaaagaagaagagagaatcatcagcaaacaataaatgagagataatcggtcttgaagtttcataagaaaatccatggagaaaactatcagaataatcctttttaaccaatacaattagaccttcaacacacaacaagaaaaggtacggaaacatagggtcaccttgtttgtgttgtattatattttaccaggatctatatttactaacaagtatgtttttaacatcctaatatgaatttctaaaatgatgaaaagaaacacataaaaggtatgagaaaccttacagtggttgcagcggaattaaatgactccttccgcccagatctctaacccttgta

SEQ ID NO: 298332 - DNA, 2558 bp, Cannabis indica
gacaagcactttattaaggagaaaattgagggtggtcaaatttgtatgccttatgtccttaccgaacaataagtggcagatatctttacaaaaggattatgtaaaaaatagtttgattatctaattggcaagttggctatggagaatatttttagtctagcttgatgggagtgtaggaaaatcattctatttttagtattattcttgtgtagttattgtaatttattgttgcatatttttagggtattgttaagagttttattctgttattattatttgattttatttcccttttaagggattcttggacactttaaatatatgcatttttttgagaaataatatacagaaattaacctctttattgacttcaagatatgttgagaatattcttgagatgttcttgaattataacaaaagagatatatcaataatgtattcaaaaattttggcatgaagatactataccagatgataggcttgcagctaaagaaaattagttgtctaagtcattgccctaaaagcaaccttagaattcaagaaaaatagaagattcttaatttatattgaaatctactatatgctcaagcatgtatgtatttgtacttaatacacatattaagaatgttggatagatattaaagtaaccaaataaggaactttcagtatgcagccaaatggctataaggaatttaaggagaacaaaatactatattgtaataccctaagattaaggaatcagaatagtaaaccctaactagttaaatgtgtattaatatattataatatataatttaatatatatatgaattatattgataaatgacatgttaagaccccgttggtgagccaagggtattttcataattttgacatgagaagggtaaaactataattttaatgtaataacgtgcttatggactatattattatatagtatatttgttctgtctttttgcaggtattttctgataagtcagcgtggtatagtcacaactggatattttgggccgaactgggtctaaggcccgaaatacattttttggattttattttggcattttataaataattgaataatctaaaatttatttaagtttggtgtgtgatgaaatgacaatttctcccttgttgtatgcatatgtagtgtattggccctaggggcattttggtcatttaaccatttgagtttattttcaacaaaatggaatttttggcaaaataggaaacacatattcggatttttcccacagcccttaaccgacccctcctccttccctttttcattatcttcaagcttagcaattttgttggaaaatcaaacttggattttggtgttttgaagctagttgttgctggagaatttgaggtagttactccactcttttaattctgaaatttatgctaattgtggtggtaaatggtagtgtattgatcctctggctcttgaatgcatgtatgtgggaatttgattattgtgttagtaaattagtgtgaattgctcttggtatatttggaggaggttttaaagattttagttgtgcttgaatctgaatttggttcggtttggtattgtttcaagtttggaaatggaagtttgatgttagtttaagtttagaatttgttactagtattgatgcttattgacttgtgtaaaatgcatattttggggttgttaaagcttgaattggtgtttttaattctctgttgagatgactataatctatggataataagtttgtgtttgtgcatgtttttggttgagttttggtatgtttgggcttggaatttgtttgctgaaactgggattttctgggtttggaacccaggtgccgcggcctcctctatgagcgttgcgacctgcctccttgaaaatcctgggtttttcaacccatgtgtcgtgccccgcctagtgttttcttggcagttttgaatgctaaatttgattatttataacttttcaatccggactccgtttgaggtgttctatatatcgttggaaagcttgttttgagctctatatatttatttgtatttgaatgccaattgtatgattatgtggaagtggatttagggattaaccctatttgtaaatgtcaagaattgtgactagaattactggtacttgatcaggagcacccagggatttggaatctccacgcacttgggacatcaggtaagacagtagttagttagcacatagagttaagcgcggtggagctcatgtttgatatgataattgtaattaaatgagaaccaagattaggattattaccttaaagtgagcggttttatggcctaggattattaccctagtgattaatgattttaaatgctatgccttgctatacatattgaagtaaagaattatgcgttcaaggaataatttggttagactcggtaattagaaccgagataaactgttctagggccttattgtaattagacgtgtgagcgtaacatgtgggtctatgccacatagacataaataggtgtgtgagcgtaacacgtaggtctatgtcaaatagacaataagtgtaatggcattaatatatatg

SEQ ID NO: 298333 - DNA, 517 bp, Cannabis indica
taaaattatgatattaaaaaaacgaaaaattaaaataaaattaacatacgtgacttgatacgtaacatctatctagtatatatatataaatagatttttataaataattcattattttcttttactaaaattgtaaaaagtcaaaatgatttaaatttgtaatacagtacaaattcagtttaagtattaacgccctaattaaaaaatagaaacaaaaacaaacctcataaaatttaatgaaatttggacgttaagcgaacacactctatttttttttttcttttgctgagacactgttttttactttttcatgaagaatatatatttgtttgagaaaaatattctctttgaaatgacacataatttgttattttttacaaaataattaagtaaaaaatggcatgcaaaacatagcaaaactgcattttgtgcaacctaattatttctttttgataagggtgcagcctagatacttaatatgtaacaccctaactaccttaggcgtattacgtgattt

SEQ ID NO: 298334 - DNA, 964 bp, Cannabis indica
agttaacttttactaaaaaataacataaacaattaaaccaacaatttttatttaataggcacaagatattaattgcgtgaagcatttgaattcttagttgataactttggcgatgaattgatttagacagggacattatttgcatgaatttatatgcatgcatgcatgcaaaagaagaatagaagagtagctataagaaaagattatgcccaagtaagagcaacacatgcatatatgatagcatagtaagaataatgtattataaaatgtgtgatgagcagccgagtaccgcatcgtccacactatgcatattatcaaatatcgcgatcgtatgaaaaagtaaagaaataataaaaaagagggagaatcttcatgtatatctgcgctacgtgataataagtgtcaaagatgaagaattttcaagatcatttattattttcaattaaattgtacatccaacccaactcgtctttaaacttatacttttttcttcttttaatggattacactttttactatatatacatatggataatatcttaatgggtattacccatgaatggttattaaacaaatttaactataaatattaattttaaaaatattaaattatcaaattttgatctaataacgaataacaaaagaaaaatttgaatttttatgcttagtttaactacttaaaaaaaaatatcaaaaaatatcattttttatactatatcaaaaatatgtttatataaaaatatttaaatgaaactcaacttttacttatcttttctttttttgcaaaaactttttaattttttttttccaaccgatagaacaatcttagcccatgtgatgtaagtgagagatttttttatttagatagaaaaattaagcataaaaactcaattttttctatttttacccattcatgggtaatacccattaagaatgcacccatatacatatatatatactagca

SEQ ID NO: 298335 - DNA, 1908 bp, Cannabis indica
agatcctggtaaaataatatccaacatgatattctttccagtgtagttgtggtttgtatttctgctcaatcatacgatgcgatttacaagtttgaattaataattgcgactcaaactataccattaattttataaaatatacttaaaactagttgtggtttgccattgaattccattgcattcttaataattttttttttttaaaaaaatattttaaaaaattattgaggaaactatcagcattgtttacatttcaagttaaatactttaaagtcaaaattttaaatttaaaataatttaaccaataaacgtaatttatgtagtacattatacaattttttttcttcaaaaaatatataatttggtttattcaggttaattggatgatttagactattttttaatccaccaaatatattcatgaggctgtttggagttatattaagttattttggattacattttttgtcagcttattcgatttagttgatggttagtaaatatttttgaacactcattggcaccatgaagctagacatgagtaaagcatttgacatagtggagtggcattttcttcgcagcatgatgattgccttaggatttgctccttcggttgttgagcttatacagcgacgcttgaacagtgtctcgttttcttttctgataaatggttcaattcaaggtcaggttgttccaagtcgtggtattcgtcaaggagatccactctcggcttaccttttcatcatttgtgcagagggtctttctagactttttcaatacgaggagaatcgtggtcatcttaaaggtttgagagttgctcggggtgcgccatcagtctcacatttattctttgccgacgatagcctggttttgagtcgtgctaataaaagatccattgatacaattaaaagatcttttgatttctattgtcgtgcttcgggtcaaagattaaatgctgaaaaatcagttctttctttctctcccacacatctgttacaatacaacacaacattcaacaaactttacaaatgccaatcaagccttgccatgaacgctatctagaacttccttcatactctgggagggacaaaaaggttctttttggggagattaaggaaaaactatggaaccaattttctgcctggctggaacaattattctcagttggaggaaaagaagttatactcaaagctgtagctcaatctataccaacatattggatgagttgttttcgcctttccaagtctttaattcaccaaatggaagttatgatgagtaaattttggtggggatccaactcctcatcatttcagattagctggaaaacttggaacacgctttgtcattcgaaagtggaaggtggcatgggatttaaaagttttgttcattttaaccaagctttattagccaaacaatcatggttaattttttccaatccctcattgctcttacaccgaattctggaagcttgatattttaagtataactcctttctagaggctgacttaggcaactacccatccctcccttggagaagtattgtttggagaaaagaattgcttcttaaaggattgcgttggaaagtgggtactggtgatcagattttttgtgcctcatatccatggcttcctggtttcacttcgtttcagcttttgatttttaaagattcggatataacaatgaaggtttttgatttgattactgggaatagacaatggaatcactctttgcttcagcaattgtttttggactctcctgttgaaaaaaatcagagcataccttactctttgtgatcaaaatgatcaacttatgtggcaccatgaagctaatggtatgtactctgtaatacccgaaattaagaaatgaattagcaaaaccctaattagataattatgtataattgaggaa

SEQ ID NO: 298336 - DNA, 3312 bp, Cannabis indica
tgcgtgagatactacttgatacgtacacttgcgtaataaacataattttcgtaacagtcatccttgattagtaagcatagcaaggttaaaatcgtggaggtgtataaatcacatacctccttcttctttgggaatggctaaacgatcccaagacatccaaatgatgccacaccctttactagtattggttttccaccaaaagcttgccattaatttttcaatttcattgcaagtaccaagaggtaaaaggaagacactcatagcatacgtgggcagagattgaataactattttaagaaggatttctttccctgcacgagacagaaattttccatcctagctgttgatacaagcaatgactttattttttatgaaaccaagcatggcatttttattgcggccaataatattagggaagccaagataaaggcttccttcgagagcttcaatcatgtggagagtagagcaaacctgaacacgacttgaagaatcagtgttggggctgaagaagatcaatgattttgagtgattaatttttgggccagaagcattttcgaatgactgaagtaaagtggagatactatcagcaacacctcttgtcgcttggcaaaataagttgttgtcatctgcaaaaaacatgtgtgtgattgagggtgcacggtgagcaacatgacacccttgaatgtgtctgtttgcttcaaatttttgaattgaagctgaaaggccttcaacacaaataatgaaaagataagttgagagaggatcaccttgatgaatgccacgagacgggcaaataaacacatgaccaccatgtacaactttgtaacgaaccgtggagacacaagtcataacaagatcaatccatctactagcaaagcccatacagtgcatcgccctaaggaaactccattcaactccatcataggctttgctcatatcaagcttaagagccatgaagcctttcttaccttttttttacgtttcaggtagtgcataacttcaaaagcaatcattacattattcgagatgagacacccaggaataaatgcactttcagtatcagagagaatttggtcaataaggtctctcatacatgtaagaactttagaaagaatcttataaagaccattgcaaagagatataggcttaagatcactcattatagaaaaattcttcttttggggattatatcaagattggtgtcattaaggccatctggcatagcttcagagtcaaaaaactccttaactagtttagtaacatcagtaccaacaacgtcccaatgatgttgaaagaatcaaggacccataccatcaggcccgggagccttatcagggtgcatggagaacatggttgatttaacttcttcatcatgaatcgatttcaatagagcttcattggaatagcactaacagaaactttaatattatcaacaatcaagagcgaataagtgtcagtagcatgaaaaagatcgacaaaataggcattaataagattatcaagaccgatcctccagttcttctagatgtcgctactatcttgtaattgatgaatttgattcgatcttttccgagcactaaccgtggcatggaaatatttattatttttgtcccttgagtgaagccaatactgtttagacctttgcttccagtataattcttgatgagctagaatctcaaaatagttggttctttccattacaaatttttctgcatcaagagcattagcaggatttttgaactttgcaagaagctgtttgcttttagagatttgagtcttgaatataatcaattagaatcaacacaattaataattttattattatgaaaatatttttatattctttcacttgatcgatatttaaactagtgtaccacttaaactcaatgattatccttgctaaataataaatatatgaattatggctatatgtctttattatatggcgagtattattttctatgtattacgatatatttactacataacaatatactttatgttgcatatatttaagtgaataaaccctaaatcttatatttattcagttcctctgaaaaataaaattttctcaaatgaaattaatttgcgcatgaagatgagaaaatatttaaataagagtttcattgattatataactttaattgtacaatgaagactatataagaaaaattaaatcccatattgttgactcagaagtttggacaaagattcctaagccacacccgctcgctagattgatgagagtaaaatagttgttaagtatttataagagagacacaacaaatctattgtagttcactccctctatcacgagctacatatactttgagtttttatttctcatgagatgatattacaaaaaaaggttaagtgtcaaatttttaatttttagagagagaagctttaaccttgtgggtagttttctgaatgtgaaaaatgaactaagggacttctccttttataagtgaaggaggcccacaaatatagaaaaaattaattcaaaatatgaaaacaatctaaattggctaattttgatcgtagatgatgatccaacgatcaaaattaacttatgaagttgatagttaattttcagagcttggcgggacccgctgtgtgtaacttggagcttatttttgtaacttacttggggtaaaaattgaggttgataacttcataattgcaattgaagtgtaagatagatatgatagaacattaaattagcatcgaaactcgaaacgcaagttgaatcgcatcaatcaaatcaatattgagtgagttataaatgttctactgaaggtagtgataagttgatattctgtcttataaatatagctaatttatgtattaatattcttaaattgattctttaatttattgattagtgtgattataatttattaggctattttgaagactaatcatgcatttggagtcatttggagggatgttagtatattttggtggaaaaaaaaggaagttggcgagctcgattttacaaggcagaacttaattgtaaattttggtaaccttataagcagaagtggatttaagctcaacatgaaagttttagatctcgttcttaactttctggaacatcttgaattgtccaattcagagttgtattgaagaagttatgaccaaaatactaatcaagtacaaaaacaaaaattgtgttaggcgctatagcgccaaattcctgcgctatagctccggtctgaaaaaaatacacaagaaaagataattttagcacatgagttattgaggaaatatctcatgggcgctatagccctgacttatcttttttttttt

SEQ ID NO: 298337 - DNA, 4633 bp, Cannabis indica
gggcgaattcaggggcaacagctataaattctaatgtgcaaactccaacaaattgggaagatacagtgaggagggatcctgatccaaccattctacaacctccaagagcttcctaattagtgggacaagaagtgaaaatacctttggttgggttcactcgggccacataggaaggtggaacaactagtactcttgccaagtagactagtcgaagtactaaaaatccatctattagaaatccttgagtggtgattggtgatgataccgaactacaaaatttgtgagctgctttaggacagatcaagagataccaacactcttcaccatgattaacaagatacccaagtagttgtgaattttgccatcgagcatcaaaaacaccaattccaggagtggttaaatcaacaaatggatatcatgagagcccaacaagtagcaatcaataatcattccatgcatgcgaccatgatgatttagcgagcttatcagatatttggacaacaaccaatggaagatattccactcatacaggatttgaatagatggacagatatctatatccccaactaataacaatatgggctagaagaatgtatggctagcaacactcaggagacccaaggtaatggaccatccaattcgatgccacagaatcaaactgtaggccacatggtagacgaggaagttttgccaacccattatcttgggggaatggtcagtataacatccgtccccatatagatatactaaactaatcaattgctgataacaaccaaacaaggatgcctcaaggtgaattagtcttcaatatattggtacacatacatgatttaagagattatttgaatcgcaaaaggggataggacaaaaaatttatccctcctaatgctcagtcgatcaatgtagacaactatgtgattggtaatgttctaggggatcaataggtgacaaaggtcagtctacaagcaggtcaagttgaatcaatggtgcaagcacaaatagatcaccttaagagccttatacaaagcctaaccagtccaaaaatcactgacctagaattggactggactaggggatcacccttttcaccaaaaatcaatgcccttgatctgctggacatgctcaaatgcctacatggaaaatgtatactggcaaggaagatcctcagtcccacatcaattactttgaaatgcaaatggacttacaagcggtaaagggtgatgtacaatgtagaatctttccagctaccttggcagaggtcacccaggagcagtacttcaagttagtaccaagaaaattcagttcatggaactcgtttatgctagagtttcacacatagttctcctcttctaggcaactctcagctcacttagaatatgtggtcgaagtaaaacaaataccaaaagattcttcaagagtatacttcagtacgtttattactgaagccacaaaagtaaaagggttaaccgaagagggaaaatgggctaatatcctaggaggaattgaaacctttagagaattatggaaagacatcaaaagacttactatagggtcaaggagagagtttctggactgagtagatggatttataaaggttgaagaagcagttcgacaagtagacacagtttgatagaaaaagaccaataaaagtcacaccactactgccaatacatctgtccagactcaaaactctcatcacaataatagcagttcaggtcaaagtggtaaaagatcaaataatggcaaccaacaagtcaatggaaacaaaggtatgtttagcaataattttgaacaacatcatcctcgagagaaagctccaaagtttactgcctttactatccttactgaagagatagaaactatcttcacgatatcttagaccatggtgccgtacaaaaaaccccctctgatgaaaaaagatatgagcaagagggataccaccaaatattgttgctttcatgtggactacgattatgatacaaacaagtgcaataatctaaaataagaacttgacttcctcatcaggaaaacaatccacacttacaaaagtacattaaggccaaccaagatcaaagggctgcccagccagataataatcataaccagttgatgcccccactcgtggatggacatctacaagtgattattggaggccctcacattactggagactcaaaaaaagcttgagagaggtacgctcagaccctacaatatgaatagaaagatgaagttctagtgtagaggaaagaaagcctaaacatccatgtagacaagaaccaatcattttattcggtgaaaaagactccgaccatgttatttatctacacaatgatcctctagttgttgatgaaaaaattgcgaataagactatgactcggaccattattgacaatggagcctcttcaaatattcttttcaagacgacatatgagaagatgggccttcaacccattgatttggttccttgtacacagctagtgtacgacttctttagccagagaattgctccactttgacatactcatctactacttatagtagggaaagctctaacaaccacgactgtaagggtccaattctcgataattgatgttccttctgcttttaatgtcatgttcggtcattaagccctatatgacttaaaggtagtcactttcgtgtatcacttatgcatgaaatttgcaacaatgaatggggtaggttgtttgagaggaaatcaaaggactgtacgggaatgctacaaccttgctttaactaaggccaaaaaagaagaaacattcgacaaagttcaaagaaaggtaaaagtattgccaaatagggatccacccagttgggaacgaagacatggttccccaccttggggaaccaagtacaaatgttaagttggtcaaagaattggaagaagatgaaatcgatcctactatgctaactaggaaactcaaaattggcaaagttttgttgctcaaaataaaattagctttgataaaatttttatgagtaaatcttaacatttttcctggtcacatgaagacatggtcgggattgatccaactgttatttctcacaccctcaagatcgatcccaactttcgtcccatcaagcaaaaaagtagactaatagataaagagaatgcacaagtactaaaagaagtggcagaagcctccaaacaaatagattcataattggggccttctaccccacctgagtagccaaccttgtacaagtgcccaagccacacaaaaaaaggcatgtgtgcattgttcactgacctcaataaggtgtgtctgaaggactatttttcacttccaaggatcgactagcttgtggatgctaaaccaggtcattagatcctaagcttcatggatgcctacttagggtataatcaaataataatgcatcgacctgaccaagaacacactagcttccgaacagatgttagcttttactaatataaagttatgctagttggactaaaaaatgctagggctacctaccaaaggctagtcaacaagatgttcaaagaccaaatcagatgtaacatggaagtatatgtagacgaaatgctcataaaatccaaaaaggttggggggcatatagtggatctggacgaatgctttaaaatccttaaaaaatataacatgaaactcaatcccttaaagtgttcctttggggtcagcttaggtaagtttcttggattgattatcaatgctcgaggaatagaaagccaatttagagaaaattctagcctttttagatatgaaattgccaataaaagtcaaggaagtacaaggtcttacttgtcgaatagttgcactgagcaagttcatgtcaaagtcaacagataaatgttttcctttcttcaacatcctccgaggaagcaaaaaatttgaatggatgaaggagtgtgaaaaagatttttaggaattaataaagaaactcgcacaacctcctattttatgcaaacctctagacggagaagaactgtaaaatctaccttacagtaactgaatcttgagtaagtggcgtattaatcagtgaagaaaacaatgcccaacatctagtctactatgttagcaaaagattaattaatgctgaaggtcgaccacttgatagaaaaattaacatattgcttgctcctggcctcaaagtaagatcatacttctaagctcatccaatcttggtgtataccgccattacaataattcttacaaataccagttgcttttggatgattgcttaaatgggaaattgagctaggatagtacgagattacctaccagccccacataacaataaaaggttaagccttggaagagtttgtagctgaatgcaagggaaagaataaaaaattcagaaaataatgttgagccagaaagggaacttgaaaaagaatccccatcagaagaagacagtcaaagttagaccaatttgaaagttacatgtggatagatcatctaccgattagttgtcttgtgcagggatctctcttatcacaccttgggggcatccattgtacggagtagacaagtttggatttacaacatccaataatgaagcaaaatatgaagcacttatctgttgggaatattttaccaggatctagattaactaacaagtatgtttcattaacatc

SEQ ID NO: 298338 - DNA, 2674 bp, Cannabis indica
aaaataaattaaaaaaataataaataaataaataaaataaaaaaaagtgaaaactaagaaaatgagcagcaaaatcactgcagactcaccaataattcagaaaaaaaaacaacaaaattaagcgaatttcagaggaggatgaaattctattctagggtttctgctgaaaacgaagagctgcttcagaagccttttttctaagagaattatcaataatatttagttttcgacaatattataattattattttagatatttatttttacgttttctttcttttctccatgccttgcctcttacgggttttaaaatttaatgttaatttattttttattttttttcaataaataaaaagcaggtaaaaagcaggccaatttgctttctcaaccaaccacaaaaataatagcgataataattaataataaatataataaagtaaattgcatttactccaacgcctctttcttcaaaattatttcaaattaataatccccacgcgccgttacaaattaaaaaatagtaaaggttacacgtgtcacaaatatggggcgagtagattgtgtcgagggtggcttagaaatgtgtatgtgggtgtgattttggatttatttggctcttttgttttgtggtttctttctttggtagggttgttctttgttttctttttcttttcaaagctggtctcactatagttaattattatgcattttattcaaaattatatatatatttattctaaccaattaagtttgcttaggtgggtgggtaatcatgatgatgatggtttttgtattaattcaaaaaatgaacatttttctttgacataaaccatttgtttaataaaaaaaaatgtggcatacattttcaaattattaaaatattattgattcacttaataaatatgattaaaaattattaaagtttattttatttaataatttttattgaataaaataaaaatttaataattttttattatcttttcccttttattataattaaaaaaaaaaattacttcacaagctgaatcacatcattacccacatattccaacattgctgttaaaaacccggtgtcataccatccggcccaggaaatttgtcgggatacatttggaaaagagccttcttaacttcctcatccgaaacaggggccaataaatcaacattctgctgtggagagatcttaggctcgatacaatcaacaacgggatgccaatgaggggaactaaaggaaaatagatcggtaaaatattcagtcacaacatcagccagacctgaatcccaatcaacccaatcacctaaggaattgcaaaagataacgattatgctcaagttctttaacatacatacccttctctggctgaaataatgaagccatcatactgtctcatcacatcgaaatcgatagcccgggaggttaagaaacgtccaacaatacacaaacgttcttcttcccccttattttgattctcgacagtatcgtaggatagtacaacctcatcctcaccctcaatttttatcccttcatactgagtctccaaatcacccacctgactattgctagacgccataccaattacgcaaacaaaccacgaacacaacgaatctcaccagagaagactaccacaccatctcaatagagaagacctaaagggctttgtacatgattcagcatatattttttttttcgagagagatactttaaaatgtgacagattccaaataatttctgggtcgttgcccgatggactcaataatacaaacattgtgttgattctgaagaagaaatgccctgtcaatatgggtgatctgtgtccaatctctctatgcaatgttttgtataaagtcatttcaaaagtcctcactaacagacttaaggttcttcttcccctggttatttctgacacccaaagtgcttttattccaggaaggttaatttcggataacaatatggtatcttttgaggttatacactatcttaagaggaaaaggcaaggtaaggagggcttcatggctataaagttggatcttagcaaggcctacgatcgcattgaatggggcttcttacgtgctaagttgggttttgctaatcatttagtggatctaattatggccacgatttgctcggttcggtacaaagtgacttataatggttaggagttggggctgattattcctaaaagaggtattagacaaggtgatccactatctctgtatttgttcttgctctgtgctgaaagcttctcttctttaataaaacattttgagttgaatggtgcttgttgacttcgcttttagccaacgacaatgagtctttttaataagcgataaacgatatgtcgtaatgagaatatatataagaaagcaataataagacacgagaattttatagaggttcagcctcgagcggttcggtaatagcctaatcctcgttatttgtattgacttaagaacaaggaagaagttcccttttattatagctcttacaacaatatctctgaatatataattattagataataatatagcgttagcttaactgcgtatcggcttataatttctcggtcctttgcccagtgaacattcctcactatttatagggctgggaaacttgaggaggaagagtttcctctctcgttacaatgcgcataaacagaaagatcgtgtgatc

SEQ ID NO: 298339 - DNA, 2522 bp, Cannabis indica
ctatgtatataggttttttgatttgaaggataatctaatcttgtacatacttaactccttataaacaactgaactcccaggctgtccacattcttcagtcctcaaagttcaggcagtaatctttgatgccaatttctctgtgcgcacttttgttcttttttaaatgtcttccacgtatttgttaaacaagtcatgactagaaactaactttatgttcttctcacacataaaagcatgtgaggaaatttactttatgtattgccacttgtactgagtaagatccagctagaatttagcactatgaactaagccacaagtttatgtttcccctattccctttatttcttagcatgctgattcctgtaattagggcttctccgttactttagtgtgcaatgtccaagagagtttcagaaaatgtagaccacagagtcaattgcagtagtttttttttttttttgtaaggttattgagagccgtgacggtattcgtattttggaagtacaaatgagttctattgtagttcatacgcatcttttttttttcaataaaattccaactgtatagtctattattcttgctgtgcacaaattctatcctatattgagtaacacttacttctgttcttctttaaattgtttgtgcagacggtaaaatgtggagattattttcaggcggaagatggtcctagagaattcggtaacatctgtattaatactaagtggataagtaccactaacacctcgttagtgctccgccatcttgaggtgaactacaaggaggtaggtagttccattttttgttattttcttcaataatatttctgctgttccagtcatgtctctttatgacctctggctgtttctcataagtatttagattttagccagtatgttaaaacattttttttgaattttaggagggaaaaaaaacacttccaattgttttcattttttctagtttgggttcaaacaaaaacttgagaaatcttttttattattaagatatttagaacaattataaatgtgtttttaaaaaagagaacattctaagaagtctcttgtaaaattttaagaaaatatctttctccatatttccttcactcttttctctcacaattctttttataaaatccaagatctaaacaaagccagtgtgaaaggaacaaagccagagtttttctttccctttcagttttgtaggattgaaatacctcctcaaccatgcgatatttcaataaaccttaattttacagaacaggaccataataataataataataaactagcaatatcggtatttcttctccatgaacattaggaattcaacacttcctcgtattgtctaaattcgatgtggagtatccagatgtatacggtcattctagatgagtttgaagagggcgcgctggttcaaccagcaaaaacataaatgaaaagcaactcaaatatataattcattttaaatgtggtgtaattttattgtactaaccttttcaaaccttatacgtgtattgcctaaaccatttcaattctttttgataatagattaacaattctttccatatttttttttcaagaaccaaggttcttaatctgggtctatgttgtagaaattcgtaactcttatctgtttttcatgtcatctagttattgcttcaacactcttattatactttgttgttataaaacaaaacttttcgtttttgttgttcccaagaaaatgcgccggtgggtgtctgtttaaattcttgacgcccgtactttttcagacccatacaaaatatgagaaatgtctattcagaacattattattatggtgttgcatcaactagactgattttgttccctacagtctgaagagccgcctaagtctgttctgcatattcaatatcccgaatggccagatcacggtgttcctgaagatacaacagctgttcgcgaaatgttcaaaagagtacatcaaataccaccaagtattggcccaattgtggttcactgcaggtttatctcttatttgcgacttatggctctaaatttcggtaatcacactacatattcagctgacacaaatacccctcacacagtgcaggtataggaagaactggagcatactgcgcaatccataatacagtccaaagaattcttactggagacatgtctgcattagatctcgccaaaacagtaaccacatttaggtctcagcgtattggaatggttcaaacactggtaatttctactttggaatcgaaatcttaatcaatgctatggttcaaacactggtgaataatacattaatactgtcttgcattaacttttaggagcaattccatttctgttacttagccattgttgatgagttggaagatctcatttctggggttagcggcgaaggaagttcaaagagtggtactacttccaacacttttgattgaatttcttatgtttttgatatttgatcagttgaaaaagtgaatctatatattatttgtttggcattcaggtaaatgagagcaaatacta

SEQ ID NO: 298340 - DNA, 2582 bp, Cannabis indica
tgtttgaagtgaattattgctgagtcattactgctggtgacaatgatgtcatcaacatatatgaaaatagctacaaaaaagtgggagttcatttaatgaacaatgagtggtctgatgaggatttgttaaaatcttcactaaggaggttggtgctcagttcggcatacgactctcgtgaggcttgtttcaagccatagatgttttttttctagcttgcaaacagatttgggtggtggtttatagcatggggggattttcatataaacttcttcatgtaggttcccatgaagaaaaaattattattgatgtcgagttggtggacatgccaattattcattgcagtaagtgcaagtaggatttttaaagtattgagcttagctataggagcataagtttgtaggtaatcaataccatgctgttgattgtaacctttagttactagtcgggctttaaatctttctacttcccctttttggctgtatttaaccttgtacacctatttacagccaatggctttatgccctgggggtaatttggtgatgatccaagtattatttttctctagggcctctgtttcattgtccatggctttcaaccaatgtctaaattgggaagctttatcataggattgaggttccaaatgagaaaatgaagcaagaacaactgctcgaaattgaggactgagattggagtaggatatgaattgttgtataggatgtatggtggaggctgtataacaaacatagttgtctaagtgggaaggtttgtgagatatgtgaccagttttagttctggtgacagcactatcattagttttgttgcttgatgcagcaatgttatcatttgtagtgctggtttcagaattatgattagctgtagtgctggtaacaatagtgttatcagctttagagctgtttatagtaaggtcatctgttttggtgctagttgtagaaatgccatttggtgtgagaggagtgtgactattattggagatgttggtgtattctggtaaaatagttggttaaaagaactagtctatctcagtggtggatgtataagataagaagggaaacatattttcattaaacactacatctcgagattggtagatttgttttgtctcaatgtcgagtagtgtataggccttcatgccatgtggatatccaatgaagatagaagcacgacttcgaggtgaaaatttgtgtcttttagagggaagtgtggcagcataagctaagcatccaaaacatcgtaggtgatcatagttaagaggtttcttatggagaatttcataagatgtgatacctttgaataaggcagatggagttctattcataagataagtgtccgtctgaactagatagggccaatacacaagtggtaggtgagatgggaaggataaagctcttgccaattgagaatgtgttggtgttttcgttccacaacaaattttcgttgtgtgaattctatacaagagtgatagtatgtgatgccttttaagacataaaaggattaaaagttaaactccttggcattgtctaattagacagccttaatggaggttaaatattgtgtgcacaccaggtgatagaaagctggtatgatggtttggaattcagatgttattttaagcaagtaagtccaagtgaatctagatttatcatcaacaatggtgagaaaatacttataaccttctgtgctaatgatatgaaaagggccccagatatccatatgaataaaaaacattttttgcaaaattgttgttttagataaaggctaatcttctttgtttagcaagatgacaagttttatagtgttgttcttgggacacttaaaacctaggatctaattttttattaaaagtatttgaaatatacattgaagggtgaccaaggcgcttgtgccaatggtctacattattgtaagaaaaattaaagctggattggctgaggaagagggctcttgctgcagaatgtagagctttccttgcattttagctgtcccaatcaccacactcagagaatgagcctgaatgatacaagaatcatgttgaaaagaaacactattagttgtatgatcaatgtagtctgtgatagaaaaaagattgatgttaaatgttggaacaaagaggacattatgtagaataatggactggtttatgtgaacagtaccaatgttctgaacttgtactttgatgccatttggtagaataaaatgtgtttggatgtgaaatgttagagaaagaagagaaacaagaaatattcgaacacatgtaatgtgttgctccactgtcaactatccaagatgcagaagtgttaaaagggattttaccagccatgttggatgctgtaggtgcaggaacttgatcaggtcttggggcagcttgactgagctgttggctgagtaaggaaattagttgctaacactgagctgagagatcatcattagttgaattgacattggcgtcaccagaagtgtgagtagaaaagacttggttgttagtggcctttcttttgtctactttcttcttgtctccatgtccagggggaaagctgtaacgccctaatgctaaggcacgctac

SEQ ID NO: 298341 - DNA, 5233 bp, Cannabis indica
tgcgggtggtgcggtttttgaccattttttcaaactaacccgcacatgcggattttctaatttttcaaacctcacccgcaccgcgaaaacggcactgcaaaaaatggtgcgatgcgatgcggtgcagtttttacggtttagactatcaccaataattaaactattacaaatacaacaaagcttgagtaacacttgtcaaaaataccataaggcttgaaaataaatctgaaaaaaataagtttcaataatacaataattagtgggctttcggttagacattcacatattggacctaactaaatataaaaattggtatttttataatgtgcggtgtggtgcagtttgaaccgcatattaacaattcaaaattgcaaactgcaccacaccacgcggtttatgaaaaattcaaattgtgaccgcaccgtaaagaatttcaaaccgtatttttttgtggtgcgatgtggtgcggacggtttgatgaacagccctatgctacaaattacaaaagaaaattgcttgaagatgctcctagtcatcatcttctcattctactagtcaccataccctggctggttaaaagtacaatgggcctaaaaagcccaagcccaagcccaagcccttattggcgtaataagcccaagccaaaaagaaagcccaaatagtttgtaaacccttttagtgtgtgctcataaaaccatagcatataatattgtaaagttaagccaatccgaagagctatctcctcactcactctctctctctctctctctctcctaaacccaatccattctctctcactatccactcctcgccgaaatgtcaccggccccagtcgtcgagccagtcgccgccaccgactccttgaccgaggaagtcctctccaccgagaaacccctcaagaccactcctaaggtcttatataaatatatctatatatatacaatttaattatatataaaattacaactccattttcatatacgtgttttggactggtttacagaattttcatcaattcaagtttgaatttttggtttttgatagagcgaggaagatgaagttatagttgaggatgttaaggacgataaggatgaggatgacgatgatgaggacgatgacgaggaggacgatgatgaagcgggtcttcctggtaattattctcattttctctgctttgattgttattaatatgttttatgtaagggatttcatttcattatgtttgttgttatgattagggtttgtttctggtttgaattttgatttttgtttacgtggatttcttgctcattttggtggaatcttatctctgcatggctttaattagcatttgattatggaattggtttcttgtgttttcagtaaaatgtttgatttagccatttccattgttcttcatctggtttgtgtttggagtgaaatgtcattttgtgcctcatttgttatgaaaattacttttgaaaatgtttgaaaattgaggaatttgtaaattattataattttaaaaataacttcttgaaagtccttttggacgaaactctcccaaaagacttatttttttatccaaataccaccagaaggactttacaaatttgctgagcaagtttcaggagtcttgtgcttgatttgtaaacaggggtttatggcaattatagttttttgtaatgattcctttggtttaatttttgtttgtggtaaatattggatgataatttttacaggtgcagatgggaatcccaagcagagtagaagcgagaagaaaagtcgcaaggcaatgttgaagctcggtatgaagccagttacaggtgttagcagggtcaccatcaaaagaaccaaaaatgttagtaagaaattattttccatgtcattggtgaaatgaatgaacacacatagtatggactcaatttttcacctaaactcatgttgtgtggtgtttcattttcagatcttatttttcatctcgaaacctgatgttttcaagagccctcattccgaaacatatatcatattcggggaagcaaagatagaggatttaagctctcagttgcagtcacaagctgcccaacaattcaggatgccagacatgagcgccgtgacagccaaagctgacagtgctgcaccagctgctggtgtcccagccgaagaagaagaggaagaggttgacgaaactggtgttgaggctagggacattgatttggtgatgacacaggctggtgtttcaaagatcaaggctgttaaggctctgaaggctcatgatggggacattgttagtgctataatggagctcaccacttaacttagcattcttacatttttagtgcagtttaattattattctgagtttatcattaagtattgtacttaaattggtttcccatctatatggaggcttagattttgcatattccctttgtggacagagatcattagttccatttccttattattattattatgctgttctcatttttgatttattaaagtctcataaaagcttattcatttgaaattgttacttacatttatttcaactcactcaagtagtctctcagggtctttattgatacaattacacttgccccttttgaggttttgctaatccaaaatcttatcactaaatacaaacactccataactcttctatttaggtgttaataacactgcaatttgcccgaatttcgccactgttgcctgtaaggacctcaatttgccccattttaaccattgcatcagcaaacattcttgtccagagagagggagccttggcaaattgattcactaagctagctgttgttgcatcggacaagagagcttggtcggaagaaaacaagccacgacgtgctagaacgtctgaatagtagctgttatcagcaacggtagggctaaaagggttcatgggaacaaccaagcttggatttctgttgccttgaggacattgttgcttcaaccgagctgcatacatcgagtctaaactcgggtcttgaccggttattccattgaagttatataatctagaactaaaggaagtgcagtgggagcggccgattgtatgagctcctgcacatcaaactcgggtaagagatcatcgaatcgcaaaaggaagaacaaactattagtcttacctgagagtgtaaccatttcttgttgtgtgaaaccttttgaggcaaagatttgagtgagttgattcaaattggatgatgggccaggtaagtttatgacagcttctgaagctaatgaaactttgccatctcttcttcctgcaggaacatcataaccaagccctccactctgcaaatacagattaagtaaggggttatattgcaattaaactactttcattcaactaatgaaatttaaatccaaaccaaacttacaaactgtatgctatcccttgctgcaaaagctactatatcagcacatgaaacaacacctttacataaagcttctagtcttgcttttgcattgtttattacttcaaatcctctcaaacttggattatttggaggggaatccttctcagctgtgtttgttgcattcgaatcgatcaaaatcgaagcatcacagccctgtaattgtattagttcatagttagtgtaatcgaaacccgaaacctaatgaaggaagtaaaaggagaaaaggttacttactctaacaaagcaatcatgaaaatgcattctcaaaagaccagcagccactcctgtatcagcatagaaagctttcataacctcatctttaactacaatctcagccaaattacatgtattgctataatacccaacttgaagttgggaatgaacactttgaaacttaaacaacaatatcataacaagtgagaaaccagttatggtatgtgaaaaactcatttttctttacttgttattatgacacaagttataagagcaacactcaacaatggtttgctactatataattgtgtatatatatatagtgatatgttgaaaggcattgagctggaaagtcactgtaatttaatcagtaaaaaatatagtaaggacaagagtttggtttaatgtcggacgacacataatcttatatgatcatattaaagggtcattaagtaagatttgattattaataaaaatggacttaagtcaaactaagttgacttaagagtgaatgaaagaaccaatggtatccaatgctttacaagaaatgctaaaatacatgctgttaggaactatatactattagtgtaattaagtatcagattcttacaacacaatttaataattattataaaaaatagttaattatttatttataagaataaggtgacacactcacatttcgagatagtattcgttatgctccaatcgtgcttaatagtaatatttttacattcgaaaaatgttaaagtgcctaacaccataattcattatcaggcaacctgacccttggcataagcaaaataggcccgtacttagggctcacctactccagaagttctcaaaaaatttctctttttaaaaaatagacattttttactgatttttaaagtactataaatatttttttttcttataacccactaaaattcaagaccgatcatattatcgggttttaagtaagataagaaaagaaacatctaatctaactacttgtaaaaggacacttgtggtcatattaggaacttaatattatctaatagtaatgatctttaaattgaaatgagacatgttggtagtttagctttgtatataatgatggattagtaaataaacaaccaataattattttgttagattgtattaatttagaaacctatttctatttttaaaagaaacgtaaatgttcaataatctcatgtctttacaaaattaattacctttgtgaaaggcaatcatggatgtggttagaaaatctgatattgagtcactataaaagggtatttttaaagaaatattttcataaataaacttaatttttggggagtccagtagtgaatgtttttgacttattgatatatatttcctacattccaacatatagaataaatgaaatataatataaaatagaaaatgatttttgttttttgtttttaataatgaaatttctattcaatggtatctagtgctgttaaaatactagacaaaaaacaaatgcttttcacaagattttttttccaataatattacataaaaatgaaaggagaattttcaaaaatattattttttttaaaatttatttataattttatgttctaaaattttta

SEQ ID NO: 298342 - DNA, 1476 bp, Cannabis indica
ttgctcaaagtgagcaaagcgctacatggaaggctcagtgactgaggttgacgctgaggaatgagttgttttaggagctgaggacgtgcaaaagcttataggccccttgggattcaatgacccttcctcagaccacattggaacgcctgcatctcgacaaagggaactgatggtggctggcaaaaatagtttcccttttccccgatgtgcacaatccaaaatctcatgggccaagacagtacctacataaccatgcatccccttttcaagaaaaccaacatccacgctcgatcacggtcaatagggatgtttgcatgaatgtgtatacacacttcatgtcgtgctctaggtcagtatgcctaaaccaaaggtttccaaaatcatctaagttgcattctgaatctggcttgccaagttccgacatcatatcaactagtaactcattgtccacctgaccttttatgggagtgaaactacaggtgatcggttccaactcaaacaagttgttaattgcttcagcggagaatgacacctcaatttcatgcacaatcacttcggttggccattcatgagacaagaaattggtgtagaactcctttactactttcattactgccggctcgggctgcttaacaaaaagttcctaatgtctagcacgaatcatggaactcacccacacaggtagctcatcaataccatccacatcagccactaaaccacgctccatgtaaaaatcctgaatgggcactttgttgtggtactttgtctcgaccgtcttgtgataaaattttggagtttcatggagttattatttctaaactttgtgagcgactttcttgacatttagaattttgttttggttcaacactgctcatccacaacaaattccccctttttttaatcttcctaacaccactccactaattctaccactacttgaatctatctaagaccacaaaacttccaaagccacaccaaatcaaattcaaatcatccacacaaaaaaaaaatacaacagtctccaaccacaacaaattcccctctttctttctttttttctaaatctgcccaacaacatgccaataattctaaaatcacaccaaaaatttccacagccacaccaaaaatgttaagaccaacccaatactaatccaccacaataattacttggatagcacagcccaactttaacaatcatatatggaattcaaccaaataaattttcaatttaactcaacaaactagaaattcgctcgggttggctgaaatttgcgggttccgattttctagctcaatttaaatgtgtacctaggctgttgatgcgagtatggagagttgcttcgggtagatggaggatgttgttatgttttttttagagggaagggtggtgacaacggggtacttgtcggcggaagttgaaatggagtttctatttggttttgtgccctaaataaaacccatttcaatatagtcaga

SEQ ID NO: 298343 - DNA, 1969 bp, Cannabis indica
ctctctctctctctctctcggaatcgattaaatactagtaaggttaatacattaagattaatagagattaatttatgagatatgtataatctaatgatacaagttaaaagaccaaaacacattaagagaacgtgcactttaaacttgtatttgtaggatgtgtttgaactttctctcgggcccttaaacttggttttgagtaaactaaaccacttgaaaagttctgggtcgattggaagtgtcaaacacatattttagagaaaaatgcacagttttaagagacatgtcgcctggaacatttttggaattatgaaataaaaaatacaatcaaagtcccaggagacatgtcaccaagtttgggcgacacattgcctagaggaaatatgtcgcctagtgtcaggcgacatgtcgcctggaccatgacgatgattccccaattgcaattttattttctgacatctcaacatgtttcccagtggtaggtgacatgtcgcttgaagccttgcatggaaaatttcagggtttcataaaatgcaagaaatgatccaaataaccttattaagtgatctaatcacatggattagtattaacgacgatccctaaaaaatataagggtgttaagtgagtcaaactttcttaatcaatcattttgctatctctcttagactctctatatttttttttctctaaacaagttttctacctctctccaattgctctagggttttcatagccctaaataacaagtcttaaagtctcagatcttattccaaaaagaagacattatcaatctacgggaggtttggagttaagatttttcgaataacattaagcttaatgtgacaagcctcttgaagatttgatttttccaatcagattttggttatctctaacttttatcctctttgtattttagtttgatcctctattgttaatcctttaagaactcttttgattatatatattgtttcttttatcttattagaacccttattgaaattttataaattccaacaaaaattacaacatatatataatatttaactcactactacaaaaatagaattttcagttagtttagaaccgactgtattacctcttttgtcggctcagataaccaatgactatgtgggcactataaatttgggcactttagccatcgatcccaatcgacgctataaaaaagtactcaataataaaaaatgaccctttagcttcagttttgacaaaattcgcagccgaaggcgttctagacgaagcaaaaggggtaaaaaataattgaaggcaaaaggctccttatggcttcgataatctgactcattttttaaattataatcctgattgtatttctaacggggagatgtcctgattggattacaaattattattttagctaattgttattaataaaattctataattgacaaacaaatacattataaatatcttccaattttcaaagaaagtaaataggttgatgacttgcttataaattcatatgaactcttggagaattacaactctagggaaatatttagggttttgagatcaataatattgactaaatggaattaacttatgttttactgactgaattttcagcatctctcgtttgcgagtaaggctcaacttattccttttattttgttaggcaaaaaaaattagggcattttacaattttgtctacattattttaattaattacaaaatatgtgcaaagaaacttatcatcattttctcatacatttttatatataattaaaaactttttttcaatttcttttataatacatatatggtaataattattgattattatatatatggtaatattggctatgtttatttttatctttacaattataataaaaaacataccaataatataaaacattttatatgtgtgtttattttaaattttctattaattaaacatactaatttaataaacaaaataataatattcata

SEQ ID NO: 298344 - DNA, 3411 bp, Cannabis indica
ggtctattttgttatttaacaatacaaaaaatcaaattggtaacttttacaaaacatataatctaaaatagtatttaccctttaaataacatataatcggtaactttaaataacacggtgttttgaaacctatatgaaaaattgcaatagccattttttttggtatttatatatatgcaagactgaagttaaggttagattaggtaaggccatcaccttagctaaaacattatagaatcagtactatttgccatttggagcttaagtctaaataattttttttagcctttatacaaaaaattttcttcttaagtaatattatgtaagattgttgatgtaatggtaaatgatttttaaaaatttaagaaagatctcaagttcaacaactattataaggtgaaaatatgaaatgtcattctataaaaattgctttaacataattaaatacattttattatatcttattatataattcttattaaaattttagagtctcgacataatataaaaatatgtaatcatactaaaaaaatattttgtaaaatatagtcttcacaacatactttacataatgtagaatttactagacatactaaaaaaatattttgcaaaataactataaaaaaaattaaaagacatataatgttcctaattcacgtttattggtcggtcattatgattgtacatgaattaactcgacatgctctttgagtagataaagaatttatgtggttatagctagatgagatatccctgattcttattctatacaatattattttttattttcaataaatttgttcattaaaagaaatccaattattttttttttttgaaagaactcattgttcattaactagaaaacaggatgggaataacagggggtattccctcctgttgatacaaaacatcatgaacactagaaactctagcattcttggctacaccatccgccaccacatttaaactacgattaatctagataaacttactcactaacaaccttcttgataaattaacaactgaaaaaaaaaaatggcaatcttccaatcagggcacccaacatttgaatctaaagaagtcacggcagtcttcgagtctgagagaataagaacttctttacaattatctgcaactgcccactgcagagccatttctatgtctttgaattcagcatccaaggcacatgcagcttttgatctttgagctttgacataccagattccattaaggatgtttatcctaatagctgcaaggccggcatctcccttgtcccaagaagcatcagtgaaaattacatactgaactttctcattacatatccgatatgctaagtcctgttgatgatttgcctcaggaaaaggggttgattcatggttctccacaatagggttaacttccagcaccttataatccattaaagcctttccaacatttaagagagctaatgaaggatctgctgtaacagaccgcatgcaataggcatttctctggttccaaatctcagtgcagatgcatccaaagagattaacaaattcatctctatagatactagggattattgagattaaattctccaaaaaacgtaccattgagtcccctggaatactgtctatcctcaaaggatacaaacttcccaaccacaaaacctttgcaaaacaacagtttcaaaaaagatgcagagcagattcaccttccattccacaaagactgcaatctttgttggtaacaaaaggcagcctattctttgttggaattgcttcattcaaaattctccaaaggaaaatcgatattctaggatgaatcctcccgttccagatccattccaaatgctttgggctgatccaaatctccaattctgatccacaacataagcagacttgactgaaaactttccattctggtttttcttccaaaaaacttggtcagggaacgacctgggaattcttggaatctggagtatccgatctcccaagtcttgaccaaaaatctgaatgaccatctctacattccattcgtttcccttcgagatatctgccagaattcttatggtatatcttcgattctgaagctgttgcatcaactcttggaattcaccatactccatccaaggaatccaagactgcttccaaaagtttatagaattccctgaagcagcaactgccatagagccttgaagaatcacctctctcgttcccaaaacactcttccaaagaaaagaatcactgttcctttgattcacacaccaaaaactttcatgtttgaaatattttttcagtgaacaggtgacccatggtctcttcatgttggttgcaagacaccaagccaactttgagagtaacgccctgttcatgtcttgagagtaaaatccaattgtttagagattcaagatttggtctcttctcattttctaaataaatccatcacctatatgattttctcactaaattatcttctcattacctatatgattttctcactaaattatcttctcatttttcgaaactcctcgccatggttttcttagttttaagaagtaaattgccgtgatttatttagtaaagaaaagtaatttattaaaattgtttaaacttttatgctgtatacaatgtgtcatatgtagtttatgaaaaaatataataagagaaaataggaatgacttatattaatttgtaaaatgtgagttgaattgaaatgaagggttatgatatgtatgtatcacaccacattattaaaatgagattttcttttttcaacacattttacacattcataaattaataaaccaaagatgcatgtaaaaattcatatcttatccatctaataacaatatatctagtcaaatatataagtacacaatgattattatatatcatccttaacatcataaattacatgtgcttttgttttattcttcttctttagatatataatttgaatttgaaactaaaatcaaagcatatacatagcagccatttgaatagtaaatatatataaatttttactacaaaaaaaaaaaaaaaaaacaacaaaaatacaaaaggatggaacataaagaattaagaggaaaaatccaaatgaaaagacaatgagaagtcctctcctcacaattgatatgtcactctctcttctaataatgataataaagtataatttggatattccataagaaataactaaggacactaatcattacgacgagtcatactgtattaatgtaaaattgaattaaattttatatattttaatttttaataatttttataaaaaattacttaatatttatagagtaaatactattttagactatgtgttttgtaaaagttaccgattgaaccttctgtcttgttaaatgataaaatggaccctctattttttaaaatggtaaaaataggaccatgagcttaattt

SEQ ID NO: 298345 - DNA, 2033 bp, Cannabis indica
tgtggatagtattaaaccaaatgtttgaacttttttgtgtttgaatgttagataaggtataatttaatattcgggtttcatatattttaatctgaagtataatatgtgagactcgatactcaattgacctgcgaaaattttatgattttgagtagaagctgaaaaattgcagatatcaaaccaatgttggatctttttaagtttgaatgttgtacaattttgtatcgggttctatatattttagttttaaagtaaagtacttgagaaccattattcaattgcaaaaccaatcaaaatatggtggggttggaggcatcggttccatatagtaatgctctatcctttttcccacatggaacaagttgagctatttataagagtatgggttactctgttcatcagaattccgaaattcttgtccacacttatccagatagtaagcaaaaaataaaaaataaaattcgcacgagatctgcatagtactaaagaacatttgagatctaaacaaataagtgagcagataggagcatttgatgaactttttatttgtgtattttgcagttataaagcaacaaatggtggaaaatttcctcctccttaccttattacacaacaaactggtggctcctactatcttgttaagctaatcgtgcaagaattgcagtccgaatcgaaatcatctgttgctgtggataatgtgaatcaaaatggcttaggaaagaaagagacgaaaaaagcaaaggaaccttcaatgagagctaaaagattaacaaaaagtaatatatcagtaaatcttggtgttcaagatgatattcagacaacatcaaccaaccttgtcaagattaaaaatgtcgtggacaagagtatcgaagcagagagcagttcactatcttcctcttcagccgaaaagacatttcccgacacgaaaggagctgtaaatatagtaagtttttcattattgtaataaccattgagaagtgttctatcgagcaagtgtctgaagaagttggatggatgtgacttaaatcggaccaaaaacccgaagtttgatgtgtctaacatctccatctctctaattgcaggatggttcttctgaatttgcagcagcacaagatagttttcttaaaggacatggcgaaataaatgttagttcgtgtcaaaagaacatggcgattgaggatgttcagagcaagaattctgaatctgttggagtcccaagtagtgtgctgcaagaaggtttcggaaatgtctctggtgcatcttctgttaacttagaaaatgagaaacagaatgaagatcgggtcgagaatgacagtcctggttttgttgaggagggtttgcagatgatgaatactacaaaggttttggatgcaagcactgaaaatggtgatgataataaacaaaagtcagctgcttcggatgatctgtaagcatttctacacaataatcttttattttcttcatcattatcagagatttttacttcttttttgaatatcatatcttcctttcaaatgaatggaatcctcacctcactatttacaaatttctctctacaacagttttgagaataagttatttttagaacaataattttgagttctaccaaatgaaacatttttggaatctttatagggactagaagcttaggaaatttcaattagatcgtccgaacgaaatcggacacaaagatctaaactttaatagtttctcagggcttttcaaaatgtagagtagaccaagagaatatgagtctgaaaagccatggatttcaacacaattcaactcactcttgttacctatgtatctataaggaaccatgaaatgagaatgtatttcgtgtcattgaatttttttctgataacttctaatgtgctccttgaaactataaatactaagtttcattttcattattattagagtttttggcggctaaactttcccaactatcgttttacttgcacttaactcttcaagctcaaattttagcgataaaacccaccaaactattgaactgtattttaaaattatta

SEQ ID NO: 298346 - DNA, 1576 bp, Cannabis indica
aatttgactaaaaatttatttcgagtaccaaaacaaatgatgcatcagtatatcctttgaatagggttcattgtataattttcctataataatttttttttagaaaattttcctataatataattgaatccacaattaagcccaaaaaatgaaaggagaagttgaaaaatactcactttttttatacattaattaaatttaccttcaaataaaatttaattcaaatatatattttttatgagtattatccaaattatcctcacacactcacataactaagatataattttaaacataatagatttgtgttctttgtagatgaatgtgtaagtttgtgggaaagttggggcaaaattttaattaaagaataacgaaaattattgtaaagtgataggggtaaaattagtaaaatgattgaaaaaagagctaaatatattagattttgaaagagagtaaaaattaaaaacatcaagttaaaagaggtatataataaaattttctcaaaaataaaatccaaggacttagttcgtctgatccatgtaattgggcttgcataggcccattcacaaattccgcgttctaagttaaactacttaaattttgaagaaaaatgtattattttaagaggaaattacactctataccatttttatattgtcctcttttatttttactttctttttttaaaatctatcattttatcttctttttttaaatattgtactaatttttcccctgtcacttcaagatactttccatgtgactctcttatatcaggatattttgagtacaatacatataaaaaggggtatattaaatataaaattaaaggtaaatttaaaacttacctcttactttaaccaccgattaattgtaatagccgaaagatgtaattgggctcaatatgacaacacaggcccacaataaggttcgcttaggcccaagaccataccaaggtagcaactatttcatcaggtccacagtctaggcccccacaaagttagcactcatctgctactactgaggtgggtaaattacacataataacatattttttgagagactgatatgatattgtattctagaaactgattttttttatcaataaactaattttttatcagaaaaactggttttaattatatagaataaaatttatatatgagtttttaagttttttatggattccttcttacgatgatttcatcaagaaattaaaaaattagtcttttcatcaagaaactagtttttttatcgaaactggttttgagtatgtaatagtcaaatttattcgaatttttaaggtttttttatagtatacccattctctcctatttttccatctctcacaactttaatcagcccaaacaaatcccttctctatctctttagatttttataatatttacatatacatgtaattttacaaacttttaaggccttacgtattcgaaaaaaaaaaaaaaagatttttacaccacatattgatatttttaatttttttaccattttactgtgaggtagaatatttttcaaatatattgtatttttttttcaaaaatattgtataagtttt

SEQ ID NO: 298347 - DNA, 1868 bp, Cannabis indica
gaaaaagatttagagttgtacaatcttacattgtttagattgtgtgagcattaaactactagatttaaatgaattaattactactaagtatatattattttctgataatcgaatgtaatgggtactacagctataatataaactatatttttaaattataattttttgaaatgcctaaaaacataaaacttattaccagtaaagataaaattgtgtacctactataatgttgtcatatatagtcactgtcgtaccgtacgaatattaaaagctactggaaactcttcgtggagatgtagttaaacagtgttataattagtgtgattgaaaatgagaaaaaagcgattacttcatgagtcactttaattgactatatgtacttgctgatctgatacaaatcccactattagtgatacttgttaaatagtattgctgtttcagtgaactaattaatttcaaaaagatcatatagatcgtggttccaacttccatatatatatatatacatatatatgtgtgtggtccacaattacattaaataacatatgtacatggatgaactcatgctactattaacattgttggaacttgagattatatatatagtgcactagctacatttcagggccggtcctgtgtatcagtataactcacgtatagctcactacatttcagggccggccctgtgtatcagtataactcacgtatttaatatatattattatactttttatatgagcattaatgtatctatatgtgttaaattgtgattgattattagttttctatatagttattaaactacaatatatataaaacgtgatatttgatattgaattaatattttataaaaatagtcattattaaaaaaaaaattattagtaaaataatattgtatgatcgcagaaacacgattttgtacgttgcaaaatgaccataaatttacaccctgtaagtaaattaagtgaaattattttataaattttaatatttcaaattgttaactaatttgataaatttcactaatagtatgctttgataagcaccaattaacatttttcttttcatgtatatagtgtgtagattagactagtcctatgaccaaaatattcttttaatctcgaaatctttaaatctaacacagctcaaacgcttcttcttgtccacccttcctttttcatctacatatccatggccgacatatattagacaagagctcatcaacatggaaccaaccatacaactaaacatatcatatataatatagatcaatcacacttgaccaaaaagaatataaaatatgttcatgggttcgatggcgatggccatgtaccccacccacacatacatacatgcatacatataatatatatataagtgaaatatatataatgtatctttataaaaatcacaaggcacccaaaagtggcaagttgaggttgagatccttttgacttcggtctctcatgcacattagtaacccatttgatgatgataaaaaggaaattattgcacaattaataaatgtcggccataaggcagtaataactactttttcgttatcttaataaggtaaagtgaaagaataagctgatcattgaaagaggataccattaccatctatagaattagactatacatacaattaatgcttttaaatttattttccttcttttaattttgtgcgcatttgattgagcttatgcttgatgttaatttagcctgactttgcaaaaacatttgcgtaattaggaatttaaattataggggctacatccaatgtttttatattagattttgctagccgagcagtgacagtcagtagtcccgtgatccgtaaggggaaataccgggtaagctgtacaatc

SEQ ID NO: 298348 - DNA, 2371 bp, Cannabis indica
ctttaaaacatgaagatcaaaactaacctttcacgttaaactagcaactcaaagcaatactaacctagaaaaagatcaaagaacccatttttaactttcatagagtctaaacaaaaccataattcaacaagtatcccaaaaccttgctatggagttaaaaggaatattagtcaatttatttttccttaggatatatgagaatttattactttttatttccactttcttttgcaaacattgctattatctagtatttagaaaattatatcaaaaaagtttttttcattaaacttgctgtcccttaattttttttaaacaatatattaatcaattattctataaaaaaaaagatatcagctattatatactagtcaaccagtcagagttggagctccaacagcggtcaaaatgggttatccttgaaatttacaacacaaatttttgtaactgttgtgtgtttgaactttatagattaatttggttgactaattaagtcacaatgtaagtttttcttttctggtatagagaaaggccacgtcatacatttggtatcatcatatggtagggcattaataaaaccctttcctgggttctcttctcttagacaaaatagtataataagtgcaatgaatttgatatatattataactaatattattattatttattattaatataatattgtacatgaaggggtccaagtatggctagaaaaaacaacatattgctctgaaaattcataaacaaaagtttgagatatggaatcaatggatcgctttcaagcactctaaaactatacaaactttggcttttgctcacttgcccccctacctatcttatttccatccttttaattttaatttaattccctttttttctttataattatataataataacaaatttattcttcttatcggtattattaatttattattcaagttgtgtacgtgtgtgttaagcactaaattttgcattatcatttgtataataaatatgtaattaatacctatttgttggcaacaaatttgccccctctttttttaatatgtttttgtccattgtacatttttcacatttgttaatcttttcattccttggttacttttctcaaccaaataagttgagaaatcaccatatgaatatgatcatatatagagattatattatatatatagctaacattaatttatgcatattgtaaatgtgggtacattgcatctttcctcttttattttgactcattccttatttctctaaaatacagaagagaacatacaaatttattaaaaaaatatataggatataatagctgctttattattttatataaatttttagagtaatgaataatgctcttttacatgttgaaaaatactatttattactttaaatttgttttattagtgttttttagtttaaaattatttttaatgtgtgtatatattatatatttttaaaaaataaatatattgaaagatagaatattaaagaaaggaatacatatgtaatatatgtaaaaatttattataaaataaataaagtaggattttaattaggtatttttcaaaaataaagaagaaagtctattatagtgctcttagaaggtagtttggataagagaatacaattaatttaccttgaagattatgattattgtgtacgtacgtggcttgaaagaaaataaaatcatataaaagagtatatatagtactatatagaaaaaatgaattaacttatcttacaagtttgacaaaaagggaaaaagaaagttgcactacaagccctatgttataatcattaatcaaacgaagctatgatataaatttaattattaaacaagtgcatgaactgtcctgtagcaaaccccagatgaagtaaatattgaaaacaaagaaaacccacttattggttgcttcattttctagcacacatatatgtatatagtaagctcaaaattacagcaaacaacatatgtctgtaatttttttttaatcattgtatatattataattattttaagatattctataaaaattaaaaaaattcaaaataatttataatataaaaaataatgtttaaactgtttattttaggtataaaataaaacaaaatgtacaacaaactgtttaaacttatttttaacattttttttttaaattttatataaaattttaaataactacaacctacataatttttttaaaaaattaaactaaaaaattcaccaaaaagacacacaagttcatacttttaaaagggttcaacccataatattttcttacaatatatataatatggcggctaattaggattttttttctctgaactttgacatgtaccaaatattgccccctgaacttttaaggtc

SEQ ID NO: 298349 - DNA, 2272 bp, Cannabis indica
ctcagcccgaaaccacatcccatgctttgattttctgcaacattgctcttgcctgctggaggaaggttggagtgtcttttgtttttgatcctggaggccaatttcgcagctggttagagttgatcttcatctcggccactgcagaacaaatagctacaattgttatggtttgctagacactttggaaagccaggaacaacacagtttggaaaaggaaaaataattctgttttgaatatcgttggatcagccgcaattgcacttgatcaatcgaggaaagctcaagacaaaatctctctatcatcgttatgttttaataacaaagttgatggagttgagcgttggactaaacccgaaactaatacaatcaagttaaacgttgatgcagcgacctttgaaagagaagaacaatatggctttggcattgtggctcgtgaccactttggcaattgtttggaggctcgggcaggatgttttggtggagtttactctgctgcagtaattgaggcctttgggaatcaaagaggcgcttagttggatcaaaactaaaaattgggaccatgttgtggttgagacagatagcctagtcactgtacaagcaatccaaagctctcaaaccatggggtcaacttttggtttaattattcaggactgtcgttctgctttattctctttgcccaatgtccatttatattttgttaaacgatcaacaaatcgtgctgcacattatgttgctaggcagtctcgattttatgctagtggtagcatttctgattttcttatttcctctgaacttcagaatcttatgtattcagaatgctaattcatttcaatgaacttgaaaaaaaaaaaaaactcaaatattaaatatttattactttctaggttttgtcgtacgactgaggaaattaaaagagtaaattaagcacatgcgaagccttgatggaccacagctcatcaaagaaagtcgttataaattcaatctgatctcatctcattctatttctattgggcatagttggatctgttcatacatacataaataagttttgagttttgacatccctttttattaatttgatgtcatatttattaatttaaagcatcatattaattatgatcatgtccttcaactacattccattgtgtacgttggaagttacttcaaacaaagacatcttacatatatttttggtcttttgatagatacatacatataataataatatatataatcaaaatcaaaatcaaaacattaagtagccgaaacaatttattgtgagatgcgcctatagctacttttattgttatgaaaaaatagaccaaatattatgtactaaacaacttaacatgtacaaatatcttccttatttcactgtgatcatatatgggagaaaaaaaacaaacaatggttggtagctgtgcctttcctttttctgagtcattatttattaaaaacaagttaaaaatgagtttagttaggagttgaataatgacctacttttccagtagtagcagtactctctctctcttcccctagtccccacaaaatttacatcatcaaggaaagataaaataatttctcaaagtattttttctattttgtaaagagtaatttgtggcacaacttgacgctgccttgagtagttataggaaagtacgtgtgtgttggaagttttgggttatagtctcagttatgcattgttgtttatttgcaattagaagttaaatttaaatatttatgtcgcaaattacttttttgtgaatattaaagtgtttatctcaacaattcctaaaaaatttctaaaataaaataaagttttattaatatctcttaatatctagaaaaaatacatatttatacgcattacatattactaaaaacttactactaattccctatactattttttttatggtgcaataatccccaacccttaaaaacactttgtcctcaaggtaataattaaaataaaaaatcaaaagtaaaagtaaaagtaaagaaagaaacaaaataataaaaatcaaatccaactcctaaattttcccatagttattttaagcccaagcccaaagtcctacggctaccaaatcaaatccacccttcagcaaaggccaagcccaaagtcctaaggcaaccaatcttctttttactgatcactaagtcgccagccacattcttcaatttttttattttttgaaattattgggaaatttacatggtatactaacttttgccatttttttacaaaatactgccaggcggaaatttt

SEQ ID NO: 298350 - DNA, 1154 bp, Cannabis indica
agggcataaaacccaacagttcgatcctcattttgaccgtttgctgttcttgacaatgtgactcaacaatgccttgcaccaaaaagttgttaattggcataaatcaatgattaattgttaatatactaagttaaaaacttataacatttaagctttgacgattaggttgcgcaatgtcttcagacattgcttttattaagtagatccaaaaaaattcatcctctatgaggtcagttggataagaacaaccatttagtgctcgccacacataatcaaacattctcaatcaaattcaatattaaatatatacaaatagttacatatgatgaccaggtaggacttgttcgtcggcattgagcggtcgattgttgttgttgttaacaatagccctgttggaggggtggcttctaaccctctcttagttccttggacgttcctcaagcccgtggaccaccctctcccattggtttctctgggtatgcacttcttgtggataggttcggtggtcctgaggtacttgttggttgtgggcgtaagcacccaacccttgagtatttttgttgagatagctctgtattaagtcgacagcttcttgagcatgaagatcttagtcgtcttggcgccttcttaccccacaagcatgctcttccaacaaggattagagctcccttttagttagggagacttttaattaagatcgcttgagtttgagttttctcctaatgcacagtttggacatcccatgactagccgtagtctaggtaatggcttgagtagtggttgcaccactgttactaggacacaggggttgttctctattcttttcggcgagtttgcttgttgatggaacttgctgggtattgtccacttcttcatcgggtcgttcttgagataatctagtaattactattttttccagctaaaaacttcaagattttggtttaagctctcaatgaaagcaccaaaattgttgactgaatttttagccaaccgaaatggagtcgtaaaaaaatgagatttaatccaaaaaaacgaacaataaatgtaaattatgacaccaaaatttaaagatattcggtcccagatgtcagtaatagcctactcctcttgtgttttattaatcagagttgcaaaatcaagaacaagctcttgaa

SEQ ID NO: 298351 - DNA, 885 bp, Cannabis indica
ataattgtagaagttgttaatcttctatactttttttctagagttgtcgtctctcatgtttggagagatgcaaatttaatcgctcatgacttagcaaaacatggttttagagttataagctttagatgctaaagcggttttaatttaaaaccaatgtacaaagataaaagaaaagaaggtgaaattggttctggttttgaagctaggttgtgtcgaagtggccactttcaaattatggtattggttttgtcaaattaaaatctaatctttatacattccctgtttctctactagatctctatttttgaataggatttttaatactattttttgttatagaagagagaatataatgttactcttcatgtcggacggagtggtctcccttacagtcttatccattcgaactatatatatttatttatatatggaatgcctctcaaattagaagcatatacctatttatccgtttgtgtgtaagttgttgaagaaattaagcacctcatttcagattgattttatacaacaatacaatgactcaccacaccgtccaaatcttcaccaccatcactattcttcctatattatatgttgtggtctggtctattgtgcaccacataacatagataaattaaatggcacgttgttaacataaatgaaggagtgacaccctcatctacttatctttttcaacacaaaactatgaatcaatatcacatatttatagaaatatactgtgagatccacatcatgagacatattaaggggtagaataataggactccttgtatatactttttttcttaatattgtatttatttataatatattttattttatatttgtagtattgtagaatgtgagaaggaagaaaaaaaaaagaaa

SEQ ID NO: 298352 - DNA, 8078 bp, Cannabis indica
gggattaattaattggagggtattttttttactattttttggctaacatattaaaacaccacatgctatttttaagcatgtaatgtcaaatttctcatatatatatatatatatatgtctttttacttttattgtatcagatacatgtacatacaattaaatgacccaaaaacaattataaatcaaaaaataaaatagtggccacgttagctaaacattcccatctaataaaaacgttaataatatttaaaaagagaatataccttatctttaaaatttagatataaagttaggtgctggatgtaaaaaaaaccctataattaatctcattcaatcaaaacgtggcattgataacgataaaagcttcacttttgactgttcacaattcacattcctcattaatgcctcaacgttcggagtttctctcatttcacctccaattccaaacccccattagttgcaaacccagttcatatctcaaactcctttttttttttgttaaaataaagccaacaacgaaaaataatacaaaattgattacatgatatagctgttgtttattgagctgggaaaataacaactaagccattaaaaatgaataaatatttatctaatatgtatgatagaccaaccaaattcaagtctcttaacaactgcattaatggactaaatttctccaaaggcaggggtttaaattgataaatatatatatataatatatatatatatgtgtgtctgtgtttatatatttatatatacacattgttcttatgttatggatcgaaacagacatatgtactctaagcaaggcaacagcggtacagggacgccaggaacaccatcttcgccaatggcagcatcatcatcgccattgcaccgccatgtgagggcaagctcggcaactggcttgctcagtactacttctaatgctaagaaagctcacaatgcgaaggtggctgcacaaaggcttgctcatgtcatggcaaaccagtctgcggatgaggacgatgatgaggatgatctcttgttcgattatggctcaatgagtacaactggcacaggaagcctcggactcgccattggaagggccattcgaccacgctctcctatggtaaatgctaacttaatcaaccattcttatgattatatcaaagaaatccctcaaaattatgttgctgctattttgaaatgattcatcacagaaatttgttttcaatagcttcgaatgtgtgttaggtaatttatgctatgtttgtttgcttttctagacgcttgtatcatcaggtactactagaccaattccatcacctctgaatgtggagaaactatcatcaaggcttcttcagtcattgaataatgaagagcagactcaatcagctttctctgtttcacacatcagatcaccatctcagcaaagttattatcacgagcagcctagctctgctcgttctacaatagctaataggccatctctgcctagtcccactgaccagcatcaacaacaacctccttctgctcgttcttcattagttactcgtcctcatttaggtatcaagacagttcccatggttccccctactgttccattgtcaattaagccatccccatcttcaacttcctcagatgttaactttggtagagataaaaggtagccataaaaatgttttattagaactattatcatctttactattgacccttttgagtttttaatgtgactattactagcagattgtcattagatcttgggagtatgaacttcagagagcttagcagtcagcgctcttcttcggttctacaagatgaggtttttctaattcaagtgctgatgtaatttctgtcattctgctctttagtatggcttggctgagttcacttcactcataagtttcaattccattgcagcttgatatgttacaagaagaaaacgacagcttactcgaaaaggtgatgccagaaaatttagaaactttttgatctaactttttacttattttgaaaccattctgtctcaattgaggacaattgtttttatttggaactccattttgatatgtgcttccccagcttcgacttgcagaagagaggtgtgaagaagctgaggcaagagctcgacagttagagaaacaggtaatattgctaacaaccattataagatagattattagtaccatttttttttctaatttgacataaattatcttctttaaaattctacctttataaccatgttaggttgctaatcttggagagggtgtaagtttagaagcccgtcttctaagcaggcaagttttgatgatcataaacaagttcagatattatcttttagaatctaatttactttattttttcttctttttgattcctattcagaaaggaggctgcattgcagcaaagagaggttcgtacaagtatacttttgttacctaagtttgtgtataaaacactcaattgtcacgctttgaaagaaggattggattaaaaaaaaataagagtacaaacacttaggaatcaatgagttgatcaattgccaaactaaattagatgaatataagttgcatgcgaagttgtaattttattttcttatcattgattggagattgtataggaataggatatcccaaaatattaatggggttaatttttgtgtagtgttttttcttccatattcttgccaatttcataacaaaatcacaacttaaagattacagtccaaacatgaacaataagtaccacatatatagctcttaaaataagtatagatatagtttgtttccatgttactctgggatttgctatttttctcatgaaacatcgtaaaagttgtcatagaaaatttgtgcatgaacttaattttttttttcaggctgcagtaagagttgcagaacaaatcggtaaaaacgatctaaacagtgaggtggctgcacttaggattgaagctgaggtatccaactaaatttttacatattgtattaatcaagaaatgttacaagcaatttatttcataattgttttgttttaatgacttagaccgcacgagatgaagctatatctgctttggagaatctccatgaaaaagaacacgaactgaaatcacttcgaattacaactcaaagaatgatactgaacaaggaagagatggttaggattcaatgcgtagcttattttttaaggcttgtgtctttctacttcttcatgtctgatcaattaagtgttcatcttaggaagaggttgttctgaagaggtgttggcttgctcgttactggggtttatgtgttcaacatggtaatttaagttacatgaattagttattgatttttctgagtagatagatagatatacatctctttctatggtctttactgggggctattatgttttggcaggtattcatactgagattgcaactgcaagatatgaatattggtcatctttagcccctctcccagttgaagttgtactatctgctggtcacaaagccaaggagcataatggtaaattgtcatatttgtaaaggatgattagattggattgaattggattatttatgaccgagtgttattaattatttgtgatcagaagacaatggtgtagtggaaagaaagagtgaaccaagggaattgagtgaattcaatggggatggaaacattgagaatttgcttttagttgagaaaggtctaagagaaatggcttccttgaaagtaggagaagcggtggctattgcaatggctcaacatcgtcgtccggtgaaatctagtggtgaagatgagatcatgatctttaccttttgagtagtttttggtaagttgtttaagactgacagtttttaatgctcttttagctcatggggttgctgaggagttgaagctaccacctgatggttattttgaagcgtttggtaagtctagctatcttaaacaatgtagagtttcatattgatgatttatttgatagtatgaattcgtttggcaaagtttaaaataagtttattttagcttatttaattagcaaagtatttttgagagtacttgggtaaaaattagtgatacatctttttcttatagaaactagctagcattacaagcttattgaaaaggccttatttagaagctataaacataaacaaaagctttataaacagtattatattaaattttattttacataaaactatatcagatttctataaatatataatattttaatataaaataaaacttaaaacagtattatataaaaatatagtatataacttactttaatataatacaatataatccaataccccgtcatttttatctaataactaatacaatatttaacttgcttgcttgtagagttgagcaaagaagaatcagatgatgtactttttaaacaggtaacataaatacttctactgggttaaacacgattcaaaccatataatgataattgagtctacaggactcgcactaatttattttgtaggcttggcttacatatttttggagaagagccaaaactcatggagtggaaccagatatagcagaagaacgtttacaatattggattgatcatgaatatgataacaggtcaccaacttcacaagatgctgttgatggtactaactttcctctctttctctatacttgaatttgccttactttataattattatttatttattttttgagagcgaatttactttatggatacttgaaagatatctaatctaattttgatattctattacatataacacccatttttctcaattcatttggttttgtatttacagttgagcgtgggcttatggaactaagaaagttaggcattgaaacccaattatgggaagaatctcgcaaggaacttgagttggataccaatcgcaaatttcaaagtcaatatgatttctaaaatacagacaaacaattcatttgttaaaagaaaaaaaaagtccgttctttttttttattctattgtctatcaattaataaccactaaaatttctcatgtgaaaaatattgtcttcagatggctattttcaatttgtttgattacctcatatgctgtataattctttaagtacggtttttttcgaggagtcaatgacatttatgactcttgtgtttatccaactgccaatataattgtaatttatcgcgagctagtgtaggatttttcagccaattttttattatttcattgtaatataattggacctccttctctataatagaggaatttccctagctattttttacactttaattcctcttaagacaattgtctttttgtgataataaaagttttaagtaaacgtaactccattatcttcgcgataaagagaattaactactataattatagtgttctctttttactttctgttcatagattttggccgctactgtttattacacggtacagagttgattgcttttcaaccaggaatgttggttggatgacagcttgtacttagagtgagacaaatcgtgtctccactacttgtaattgttatatccattgtacaaccacctcctctcttcaggatttgtcgaaggcgtgctagttttcacgaactcacccttagtcatacatccctttagtatcctttcaattacagcctatacttgtaacgagggagcaacactaggaaattcggctgtgttgggagaggaaacaacacttggtgatttggctaaattttgggagagggatcaacacttggtaatttggctaactgttaggagagagagcaacacttgataatttagctaagtgctgggagagggagcaacacatgataatttggctaagtgttgggagagagagcaacacttggttagtcggctaggtgttagaagagggagtgatgtgtgaggagacaagatgagaaaggaaataggaaggagagagtagggagagtgaaagagagagggagcggggagagcgggagtgagtgagtgaggggggttgagagagaagaagagcgggaagaatgagagaaggagaggggggaggagaagggaggacacccacgcggggggtggctgcggtgagctcctcataggggagctcaacccgcgactggtccccctcgtgccggggtgtcttcttgtggatagtttcatcgtgcaagatagacacctttcttgtcttctttacacttttcatgtgtactttgacttttttcttctcattaatatggaatctctacaaattacacttaaacaattttttatggtcagcacttgccctctagtctataaaaattcgttcaagtattcttatagactaagtttagtgccatagttgtcccattagacatttacaccttaggggtctttttgctatgaccatttatggagaaatgttagttgtaggagctatcttgaccccttttgtgttgggtacttatcacattgagggagtgtcaactctttgagctttcttaacctcttctatgtgttgcccgtatttttttgagagagtcttttgccacttggactttctcaacctcttcacttatgtaaactttctattgagggagtatttgttagcttttatggtctacatgagagttagaaaagtggaagtagattttataaaaataattaatccaatatgaaccataatcccaaggatctcaatataatatatattgatcattatccgcgtttcaggaattggacacgtgtattataggtcagcacccaagacccatcagttggaccctccataaaggtaaaataggttgagcccacttggatacttccttccggacacgtatctcaactctactctcacaaagccctctaccttaagttagttgtatccagaagcatgttcggtaccatgagatcggaaaaacaagacagtgcgttcctggaagaccctttcattttccctttttattcctgcacatagataagaaaattccagttgtcagatcacaatagagtaccgtatcaagattaatgtgaaaactttctataacaaatatcacgcaattaatttacagattaattgcccacaatcagtgcacacaatgttgactagatcaatccaaatccaatttgcctagtcagtaaatcatcttctttatgggttagacttcatgagaaagcctaacgttattatttactgtaaactccccaatagagggaaaagggaaacctaatgtaattcttaactactataaataccccacgaatcctatagattaggggttgaactctcttgcaaactttactcaggcagacttgagaacatatattctctatattttcgaaggctttttcaagctaaatattattgaataatacttactcgtggactaaggctagttaacgcctcaaccacgttaaaaattgtttatctcttttatactttctcttttgattatttatttttaagttcttatcatttttattctgtttctaaaaatctcggtaaatattttggtgctttcattgagagttaaagaaagcagtgagaccacttgcagattacgtttgagtaatcatggccctcaccggaaccaagtcaagtgttcatttcattggtcctggtgctagagatagagattctagtgaccctctagaggtcactagttgttagaataaccgtcaggacaaaaatcaaaatcgagacgatcccatcattgaggtcacaaaatctagagaaagcaactatgaggatgctaaagttaataatgaagatgtaccagaggatatgcatgataatgctcaagagaagagctagcttgctgagtcaaatcccgtggtcatcatggcaagacgacttgaactggccgaaagcaggtcaacttggcaagatcaattcaacaagttactactggacaagatgaccagaatagtggctataatgactgccttgattgactaagctatctcctaacgtgctagctcctccaataactaacacacctgaaaacacaaatccaaggaccctggaactttaggcattcgcaaagacaaaggcaaaggaatcactgttgaagaaccaaagaatccttccacaatatagcccaaaaagtataaagttactgaccaacctcaatagaagaggaaagg

SEQ ID NO: 298353 - DNA, 1842 bp, Cannabis indica
taattaaaaaaaatcaattttaactcccattgaaaatttaaatctcaaggcactcactcgtaataaatatgattatatagcatagcaactcaaaaggcatgcaccaaagcaaaatatacacatttaaattagaattaatcagtactaatgagtgtgattgatatttgaccaagaaaattaagagagggcagacaaaatgagactcacacacattagtaactagataacaaaataaaaaaaaaatcaattaaatacaaattaaacttatattattattatataatatttacaaggacttttagagtagtccaaaccactttgcctgaacttgagcaagcattagccaacattttgtttgacattatagtagttgttctccacaagtgttgataaaatgtttatttgtacaatggcaccaaagggacaaataaaagggaatgccgaaagaggtagacaacaatgacatgggataaggtctctcaattccccatgaaagaaaaagctcaccttactataatttcatttccatttcatttgagatttcacaactagaccaattgccctcttttcaattttgacttctttcttcacactttgaattgaatagcattgttataattagacactaactctccgtttagctggccgtataatgggtaaaaacattggatacaactttatattatataaattattacaatcatattatttaatacataagtcataatttgtgttactctgtattatattatttaaaaataatcatagatcgcagtctgaagtcgagaccgtagttcaaggtcgagattgaggccacggttcaggtctggagctggggccagggctagagtccaggttcgggtctggaactgaggctagagtctgggttggggagagaatctgagttcgggttcgagttctggtctggaattggggtcagcatcttgtgtccgaggttcgggactggggtcggggtcggggttggcgtgcgagtccgaggtcggggtttgtgtcttgggctagggtttggcgctgaatctaaggaagagtgaggtcggggccttatttatggtgaagacagtataattttatacaacttattaatacaacacgatacaatacaatataatacattacaacacagtgtactaaacagactttatcagtgttatgcacgacactattatgaggtaatggttttttataatatttattaaattaagatatcgaactcgatatttttttattgagataacaaaagtatgaccactcatagtaatactaattgcttaatttttttgcttaacttattacccttgtattgtatgataatgttaatgaacaccaatatatatgactttgtatgagccttgcattattgttgaattttttgtcctcaaattatttcttctaaagattattgggaaatagatcattgctatatatttccatgtgaatgtccactcatttgttgcacaatgtcattataccactgctcatagtttatttttttaatctataaattatacatcatcaataaacaattttggtcaattgtaaaaaaaaaaaagtcaaccattcaaaattcaaatttgtcatttctctatacgcatatacaaacaaaaatccaaaatagtatgttcattaactcacttttggttttagagagctttaggaaagcagcccttaatcatataaagttttgaaatttgttagaaattgagggaaataaaaattattttcaatttacagaagaaaataaaaatagtaaaaagcatatgtcaaaaaaaaaatagtacaagcatgtcactttacaaaatataaaattatttgaatattatt

SEQ ID NO: 298354 - DNA, 2427 bp, Cannabis indica
aaaaaaaaaaaaagaaaaagcaattcccatcctattccctactaaacaataaaaaagaaaaagtaaaaggagaagagataaataaatctctattttctctctatctctaaattactcttcccttccttctctttttaacttttaagagctcctctactctttgctactatatttctctcttcatttccagtccactcacatgaagacagtcatggccaaaaacactctagactcctcctcctcaaaacgacacttccactggaccaagaaggtcggacacgaagaaaacgacgacgttgagcctgaaacaaaaccctctttttcttcttcttcttctttttcttccgatgaagtggacaagaagaaagaggcaatggccgaggtaatactgggtcatactccaactactaaagatccagacccacctcgaaacgcagctcagactctcaaaaagaagctcccagcagtggcagtggctcggctccggtcagtcctgacagccttcgggcggaaccgagctgggctttcttccgggctcggaaaccgggtggtgggtacactgttcgggtcgagacgaggtcacgtgcactttgcgttccagaaggacccaaactcagagccggcgttcctgatcgagctagccacgccgataagcggtctggtccgtgaaatggcgtcgggtcttgttcgaatagctttggagtgtgacaaggagaaagagagagaggatgaaaaattgaaaagaggaggggtcagattgttggaagaaaatgtttggaggacttattgcaatggcaaaaaatgtgggtttgctaccaggagggattgtgggcctaaagattggaagattttgaaagctgttgagcccatttcaatgggggccggtgtcttacctgggcttgggcttgttgaagagaataataacagcagtgataacaaggcttccgggtctgataatggaggaggagatggtggtgagctcatgtacatgagagctaagtttgagagaattgtggggtccagagattctgaagctttttatatgatgaacccagatagcaatggtgctcctgagcttagtatctacttgcttagagtttgattcatctatgattggtttcatatacttgttctactttttttgttggtatatttggagaaggtggtgttttttcattttcttttggggtattttggtagtttaggggtggagggcaatacaatatagtattataacattaagatgttgggggtggggtcaatgaaggtgtatatgtatagtgtttttcttttttctttttggaggggttcaatccttttattaagtgattatgagacaaaagaggccaatgcaatcatcactgtctttgcattttggtttatttttttctttcttttctttttcatcatatagtgctcaagtttgtattgatttcaactctcaatcaacgatgagaacaaaaagatgggccaaatttgtaaagaaatccatgcttataattgtatttattttgttttattccccctttgatacctaatcaatatcaatcctggaaaattcatttttcttgttcatttcatcgttttggtctgattattccttctcaataaaactgatatttgtagtaagatttctacttgatatatatatgtaagctcaatttctcacattagtttgtccaaaaggtgccccacttattttgctaatacaaattcaaaaaaaatgtatacaacattaaaaatcgagaaaagttaaactagaaaggattgcacatataatttcatataaatttatacataatttagcaatttcataacattcaaattataataaagaggcatagataaaacattgtttcttttttcccaggtggggaagaacagcctctgccacaaatatatatttatgtagatatctacaaggatacggtcattgttcattgtctctatatactttatttattttaaatattagctcttattcattaatttctcatattactgttaatgagcttggatttattaagtaatgatgttacacacacactcaagcaaaaaaagaaaatgatgttacacacacataccacataccccataaaatttgtttgagcatttggtctaaaagtataaggtgttattccaatcattgcttttgatatataatttagtgtggcaatgatcccaataacattttgttttaaatactaatcatagaagtcatcaaaagcaaaattctaaagggaaaatccaaccccaaattccttatagcagagttagcttttctcctattgttgactgcttttttccatctcttctttccccttttttttttttttttttttttttttagtttttttttgtttttttttgtttttcgtttagttttttgtttttttttttttttttaggtttttttttttttacgtt

SEQ ID NO: 298355 - DNA, 944 bp, Cannabis indica
attgatttattaatttttttttttagatagtacttctaatatattaaactttaaaacaagattataatagaaatatgacttttttttatggtagatggataaattacaatttatatatttatatgaggatgtataaaaattctgaaaaaaatttacagttcaatgaatcaattgcaggcatgctaacttttttatttcaaaatatattattattattttttttttaaaggatttcaaaatatattataaatgtgcagcaaaatattttaaaatgagcttactaattattggctttccttttcctatgaaaaatgaactttttattatatcaaaatttactaatgaggagaattgaattgctcatttacaattacaaatatctcctaagtggttaacaaaaacaccattaagtttaaattcaaatttgatatttggtgtgtaaattaaattatcatttttcttttagaatttctctaatccgtttgactatcataaattataaatcctttagtaaataacacatatgcaatgtcattatattttaaacaaaagggcaccaacacaacacaacactctttcaatcaacataaaaatattcttacaaagattcacaccaaaaaaagaaaaatcacatgctcattcatattcataagagaatagaacaaggtaacaaagatagataagaataagagtgggataagattagatagttgaacatttcaatgcttgaaaatacagaggttatatcatctttgcttgcttgtgtgtatttgagtagaaaagtaatatataagtatatctatatacactaatcaaactctaaactcaaagccaacaattcttatcctattttgatatgactaaacttgttattctacaaaatctaccttagtgatgccctatttgcatatattaagtaagaggagtgttaattacaatttttt

SEQ ID NO: 298356 - DNA, 2385 bp, Cannabis indica
tgcgatttaaaaaattaaaaaactacaagcgcagattaattttaagaaatattataaagccgcaccaccagcatataaccaacacccgtagtagaaataaacgagtttggcgattaaacagatattctcgtcagccctaattgtaaatataaaaccgacaatatcacgtggagaagcacttattgtgcgtcaaacgagttaattaataacctttacatatatctgtatataattactccataattattaaaggaaatcatgtagagaaaataatttaaaataggaaaaaaaaaaactccagagccctgaccttcaaaccaaaaattaattcttttactttgtttaaataaaaaataatatgaaaatgaatatatgacctgtaccaattaattgtaggaacaaaatgtattatttttaatgcaaagaaacaacctttcataagctaaggccattttggtagcggtaaacatggaagccgcgtattcccggcacgccttccctcgttgcgccaatctcatagaaccttcttcaacgaccatttccattgcctccaacagagattccacattgggagcaaacatgtacccaaactcatcatcaacaacaatgctcccttttatactcggaaaccttgaagccataactgctttaccactcatcatagcctccattaacgtaagatcaagtccctgtggcctaagggttgggttcacaaatatatctatagcgttataaaaagctccaagttcagaaggactcattgaccccaaaactatcacattactccctatgtccttgtacctactctgccacggtcctgaaccagccacaattaagtaaacatttgggtgttttgtgatgaggctagagaatgcttcgtacaatagagggtgacctttgtccttaaccaatcttcccgctataccaaaaactatgctagcatttttgggaataccgattttggaccttaattcttggcctgattttgaatcaacaacaaaatcatcttcatcgacaccgttaagaataacgtggactcttttagttgggatttggtacatgtctcttaacatttcaccacagctatcgcttatagcaacatggtgagcataactcttaaagaatcttatttcgtttagtacctttgggatgaccccttgtacgcttcggttgaaagcaggggacattggctcattggggtgacgtgttaaatcttggacgatattagattgcaagctctctagtgctatgccgtgccatgacacaactagattatcaagatttcgggctagccaatgggggagagctacgctttccgagtggacaacgtcgaatggtttcagcttgttttcttccaagaactgttcccacgctttgttgtatcgccatcgacccggttcaccctcgtggcaatgaataaagggagatgaagtaggagtcttggaattgtctcctccatctggtggggaggtgaagacgtggacttggtggccgcggcgagatagagcagtgtgtagcgtgtaagcatggcgctccatgccacccggggctgtgccggtgggccatttgcgggagaagacggcgattttgagggcgataggtgaggcgttttgttggttaaaggggaggcgattccaagcgaactgcgcgttgagaaggttgcctgaccaggggtttgagtggtgagaagtacttgtggtgcagatggaggtggtggtgtgtgtgtggaggagaaagagagctggaatggtgaagagaacaacgaagaatagagtggtgcagagtttgaaattggaaggggatgatgagatattgggcttttttggtttggtgttgaaagccatattgggaaaggagagaatgtagaaatgtgtagttgtttagtttagtatttttggtttttgaaatattgcttgaaaagtattggaaagcaaagtggagaggaggtgagatacgcactgaagcaagtgcgttagactgaattttgctctcagtgcgtttttcacgccccataacttcgaggaaaagaaataaaattcatgtggcatagattttgtgactttgcttaattaatattctaagagagaagggttcacatatctagtagtggttatgcacatgaaacaataccgtaaataaatgttttgaataaatatatgtaaactattcattgctgaatattctatgcttttattattctgaagatatattgtagagtaatgcttttcttcctccgaaccacgtgtcaattgtgaagctgtacattcgaatgcctaactcatatttgaaagtaaaaattagataatatatgagaattataagattattttttatagattaaataaataatactacgagcttatgagtttttttatttttttattt

SEQ ID NO: 298357 - DNA, 680 bp, Cannabis indica
aaacccaacactatcaatatagaacaacctccacaaagcagaactaggactttccccagtattatgcagggggaataggcccaggaattggcaaactagctattggtgagcctcatgtggacttgggagaagacatcgaattggccaggctcagagaggttgtaggccaggttgactggactaaagaaccacacacttttgtgatgtttttgcccaatagagacgcggattcctaaggtggatggacaaccaagaggccatcctcccggcctatcaggcgaagctggactgccaaaattgggaggccagtaacttgataaggcagttcaatgagagaactattgagagagggcagaatctaattagagatcctctgtaggcaaggctcatccacagatcgagcagagtctgtagcaagtagacaactgacaaatagtccaaccaagttcctcgtgaataatgacaaactttccattgcccaaagatgaaaattttgccaaacagatcttatggcaggaatagccagtccttggcaccgagttgtgttgggggatggccatgaattcttggctcagtaatagcaccactcggccagcctctgaccgaccaatagagtgatgttcctctttaaaacgttcaagagcaagtcattctaaggcctatctttgacagactaggcc

SEQ ID NO: 298358 - DNA, 1919 bp, Cannabis indica
gataactaatcagattgtaaagagttttatttagggcataaaacccgacatttcgctgatgtagtacaccagtagttgtacccttcttcctctcgcactaatgtaacactaatggcatgatcaaacactacaaaataatggtacaactcctcaccttccattgagtttgatagaactggagccttagacaagtgctttttttgtttctagaaggcctcctcacactctttagtccattcaaactacttatttgttaaagagcaggatgcacttatctatggacttctaaatgaatatgttgaggctgcgattcttctagtaacgctttgcacattcttgtgctttttttggagatggcatgtcactgaaggctttgatcttctctgagtttactttgattccttaagagctaacaataaagcccaagaacttcctggaggagacacaaaatttacactttttaggatttagcttcatcccatacctccagagaactgagaaggcttccttgaggtgtgtactgtgttcttcagatgtcttagacttcaccagcatgtcactgacataaacttccatattcctccccaactggttcttgaacatcttattgaccagtcgctggtatgtttttttggtattctttagaccaaactacatcaccttgtagaactacacacctttatctgtctggaagctagtgtgttctgcatcaactatgtgcatttttatatgattatatccaaaataggcatccatgaagcttagcaactggtgcctggaggtggcatccatcatctggtctattcgtagaagagggaaatagtctttggggcaggccttattaaggtctaggaagtcaatacacatcctccatgtgctattaggcttaggaccaaaactggattggccaaccacactagatacaatgcttattagaggaagtcattcaaggtcagcttgtccacctccgcctttactgcttttgcccttactggatctaagggtctcctattttggagaattggtgtcgcatctttgttgatgttcaaatcatggcagatggtattacgattgatccttatcatgtcagaatggctccatgctggcacatcctgatttcttttgacaatacttatagggtctacatcgcaaatgctgacctcttctacatcttccattggttcaatcattctttcattccttacatggggttctaattcatcttcaacgtcctcccagacaacttcaacttctgcttgaatctccattctaggagcaataggtgcctcttcctagaccataaatatagtccaaatagagacattataacaactccttacgctcttttagtcatccctaaccactccaacacatccattgtcgtagggaaatttcatgcatagatgccttatagaggtaatactccaaaatttaccaagacgggatgtcttagtattgcgttatatgccgtcggatagtccaccaccataaaagtgcaatgtttgaaggtgcaagcattgttttctcctttgagggtgacatggagctggatctttcccattggctgttggaattattttaccagtatctagatttactaacaagtatgtttgattaacatcctaatatgaattctaaaaacaataaaataaacacataagagtttaagaaaccttacagtgggtgcagtggaatattatcactccttccattaagatctctagcccttgattcctttctatagcagagcataatcaagatctgaatctggatctctttctctccttcttgttggtgctgaatttccacagtcttacatactatgattgaggtaacacttgatgtgtgtgggcactactcattcactcaagggatttcgaaaaacagagaagaaaagagagaggaaagtggtggctcag

SEQ ID NO: 298359 - DNA, 2426 bp, Cannabis indica
taaggttttcttaacccttatgtgtttattttcattgttttagagaattcatatttggatgttaatcaacatacttgttagtaaatctacatccttgtaaaatattcccaacatagacattgtgtgcggggagtgtccaagcgaatgtatgggggctcgcatctgaacctatggggggcatgcatgcgagccgtgggtgagttatgaagggtgagtttggcatggtgtgagggggtaaggggctcacatgcgcgcccatggggggctcgcatgtgagtcgtgtgtgcgaggaagagacgatcgtgtgtgcgaggaggagatgttgtgtgtgcgaggaggagacgggcgtgtgtgcgagatgggcgtgcgagtggagggggactcacatgcaagctcatgaggggctcgcacgcgagccgtgcgtgcgaagggggacgggcgagtgggtatgatgggcgtgcgagtgggggggctcgaacgcgagccgtgtgtgcaaggggggacgggcaagtgtgtgtggggggagccaagtgtggagttctgagaggaggaagccaagtgttaagttgtgagaggaggaagccaagtgtgaggttgtgggagaagagagtcaagtatgagattgtatggttgaaattatatggaaacttcggggacacagcgtgtagaggaaggcgtactcccacaccttctaaaacctttgaatgcaagggagtacgagtagcgacgacaacggacctgcatggtctgagggcctgagcaaaggtacaccatgggcactcacctaatgcgtgcaagttgggacccccaaacctgtaactggagaccacgcacctgcagctcaaaaccatgcgtctgcagctaaggaccacgcacctgcaacccgggaccacacgcttgcagctcgggattgccctcctacaggtgaggaccatgcacctacaaactaggaccacaggtctgcaattagggatcacctaacacccgacaagagtacgaggcacaaggccactaccagcacctacagccctcaacttgagagcgatgtgttggtaccttttgaccatgttgtaccactggccactagtgcccataagtacccccatcttagatatgagaaggggttggaagttcatttttgtaactcatatagtgaatgcaataaaaataaaagtattcatcatttcactttcattttacttattctctttatctcatctcttaatagttacatattttctgaccacttaacttggttgacgagttccaaccatcaacagtttggcaccgtttgtgggaacgacaagctcaagccaagtcgctcctttacacatcattgttacataatggctagatgctcttgacgtcgtcagtacatggaaactcaccttgacgaagaacggttggttgcaccagagaaagacatgctgccatccgtcgtcggcagtagagaggcgaacatcaatagggcacaagtagacgaagagcaccaacatagagtgcccagcaaagtccctaaagcggtggaggacattagaacagtaataggagggtcttgtgtagggggaaaactcgtggaagagagacaggtatgcctgtgaggcaaggcaaaaatctcaatgtaccacttgactatgaaatttccaacccgtgggggtgtcgccacattgaaaggggatcaagatgaagctagagaatactatagcatgtcgtttcagatcaccacgaggccacaagaaccaacgacagtgatcacccatggggggccctgccagaatgacaaaaaaatttctgaactagaccctagagtttatgaggaagtgcgagtggagtctgtagaggagttggaagaaatagtaatctcggaaagcccgccaaaggtcctcaaaattagaaaagggctcctcgaaacccttaagaaagagttgaaggagtttctggagagtaatctagatgtgttctcttgggggcatgaagatatggaaggaatggatccaactgtaatgtgccaccatctcaacatagatctaaacgtgaaaccagtaaggcaaaaatagagggccttgaaccctgagaagtacaaagcgctaaaagttaaagtcgaccgacttgacatgatcaaattcatccgagaagcatattaccctaaatgggtatcgaaacccgtgttggttcttaaacctaatagaaagtggagagtgtgtatcgacttcacacatttgaacaaggcctgcccaaaagacagcttcccgctgtcgcggatagaccaactagtggatgcgatgatggagcatgaattgctctattttatggatgcatactaagggtataatcaaatatacatgaactctgccgatgatgaacacactattggaaatattttaccagaatctagatttactaacaagtatgttgaattaacatcc

SEQ ID NO: 298360 - DNA, 2214 bp, Cannabis indica
tttatttgtgaaattaaatatcgaaattattcataaaaaaaagaactacaaagacttgtttcagaaacttattaaagattgacagggaatctcgggaagcatttacgctactaagttatacaataatattaatatatatttctttgatataaataatacaataatatattaatgtaataagttataccttgcccccaaaaaatgaaaaagtattggaaaaagttatacatacctgtgaaaagctttgggattccaatacattggaccatcaggggtatattgggaatcttgagtctgatttccaattttggcctcactaattacagatcgggctctaattaaagacccctctagcctttctaatttggtataaactctttgtcgtctagctcttataataggtggaatttcatgatcagattcattaatattaattcccaaagaaacgacaatatcaccaccagattcatcactgttactagtaataatttcttctttggtcgtgttctgctgattcatcaaaacataataaatagagttatagttaaaaaatcactaattaaagatttatattctaaaacttagcagcacggcttttttggaaatatactcatgtatggaggagtaaaagcaaacttgccatttttgacaagttttctgttattgaataaatgatgtgttacgtcatatataataaataaccaataaagagagtatgtgataaaagtaattatgttattttttacttttaatatcataacgtaattaattctagaatcaattagataccgtacgtagtaggtttgttaaaatcaagttgagaatatatttactaattaattaattattaatttcttgtactcaataaatttgttggaatgcatcaacctaggtataagagctcatattaattataacaaaaaccaattaattacaataacttcaaataaatcaacccccaccaaaaaataaacaaaaatcaaattatatgccttgataagaaaaattaaagtagatttgtaaaattaaatgagagaatagttcttacatgttcttgatgagaagatggagagagatcatcagcttcaatattaatggtaagtggtgaagaagaagaagaagattggtttagtggagactcataagctgaagtagtaatagcttcttctacattgttcttattgtcaagcaccaccaagtttgacctcaaacccaaaacaccattatgatcatcatttggagttgaaagtacagaaataccctttaaaagatctccttctgctgctgctgatgatgatgttaatgatgatgaattccatttagtgaagttggacatggaaacccagttggaagagttgggtcccaaaactgaaacaaacccagaaatcactaccaatggaatcatgagcagcaaaagagttgatgatgatgtcctggtccaacatgcagaccatgattttttgttactattcaccatattgtatatattctttaacttacataacatatatatataaggctgattgaaaccaagatcaaaactaaagcatgatgatcttttgatatatataactgttttgtcgctatcctagctattttatttgtaaataatagtaataataataagaagaagaaggaaaaagtagaagagaaagaaagaaaatgaaagtgatattggtttatgggaagaagaacatttggtactaaatggttgaagcatcacgccaggcgtcctcttgtatagtcctctattaccgagtttttcatgcaaactttctgagtttcctattttgcccccctttgttaccaaaaccttagctattaatgtacctataacatatacatctatatcccaccgatataaaataactcgaaacttcattgtcctaaataattaacttcaagcactactcgccccccgcctattaagaaaaataataaaaaatagccacgtgtttacctctgactaactataaatattgtatctcatgaaaaaaaactatatgtaaaagtatatatgatattagattaaataaatctataatcgtaacaatttcagtgcagaataaaatggattgttacgtttatgtgtgtttgaaaataattgtgtaattactaagtggaataattactagagtagtttagtaattatactatatttaaaaatataaaatatgtttaaatatgagctagtaattacatatgaatttctaa

SEQ ID NO: 298361 - DNA, 4725 bp, Cannabis indica
aaagacacgcaacaggcattaaatatcacaagtacaagaatagaaaaagaaaaatacaattcagcgcatgagcagaaaagaatcttaagagacattttcatgtccatttaataccttaaaacgagcatgcaaagtaagtaaaacatcgttcagaagcgtggctggccaagctggatcagaaagttctgatgcaataatggatttcagctcatcaaatgattcgtgtggactttgcatccaaatcagagctttaataaccattgctctaacataaacacattcacaggcaacagttgtccgcacaacttccatcaatgatgctaacaaacttgcaatcgtatccttgccaccagttccattagatatggaagcagttctccgggagcctacatgaaaggagcaaaaggaacaaagtaagcaacagcaatagcacatgcaacgtaaatcatttaaaccatactgctcataaattatgatcctatgttttcaaatatgcaataatctttccatacaatgaacatataacacgccagacttgttaaagaaccaaaaccagatggccaaataataatcacttagtactgcatgcacacaaaaattctactaaatgccttagtccataaaattgcaatctataaactattacaagaaataaataaattctaactatcgaaaatttagaataacagaattcaatgtcaacaatcctgtgaaacactaaacagacaacataatacaagagatgggtactcaaagataattactttcagtatgagaagcttcagtactgtctgagtcgtgtgaatctaatgtctcagaaaatgaattaatatgtgccccttcatcaatgtcttgtacacctaaagcaaatgcagcagctcggcttctccccatctcctgcacaactcttgctgcagcatgcagtgttggcctagaaaaactacgaaaagaactctccagcctgaatacaaaaagtaaaaaacaggacacgtattactaaagtattctttaaacgttaataaaaaaaaatcatttaagataataaatcctgatatttgaagatcacaaaagactactgatgtaaaaatgaatatcagcttaatcctaatatccatcaagaactcagatgtttttaatcctgggtagagaaaaagagagaagcgtggtcaacctcctcattacaagcttaataagaggttgtgggcgccttgtcttttgggatttatctttagcagcttccttcagagaaggtgcttctggtaatttcagaatctctctagtcaaacgataccacccagcagctcgctcttcagtcctatatgaaggaatagtagggggagcaaaatcaatttaggaaaggaaacaaataacagctcatcaaattggaaagcagctagaagtagtcagaccaaaaagactatgcaaaaccccctaaaataaagcataaaaagaatagccaaaacagaggtgcaaacaattaaaaaacagagaaaggaacctctctgcagcattgtcatgttttcccaaaacacataagattgcctcaaaacagactctttcactgggatccagaagcagttgataaagcacagagttgaactgagatttaatatcaggcctctctgtacaacaaacaatatgatttagaaagccgatcatataatatactcaaggaaatcaaataccagatggcacttgggaagaaaagacactaaccatctagtgctcgggctctagatatagtataacacaatctagctagtgcaactcttgcaagaacatcatgcaaatgcagcacatcctgcagagcccctgcccgtgaacatatattattaccacaaaataaatctagctagtatgtaacaaagtacatcaatcaagaccacaaaggaatacctccaggctgtgcaagtttccctgcataaaaaaagtggcattagatactgtaggtggaacaaaaaaataccagaattacacgtaaggaaaacagattcatttgcttgagcaaaacatgatcagtgacaaaaattaaaaactttaaatcaaatcaatttacctatggccatggcaactccataaggatctttcgtagctagctcggaaagaatttccaaagaatgtctcacagcaacaggatcagcaaatgaaaccctgcactcaaatataatataatataatataatgataatataatgtatcggatagtcaaaatagaaacccgcaagtgcagcacaaagaggtacaggtaccacaggtgctatgaactagcctaaaacatagaaattagagcatagaaagatttccaaaagaaaaaaaaaatccaatataatgaaaaatgtagcaagaccattaggatcagggtaaccaaataagagaatttcaatcatgctagaaaataattgtagatgtttagtcaaaactcttaaaaaaggactattcaacatagagtgctcagcgtcacatcgacaaaacttttgagaaaacacaatcgattccaatatttcccataaagcaaaaggtgaaagatgttggaccatgtgatgttctctatttaagtagtatgtaatcaagtgtaacaacgaaaaattaaaaggaataactgaacattttcatattgtgtcaacacttctttattgtatgtgcgtgtcttccctaacctttgggaggtagaaaactttagcaacacattataagtgggagaactataacaaaagctagcaaagagatataagcacaacaactaattacttgacatttctattcaagaactacatgcatgcaattgcaataagaggttaacaatcaaaattgttggaaaaagactaacccctgtgacgctctaagcagaaatgctgggtttcctggatccagaggaagccttcgcaaagcacttaaggcagcatattgcaaattactccggatgataaactaaaatttgaatttttaatagaattaatttaaagtgtatcagcttataaagtacttcactagaatttatggaagtacgtgggttaattacctccttatcgccacctttagtcccaaacacacctttcttgcgtttgtgtggggcatcagccacctgagaatagatggattgttgtttaggataaatataaagcgtaagaggaagattgatgatcctctcatgtcatacaatggataaatttcaaaagagactgaattataatcaataatacatgtttcattattcatttacagtatgcaggatgaccaatattgcaatatatttatttgccgccaattatcatacaccttatataagcatagggtttgattaggaggaatgcacattattaatgaggtgtgtgggtgtatataagagaagagagtaagaaccttatcaagaatcccaaatacaatttcatacaattttgacaatatctcagagttgcttgagggggcatatgtaagagccttcaatgcttgcagtcttcgtgcatgaactatttgaaaaattaaaaataaatataaagtcaagcattacatagaacaataaattggaagacagcataaaaattacaaaatctaatataacattccactccacacatttcaaaatgaaaaaccaacccttcttatttttctaaactgcagaataatattttgtaaaagcgtaggtaagaattataacatatactaaaagaatgaatttttctaacaaaaaagtaaaacaaggtcgtaagttatatgaaaagtaaacaatctaagagacccatgcttaatcacaaaacccaagatttataaagatttgaagaaattgaaagcaacattcaagtcaaaaccataaagaagaagcactttacattctacttcaacatttgaagcctcagttgtcagcagagctataattctaggtaccacatcagctctggtcaccccaccaacagcatctatgtcagctaatgcatcccagtttggagttggaatcccaccaccagtacttacaccttgtgccccattatccgacaaaatcctggctaagtaatagtagacataccgtagaacactcctgtcttcacactgctgattaagctgcagaaagaaaaagaattttttcacaaccatgcaaaaatattttaggattgtttagtaatacataaacacaagatgtgcaaatgaaagttaaggaatttgagaaacaaaccatgagcagggaaggtgccaaagaagggtcaactgaattgtacacagctaacttgggaaacacatgattcagtaactgcttctgggaacttttctattcacacaattgatcgttattaaaaaaaattaaagaaattagttatttccaaactggtaagagaagatatagcaataaaaatggacaaaaagcaaatgctaagttacctgatctgatgcggcagcaagctcgtgaatacttctggcaagttgtgaatacgaaacaggctgcaatcaagaaaggaaaagtaagcaactgaagtagaaaaaggtcttaaagagctcaaagcttaaatgggttaagtgataataagcaccttcttcttcctctgcttctgaggcatcattatgtttgtgcgaacaggatgcaatgcagctttggcagcagagatggtatcgttctggatctgtaagagggttgctctcttggaacgcttctcgccggaaggcttccccagagcggttgggggacctgtcggcatggatgatgctgaagaagaagatgatgatgatgaggatgaa

SEQ ID NO: 298362 - DNA, 1679 bp, Cannabis indica
gttgtctatttgttttttttttttgtttctcagggctgttgtgttgggtcttttgtttgtttgttgtggttgctggagaggttgtttgatggtttatttgtttgttgttgggtcattatggtgttggttagctctaccaaccttggtattaagggtaaatgtatttcttatgatgatgctactgtgtcattgaatccttgtgccacgcctgtttaagctcttaccaccttttgcctttatgggaaactggtggctcctatgtttgtggaggaatccatagtgcatgattttgtgtctaaagcctggaagacacctgtcacaatgggagcttttgttgagggcaataattatgagaactattttgtgtttggttttgagaatacttatgacagaagctggactctggagaatggcccttagtgcgtaaagggccattctccaagagctgatggtgtcatttcgatctcctctctgcgattgtgggtgtaaatacaccttctccctcatgaatataacattgagagctctagctagaaaagtgcttttagttgatttgaatgaggaaaagccagcgtcctagactaattagcttagaattcagattgaaatccagattgaggaccctctattctcggggtgtttttttgagttgagaaaaggtgttaaacgttggatagagttcaaatatgagaaaataggaattttctatgttcattgtggttgtttggggcatcaaaggcgtggatgctcgttatcttcacctgatattgtgttgagcaccaatggaactccattccctctctatggaccttggttattctcgttctcaacctatgtcgatgtgttttctggtgctaagtcatttgtttcaagcagtcgcactatcaatgccatgtagtaattggtatcgttggtctcttcttcggctgcagctgtggctccgtcgaatagttttattccagtcttcccgtcgtcggttttgaagatctcgaggaagaagtcaagtgtgacaagagggcctcgggcagtcaagagtaccagtaagcaggcagtttgggtccccaaaatctcatcagttaggtgtgagaaatatgtttccgtttatggtaatggtgtcgatgttgtttcttctgttggaagaaaggagactgagaatttacctggtttcaggggtgatactttgaaccgttgagagataaagacaaaccatttgaatgtgttggatgaggtggcagctagcaatgttgaaagtcaaactagtgggtttattgggccgaccccatcctctcttagggtcgatatcattaagcctagtggtggggaggttgaagctattgaagttaatgaggttgcaagaaggtgagaccgagacatgatctagtcgcacattatgaacatcatcgtgcctacaaataagcaggaccgagagaagctagtacttattgcgtatatatcgattagtatatctctcatgcgacatgtaaaaaccacttttatttggtctgaaagactaatgtgttcgatgactagttgggaactcgaaagttctcaattgtcaacacatgaatgtttgaatatacaattaaggatgatcgcaaacattcaactaatacacccaaatgcccattatgtgagtaaaacaccacagagctacaacattaaggaccaatagcggcggg

SEQ ID NO: 298363 - DNA, 8939 bp, Cannabis indica
taaataaagcttattttcgtttgatgaatgatatgaatataagaacagaatcgaagatttaacagcacatacacagggatagagaataatcactgcttgatgactggtcgagtgttgttccagagccactgatgtgcggaaccctccagcaatggggagacctatcagaccttatattagcttttgattctaggagtgaaaactgaaataattaagaaattctcattgatgtaactttcttgcttttgtatcctagcgattctttttagtgattctctctttaataatgcttcatctcttattgggtaagaaacaccagagccaagaacagtacaaagaagattaaatcccttctgataagtgctaatagtgattctaccgtttacttgcagactttatttatgtttttatctagagattaggatgattagtgtagaaagtaggaacaaaacaatattacatatatgtatcaataataagtaaagaacaaaaaatgaaggattgataatgggatctggtcttatcctaaccttttcccaaacctgagaatggtaatcattaagccaagttatctcctccgcagaaagcaaagtcaagtcaatcaatttagcctgcatggtgaaaccatcaaaatagttttgtacgaagactatatttcagaaatactacgataacaaaattattaaagaattgaataatggaaagaaaaaataatcagcaagatgatgctttagatatctatcgtacctggataggagtaaatgtgagtttttcaaaccccagatattcaatacctccaaaacgatttggtgtatcaacctctttcacagagagcagattctgtacatgagcacaaaacagaaatcaatatggagctacaagagagtaaggctatcattgtgcgcaaaagaggccaaattttagacattgtacttcaattcgaattccaaaggcatgatcttcataatagccaggttcattgctaacaatcatgcctttctgtagaggagtcagatttccatatcgaaaactaatactttgagggccctcatgaacatttaacgcagctcctacgccatggccagttccttaaacattgacagtaaaatgaaataaccttcagcataactaataataaatcataaatatattgcaaccccaaaattttcatggcatgcaagagaagtgaagtaataccatgtacgataatcaagtccagtcttccaaagggatgaacgagcaaatgcatccaacacaaaaccaggggtattttcagggaatactgcttgatcaatagctatatgaccctgcaattggatacacagatacattcatttatatgtatgtatatattattaaaaaaaagaccattggcaattagccacttgttttctgttcccctttttttccattagaaaatcagtggacaaaatagcaatgaatatataattatacaatgatggcaagcgtgcatgaaatgaattaaatatcactgtaatcaaacagattagtggatacctttaaaactcgtgtgaagcaatctttttctcgtgctgtgggctcagtgaaatggacggtccttgttatgtctgtagttccatcaacatattgagcaccgctgtctaataggaagagtttatttgcttccacgatactacaactttctggctctggtttgtaatgtataattgcaccatttgcaccagaacctgaaacattattaaaaatataagcagttaaaaggaggaaaaacacccttttccaatatagaatcagcattatacctaaaaagaatattaatgatttcctcacaaatgtatttcagaaatgtaaacagggataaaagagaggaggccagggagattgagcaaattgggacctcaatgtttgcattccagaataagagataaagacagacagagaaagagaaagagacagcatatcatagacaaaaatgtattacttccaagttcaagagagccactacattaacgggcaacacattctgagatataatcaacaatacagatgttgacataccacttatagtgtcaaagcttgtgtccatgaagccactctgcttcgaacgaaattcaagaagcttgtctgcaacttccacctctgttaatttcacatccttgtgaatttcctcttccaaccaggcccaaaattgtgctagggcagctgcatccctgcaaagttatcagtcttatgcctcctaacaaagctatcatagtcttatgttcctaacaacatgaagttgtagcatattaaggaacaaaaacatttaaaccaaacacagaaaacacatgcaagtatattgtcaagtttacaaaatcttttaaagtttctccaaggtgtcagtcactaatctcatcttataattgcagaagttaatattgtctaatagaattatatgagcaaatatagctccaagtttaaatttaaggaatatctgacactgaggctgtacttcgttgttatcgttgatatattaaagaccaaataaataatggcaaagaaccgaaatgaatatcaaggatttaaagtttgctggaaggaacatttaccttaaatgacagtttctcattccttctaattcggcatcatttttaattgcttttgcataagagacaggagacattttataaattccagcaggggcagctgaccaaccattgaggtcatcattcatctgagtcttatctaatttctctaggtgctcataatatctttcacaggctgaattgtaggtgtcaacaatagcagcattgacagaagatctatccaaccataatgtagctccgtgtgctgccaagctagaacatgaaaaagtttacacaatctcatttgactgagtttgaaatggcatgggcattacacagacgtaaagatcagtatacaagccaaattgtgaaacccatcgaagctttgtgttgttagaaaaaaaaaaaagaactatttttcttcataagaaattgcagatcaatctcttcttaaaagacatgttacccatgcaaaaaatgtatacaccataggctcacctttctacttcagagagaatggactcgtatggcctcaactcaatcccagcatccttcaggtgcttcatcacatctggggtgactttagaattatctacaaataattttgccttctcgatctccactatcaagtatgcatacataacaggtgaatgtgggacatcacttcctctctacaaataaaatttagaaaatccattaaccatgtggggtaagacaataaaacaaagaagcaaaagatcatttaataatttctcaaaaaaaaaacaaaaaaaaaaaaagaaaagaaaagaaaaaagatcatttaataaattctaataaatataataaagcatgaggttttcataggaagtaccaagttcaacaaccaggcaatttcatcaagcatggatataacaattgcagatgatccagcatcggcaagttccgtcctcaaagaagacaattttgatgccacatctaatccagcatattttaagtcatgcacacgaatcagtttgttcggaggctttggtctagcttctttccatatttcatccactaggttggtatcatataggaaaaccaattcatgattctttttggaaatggcctgcctcagttcctctgctgcatcccaagaaaaaaggaactgctcccttcacaatatcaataaagagtgacatcatgaaacagccaggtaaaaaggaattcaacaatcaaatatactccaattattaaaagaactactttgataaaaacaagtgtgagcagctattctgagagccattgagcaacaaaagctgtgaacgcattataagtgatttaagtattgctcacagggtcaatgccaactctcccaccaggagctaatacatcattaagccattcactagtggtaggaactccaagattaccagctcgcattagaatccaactagaacctaattgcttttcagcctaataacgaaaagaagaagcattaataaatctacacagtagagaacaaaaggtttctccagattaaccataaaataaaataaaaagtacataacattaaatgtaacaaaaaagagtttcattttctcaccatatataatattaaaatttaaatcagcaaacctgaagaaaatagcgtccgtctgtccatagagctgctttatcctttgttacaacagcagttccagcactacccgtaaagccagataggtaggccctcctcatataacattcagcaataaactcgctctgggaccaaataatggaacacaaaataaattagtataaccctttcttcttctgctccagaaaattcatttatgacatgctataagcattattataaagctctatcttaaaagagtacacaagaacattttcttttctaatcagaaaaaaacactatcattttgttcagtgttcaacataactacaaaaaattatacttttgggcactttccctctacttagaaaaaaaaatagaaactaattacaaaagaaaacacttttaagaacctcttgctatggatatataacactataataactcaattgaagaattaattaagacatctcaaaggacagcatcctgagaatactaaaacaaaactccataaaaccatacctgatgcgcatcctgagatgggacgatataggcgtcgatgccggacttggagaagagttgacggagggctcgaagcttctcgtcgggctcagagttggcgcgtttcttgcggagctccgaagatggcttagcggaaatggaagagcagtttcggacagtcaataaaggagctttgggggaaatactgagaaatttggggtgagacttgaattggtggaaaatagggaagcagttagggatgaaacggaagtaacgagagtgagaaggaagagactgtgtgagagagaaagggcgcatggcttgtgatggtagtgattgcatggtagcaaaaccctagagagataatggagagagagagagagagatgaggactgtgtgactcggggagctaaaactaacagcaatgaggaagatgaagaagaaggataggtagagagaaaaagaaaaagaagattatttgtgataaaaaacggtgcgttttaaacgggtatgtaagaaaagaaattatattcaaaaggtggggtctttcgggaaaagtgaaccccccacaaaaaaagaaaaaaagaagagcttccaaacggaatcgttgtactcaactcgagttcatatattcttctattttaactttactctttcgtgattggcaaaaagataaaaactttactctttccagtttcttccagctgtgattctatagccccaatacattttcagattcagtttttgcgagaaagggtcctcaaagttacaaacttttatcaatggcgattattacagaggaagaagaagaagatcaccaggaacccatacaatcacaaaagaaaagtaccaagccccaagaacccagttcgtcttcaacctcaagcaccaaaatccccaagtcagaacattcaaatccgtttgctttctggttttacttcactattatagtttcggttatcacttcagtttttatctcattcaattctctctcctctcaagatcccaaatcatggtttcttagtttaccagctagtctacgacaacactactcaaagggtcggacaataaaggtccaaacgcatccgaatcagtctccgattgaagttttcaccgttgagcatggtcccgttgcttccgaaaacgttgttctagttcatggattgggtcttagctcgtattcttttcgtgaaactattcgatctttgggtgccaaaggagtccatgctgttgccattgatttacctggaaatgggttttcggataaatcggtgacagaggccggagttggacaaactggggttttagagaggttttgggaagtgtacagtgaaattcaagaaaagggtgtgttttgggctttcgatgagataatttcaactgggcaaattccttatgaagaaatcgaagctcgaatgacttcaaagagaagggttgtgaagccgattgaaatggatccagaagatattggtaaagtattgggacaagtaattgaaacactgggtttagctccagttcatttggttttgcacgattcagctttagggatgagcgcaaattgggttttggagaactcaaagagtgtcagaagtgtcacccttattgataccaatccaagatcaagacccgctttgcctttgtggatgttggacataccagtgattagggaacttttgttggggcttccgtttggatattcatggttgatcaagtctttctgttcgaaagggatctctgccacagatttggaggctcatagagctctcttgagaagtaaggatgccaggagtgcgattgttggaatgggaaagaagactaattacagctttgatatggcatcgtggggtggttcggatgaactgaaaggtgtgcctttgcaagtgctttggtcagacagttggtccgaagaatggactaacgagggaagacgagttgcagattcacttccacaggcaacttttgttacacatccgggtggaaggtggcctcaggtaagatataaatatatatatatatatatatatatatatttcaccataaagtttctccatttataaaactttctcagttagaatgatcggaaactagttttgctacattgtctttcttttggactgcatgtcaaaagtgatttgttttgctttaaaccgatatttatctgacgttatattggcctaacacgagagagttgtgtagatctataaatggctaaacttaagtgtatctaatatttgttgcttgatgaataagattaacatttttatgcctttataaaaactcccataatagatagaaatgtttcttgggtagaagagcatcgatctgtagttctgtactactaaataccacacatatgcctttcccgttgcctaaccagtaagcattagtgtttttgggttttatctccaaattaaagttaacataaataattgtttcgactcagatttctaataggcagtctttctataatttgttgagctattgattggtttatttatgaatgaccttcatatggcacattttactgttagtatccatgtctgctggctctttgacttgctactccatgatacccaaccgttcacaagtgaagctctgatatagtttctaatgagttaaaacttctaatctttttaatcgaaggctgaaataaattcacacatttaacttatgaatgtaggaggatgccgcttataaggtagcccaaagcattgtgcagtttgtgtcttcattacccccaactgtcagaaaaattgaggaagagccaatcccagaacatatccagaaattgcttgatgaagcgaaaaacaatggcgatcatcaccaccatcatcatcatggtcatggtgagcatgatcaccaccatggtaggcatggtcatgaagctggttatatagatgcgtatgggcttgggggtcaaggtcatggtgctcatggatggtagctttgatttcaacttaatgttaattgtaactaggctgcttattagtatttgttgcctgattgaagtaagtttcttaagagagaaagttttagctcttgtgcatttggggctcccattgttgtattttgagtgtagcagtgaactttatagcatggaagttgatattttttattgatctttatcccacgtttcgatctttgacaagtcgagacccactcttaaggacattttggtgaagtctgctaaggattcccgaacctcgtattattattcataaaatgagacaaaacaagttttcttaggtaaaaactagttcgtaattcagttatataggattaaaaaacaacttagagcaaaaaaattagtttctaattaaactcttttaaaagcagcaagatatttattttttttttttggaacaatgaacaaaaaacaagaagtttcattagtactcgtgaaacaatacatacaggcagggggagccaagactagatggtagggggaccaatatcagtcggtgactaaaatttcttgggtgggtgtcaattgagaaaaagattatagtgttttatttttacaaatattttatacaatattttagaaattaagagttgagtaattaaactgaaaaaaaaaatgttagtagaggcatttggaaagtcaagagaaaattaaaattgggtgtagtcaaaggtaattatacaattttgtgtgtttgtcttactatataattatacactctaattctcgtacctttacacaatataattactaaaaacttttgattttaaatattaagtagtaaaaatattatttttctctacaattatgagttattttgccaaataagacattaggaatttatatataattaatttctcatatttaaataaaccttatattttcaaatatagtgtaattacttctaaacacacccttaacgtgttaagcattcagtttaatattataaaaactaatatttacttgtaatgttttaatgaaaaaaaaaaaatcaaattaattaaataatgatgtaatttattaagggttttttctgttataatccaataaggcaaaagtattacaataaaatatcgagccaatctattaaacatttatataacccaaaaaaaaaaaaataacaaaaaatacattttcctctacaattgtagtcatactagagaaacgaaggaaatccacgatggatagagttcaacaatgatgaaacaatatcagcaacggagaatcacaattaatcttgaaaaatcgacatgataataagaaaatattaaactaaaaattaaccattagcgattgatgaaaaattctgcagaaatacgagtttgaaacataaactcaaccctgaaaa

SEQ ID NO: 298364 - DNA, 3579 bp, Cannabis indica
tatatatatatatagtttaattctatttatctaccttttaattattatatttggtacaagtgattaagatattaataataaactatttatttctttaaataagaatatattattgcagacacagagaaatttggaaccaatgaaatacaataagtgcttatttatatttttttctgataaaaagaagacatatctatttttatattctacagacaaaaaaaaatgatgaatggttaattttaggtacactgccggccaccagtaggggcaataataattgtaatatactctttgttcatatgctttcattaattattctttgttttttaaatatttttataccaatttattcaaataaattaatttcgtataataaaaaaaatataaccttaacaaataattgaactattttagtttataccaatttattcatagcttcttgtattcatgaactataatttcatatcttttttgattgtatatttacacatcgaaaactgttggagattaggaatttaattaattaaatttctccttcatttgcacaatttggtgccaatatataactactttatgagttaactttgtaatcctaccaattttcgcctttaatttgatgtatatattatgcactcacttaattcataatgtatattgtttagtagctactacttaaacatatttgttaagcgcggattgattcccactacaaaaggttttacttttaacaaaagatataattttaaaaaattgtgactaatcatatgctataactaaaaggtctgtgactaaaggcattagtcacaaaaattacaattcgttgtggctaaatgtgttattagtcacaatacttattgtaactaaaactaaattagtgacaacctgaatctaaacactatattttagttacaagtaagtttttgttgcgattaaaagtcacatttaattacaaaaaatttatactgtgactaaaaaattatcactaaaattaataattttttatagtgtccattccaataacttcctaaaacctaaaccccattccttgcaagacttacataaatccttcgaatcaccaaaatcagtcatttctttctagagaaaagacggcattacattcatttgcttcaataccctctaggggaatagcttgatttgcacccaataaaaatgaataaatcaacactgagttaatcaaagtaatttgacctgtatatgataggtgggcgcatgaactccatattatgattcatgctaccatcttctctataaggccttcacgttcagcatgagataaccctttcatacaaatgggaatgcctaaatacttaaacgacatattactcctgacgaagtcatatcttttatctatatcacaacaatagatggccgattttacttcagtatgaaggtctatgaaaattatgccattaagtcaatagtagtatatttatacaaaatataataacaaataatttatttaattttttactttaattattttaatcaataaaaatattctttcagaattttattttttcattctaaaaaaaaattgtatacaataattccaaaaataatttttagtatgaacaaaaaagtgtattatttttttggaatcgaattaaattaaaagttagtttttgttctttaagaacataatgataaacgtagttcgttaaataattaagggaatcaaaacaatatattttcattattattttgacaaaaacaaacttataaaaaagtatatttttggactgaaataatagtgtttcttctacagcttaaaacaaatcaaacataccatatgcattgatttttgaacaaaacaaacatagcattaatcattaacttaaatatacaacattttcaaataaagattatttatacatattttattttaaaaaaaaatgtcttcactattcttcttctatgaatgtatttgacaaagaaaaaagtgtttgtttagagaatatgtacaagtaattagaaacaaattttgcatattattgtagaataaatataatattgttataagaaagatttatagtatatcagaaagagttatttggtacactctttattatccgtttcactattatattatattgttggttatcactatgtacacataatacaaatattttaatttatttattttagatactgtaaattattgttaagagttttttgaaaatttatgagtacttgatcttaaataattatacaatctacaaaattatgataaaaaattagattattaaaagaaaattaaataccgaaacaaatattagttatttacatactgtaaaattaccctttattattttattatacaattcgacttattgaatttaattaataaattaattatatacatgatatattgtttttgttgaagttttaggtgatgtgaatgtacaaattgtagcaacaaagtctttcaagggaaaatcatgtcatcatcatcgcatgtagacctctcatagtggtttggtcctagcttagttttgggttaccagtttttttttttttgtaaaaactgaaataaggagatcacgtggtatatatctcttctctactctttcgatcatttttggcaatcccggagatcatatgttaattataggagtcttatatacctcaatctactttaattgggtcatcagtcctcacctcaagggttctcatcacacagatgcagcaagaaccaagcctttttttaatccatttcaaaagaggctggagtgggtttagaactcttgacccaagcaagagaggatgccaataaaagtaaccctaccactacaccacacagcacatggtgagatcattattgttagggtttggatagatttgctggccaaaatggttaatggtcacatgcttagttctgttattgttatatttcttagtacgaatgtttatttaactaactaaagtaaattgaaattgaatttattaatgttacatacattagttataagaatcatcttgtacatattatcaaaatttattattaaatattattatttatatatgcatttttttatttgaactctcaaattgctctatattaatatatactactaaaaaagttaaacaatataaaatagaactatagaagggacacatttttaataaatattgctatgtatagggattttaatttgctacacgcaaaaaaattcaagaggaaaataaattttatagattaatataagagaaaataaattatttgtagtccttcatattttttttatcaacaaaaaaaattcattaatcaaccatcaaaactatagaacctccaaacacaaaagccacaacgaccataaaaccctcactctctacctatcatttaataagcgtgcaagtaaattttgcctaaagaccatctttagtaataataatttagtcgcaataaaaaaattgtgacttttagtcacaacaaaaaaattacttttgactaaacatagtatttagttataagttgctactaatttagttttagtcacaacaagtattgtgactaaaaacacatttagtcccaacgaattgtgatttttgtgacatact

SEQ ID NO: 298365 - DNA, 7737 bp, Cannabis indica
aaaaaataaaataaaaaataagtggaacctaaaaataataaaataaatgaataagtaaaatagaagcctagcaattattatttgaaaaaggaaaacatagaagcttatcaatataattaataataatttatttatttttgataagaacagcaaataatatattttttaaaaaataaattagttttttttttccttttctcttgagagattagttgattcggctgttgtgatttgtgaacaccacccaaacaaacaaacccaaatatacaaaccctcctcttctcttactctgcaactctctcttgtacaaacgaccactgttatttcaaaccctagctctctcttctgcaacttcaactcctccctttctcatactctccttccattcctctctcttcttctttcccaatatcgatcccctccgctctctctccctcgctacttgctcattttttcgatggctgacggaaagttcgatctaccggacgttatccttccctctaattccaaaccctccgatcagtcctggactaacagaggtatttcattctcttcctctgcttatttgatttactttcattctttggtgttgaaaatttcttagtttcgattccttattggcggattcgatggattcgtagcgaatgcaagatttaggtttattgatctgaaacttcctagtggaacatgaaatactttttaggttttagcatattcatatcatttgtaggttatgcttcggatcagtttctttctccctcatgttttccgcttttgatttcgtttactagaaataaactaaaatggaaatcttatggtaaatcagttcaaattttaaaattcacaatttctcatataagttttctaggtaaagtaagagattcaaggattttgatttttctgcagggattagatctcatttctgtaaatgtgtaatttgaggtgttattattgtgtttttagggcttgtccccagtgaagatctttttattaaaccaaatctattttagctgatttgactctcttatatagtttcatatgtgtgtttttaagttttgggatcggtcatgggattcatgctgaggaagtaacctcaggtgttttgtcagtttgactaattcactgtggaaacttgtcttgtgtcaaattctttttgactagttgatattgataatgcatttacatgtggtgttgtatgaaaatatttttggatatttaattggcatttattcatgtttattttttcatatatgtaatatttgttatcgtggttagattatattgataatattatagtttaaataaatatggttgcatgtgagaattatatagctttattacatccgattagacatatatttctggaatgttattactggagtaattttcaaccacggatggtctgagtgtgacatgttactcggttgaaattttagaaaatctggaaaatacttcttttggtaattatgatgaacagttagaaccaaggggcctaaatgctcccatgtaataatttaaattaattaataacatcaaaggcaattataaaagtgatggtgcccagcctcctccaaaaatgtttttgatttttatgttattagttttattagcagtttgagtcttaagaacaaaactggtaattgtttttagaaagttttataattttctgttatctcgtcgatgctttaatagttgaaacttctggagaaaatggcgaggaaaaggtggttactgggttacttgatgagtcaaaaggtattatatttctttgggtgttctttcttttgagggtgggaatggagcaatgaaattgagaatttattttgtttaactaatttattatgccgatttatcaattcctgcagatttactggtttcagaaagcagcatacctttgtccccccagtggctttatgccaaaccagctgaatcaaagatggtatgttggttactttcaatttttattttccttcttttttcctaatgaaaaaattaactgtagatgtttatagggatagtgatgtatttctttccttttatcttattttgctaagaaagctacatatgcagtgccttttgtgctgagcgttatgttaaatatggttcaatatcattaccaccagaacatagataatactataattatatgctcctagtattttaacttggttagttgctacggtgattgtcttcagcttttaggtctcctaaatgtatctgagctagaaaccagtgtatcttatgctaaattatcttggatttctctcttttagagagattctgttgttttataatttgtatttcttgaacctttatcttactcaacttaatatatattgattcaactaagctgtggtcaattgactttttatgactttggaaccctgttccatcatttttttatatgatgacaggaattacgtccttcaagctcactaggaaactccacagaaagcaaccagaaggatggttggcgtttggaagggttggaggacaaaaaggaccgaaggcgggttaacactgatggtgaaagtagtcgccgctggcgtgaagaggaaagagaaactagtttacttggcagaagagatcgcaggaaagtggagcgccgagacaacacttcaatgagggaaacaactgacaatagagcattgcctacttctgagcgatggaatgatggtcgtaaccctgtacatgaaaccagacgcgacagcaaatggtcatctaggtggggtcctgaagacaaagataaggaacctcgaaatgagaagagaacagatgtggagaaggaagatactcactctgaaagccagactactgtaggtagcaatcggtccactactgaacgtgactcagattctcgtgataaatggaggccacgccacagaatggaagttcaccccagtggttcagctacatatcgtgctgcacctggatttggacttgaaagaggaaagggagaggggtcaaatttgggatttgcccggggacgaggaaggccaaatggtagtgggacatcatctagtatcggtaccgaaagtgttcctggaaaaccaaggtactcagctggtaggttttgctatccaagggggaaacttcttgacctttatcgtcagaatcggcttgatccatctttcgtttcaatgacaaatgagatggaggacttacctcctataactgaagaaggcttggttgaaccattggcttttgctgcccctgatgctgcagaggaggtagcaaaaagattccaacaatgagcttattaattttctatatagccttgtgtaaaatttttgcttttgtttcactgaaataataaaatttatttgtgtaacttgactataacaggccacccttagcagtatatggaagggaaagataacaagtagtggtgtggtgtacaattcatataaaaatgggagatcaactgaaaatatgacaggtaatttgcatgcttataagtggccactgtcctctgcccataactattttcagttttatttataattgtgtttactgtctaggtgtgggagacattgaatctgtagatggagctggaaacattttgccttcagcccttgtcgaggaagctaataataccgtgcaagatgttgcaaatggtgatggtactttggtggacggtgggtggaatttttatatttctatggatatatattttgcctaccatttcctcatttgtctctctaatgatctttggctgatattatatttcaggaggtattggcactggaagtgatgttgatattggtggtggataccatggcgcatttcagcatgatgtcaatataaatagacaaaagttagattcttctttcaccagccattcttttgttgacaaaattggttctgctgattccaacgttagttccaagctgtctaacaatcaaggctctcaacatattttgccttttaccgaggacaatcataatgggaacaccatcaatgtggcgaacgggttggacaaggatgtcttacctgaagatttatgcttgtgttacctcgatcctcaaggaatgacccagggaccatatctgggtgttgacatcatctcatggtttgagcaaggtttctttggaacagacttgccagttcgcctggcagatgcacctgaaggaactccttttcaagatttgggtgaggtcatgccacatttgaaagcatgggatggacaagaatatacttttaataaaaacgttgagctagaagaatctggagcttttggagtaactttggggaaattaacttctgcccctgcttctggaatcactgagtcatctattggaaacgaatccagcccaccattggctgatttcaacagcctcccagatgagcttgttcagttgagaatatccgaggctgaagatccaaaactcccacatttcaagggtcaaacctttcatagttttgatgggcgagatgaaggtaacttttgcgatttattgcatctgtgggtttttctttgtatttcattctaataactctctggtttctagaaattttgtttccaggaagaccaatgaacactggctatcctactgcaaaatcatctgtgaaccctcatgatcctttggaaagttctggcgtccacatccctcccttccctgaattcacagaacctggcttgcgtaatcaaactgaaactaagttgcatcctttgggcttgctatggtctgagctggaaggtgctcaaacgagctatgcacagtcatctagtgtgtcttctagcatgggcaggacttcttcttttggtggtatggctgatccaggtcttgttgctgactcttggtctgatgtttatgggaaaaatcaaccttctgataccaacctgtatcaagatatgatgactgctcacaatttgtcacgcatggaacatgaacccagcaatcttgatttagctgaccagctgatgtcacaacagttacagcaacaaaaactccaacagaggaatgtgttacctaatttttcccagttaaatgactcagttttagagcatttgcaaaatcaaaatcttattcacccccagcaattggccaacctttctgcatcagaactagatcatattatgaagacgcttcagctgcaacaacatcggcagcttcagctccagcagcagcagcagcaacagcagcagcagcaatatcaaatgcagcaacaacaatttcatcagaagcaaaagcttttgcaggaacaacaaactcatgcgcgacagttgattctcgaacagtttttgcataatcaaatgcatgaacctggttttggacagccacatcttgatcctgtgagagccaataatgttctagatcaagtatttttagagcagcaccttttaaatcaactgcaacaacagtctcatcacactcctaggcatgtagatcctactctagagcagctatttcaagccaagtttggtcagacctcacaacaagaacatcaaagatatttatttgatgcactttcccgtgcacagcatgaacagcggcaatctttggagcaacagatgcttcagcaggagctgcaagctaggcagatgtcgatgggattgaggcagcgaacaagtatggaagaagagaggcatgtcaattcagtttggccagcggatgaatctaatcagttcttcagggcccatgctggttgtcaccgagctcactcttctggatttagtcctttagacatttatcagcggcaacaaagggcaactcatgaagagcaggtcaaccatcttgagcggaatctttctgttcaggagcgacttcaacaagggatatttgagcctggctcactgccatttgagcggtcaatgtcctatcctcagggtgcttcagggatgaatttggatgttgtaaatgccatggctcatgctcatggtctggatatgcacgagtcaagtgcacgaatgaaatcttctaatcaagtgggaccatttccttccagtgttcatggtgttggtcctcaacaccctttagttcctaatcaatttcaagttccacatatggatggaactgagaaccgatggtctgaaaagaatgagcagctagaaaatgactttgtcgattctcggtttcaacagtcttatatctctgcagagcgacataatagggagtctgaagttaaaatgacttctgaggattcttctttatggatgtcaaatgatgagaagtcaaagagattattgatggatttactcaatcagaaatcaggcaattatattactgaagatgcgggtaaagaaacatcctttgagagaaaggttttaggcaaccaatatgccaggtcaagctcatcagaactatctttcacttcgcctcctgatcgagaagctaaattaaatagttcatttggggtgggaatatatggttcaagtcgaagtgaaccagcacaagaagagagcactgattctggagtatcctctctgcacaaacagcaacttgagttgcgaggattgaaaagtgagggtatgatgaaaggtcgggaatttgagcccccacaaaggatggtggagcaagcaggcttggaagctctagatcacgagaggtcaatgaatgccacgagtaggcattcctcccttggggttacaggtaatttgattttcttttccctgcgggtggaactggtcatttattttcattgcttctctgttagcccctgcatatacttttgtgagcctcaatattatttttatacatttcagttggaagtgccggcacttatgataacaagtttggaccttctaatgcatttttggacgatgctgcaaaagataggtaagtttgtatagggtatatgtaaaggtttgagtattgctttaaaatgcagcacaaatagtacctgaaatggagccgcctgattattttgattgacatcttttatacagacatttggtgtaattaattgtgaaattattagtaatcatgattacacattggagcatatgtttgttgcttgtttcttattttgaacctctgtatgacagggcattctcaattaaagggcaagaaagtattctgctgagacgtcctcctgtgctgcggacaccctcatctcagaatggtttgtctgagctaccatctgatccagtttctaggggaaaatcttcttctagtggcatgcctgatggtatgttgatatttaaatacatttttccactagtgtctttgtgtggttatttgtacacgaaaaagttcggtgctcggtttatcttcttctaagcaccacacttttttctctttacattatattgttcttttcctctctatcctttatatgtttcctgttggttggtgacaaaaggaaagatgaagttgaatggagtgctagacttgtaataatgatatcggtttcattttcaggggtttcccaagatacattgagcaatccaacaaaccaagctccagatttaccagcctcttccaagagggacatgcgcttccgccgatcttcatccggcagtgaggcagatgtatcagaagcatccttcatggacatgctaaagagtacagcgaagaaggctgctccgtcagatgcccattctacatctgaatcatccgatgtaacacaagggcgaagtgggaaaaggaaggcaaagaaaggaaggcaaatagaccccgctctcctcggcttcaaagtcaccagcaatcgcatcatgatgggtgaaatacaacgagcagatgactagtagtttagaaccaacaaccatttttttgttttgttttgtttttcctt

SEQ ID NO: 298366 - DNA, 1119 bp, Cannabis indica
cactatatatatatatatatcaacttttacaatatatgagtgtatggactatgattcaatccaaataaaatgactcattttatcaaagtatgattttaagatgttttggagttgagcttgaggacaacttctatgtctacattaacttaacctctccaaattatggccgaaaaaatgtcaaaatcttacgataaattccgacttgtgaaagctagatttctaacttggactcatttctgaaaagcttgttaattttgtttttttttacaaatagtctaaacacgtgaataatttctcaatgacaccaatcaatagtccaagaattaaattaacaataattatgcaagagtgaagacagaagcattgttattaggcactagtggtgcctaatactttctcgatatgtcacgttgcggatgactagtgatattctttaaaatttattatattaaattatatgggacccgatacttaattagactaatagcgatattaatacataagagggtgctagacaccactgatgtcctttagaatttttagtgaagacaatgacactaattatactacaaacatccactgagcatcaattattattttacaaatatatattatatccacttgtaactgaccattgttttgtgctatttatatatgggtctgcaacatgtatacaaaaacatttatatgtatagaattcatagttggcaactttggcacgcaacagtattagtcaaagctgacaccaatttggaccattttgatcaatatgggctacacatttgaacccaaaaatccgacccactgcacctgaaaaaatcgaaagcattgcaggccgggtttggaattattaagagaaatgcagaccattttgatctatgtgtcaatattgttattagtctaattaagtatcggatcccatatagtttaatataatagcttttagagagtatcactagccaatcataagatgacaattcttaagggtactaggcaccacgggtgttcaataacaatgctcttattaaaatataaacttggcccactgcacattgtaggccaagttcggattacacccggggcagggacggacacactaataagattgtgggggctata

SEQ ID NO: 298367 - DNA, 3273 bp, Cannabis indica
aaaaaattatattgtaattaaaaaattatcactaaaaagtaacattttttgtattgataataattattctatactagtcttttcgatactttctaataaatgttaaggtttttatcttagatcgatcagatcatatgtttttagatgtgtagaacttaaaaaaagaaaatagtcaatcaaacgatgctaaaagaacataaataatggcggcatgcatgtgtattcacatacatatataagtgatgattaataataataatgcaataattataacacatttaaattacacatttttttacacacaatttggttcctatttatgtattttaaaaaaaataataataaatatagtattgtcatgaatttttattggatggattaatattatttaatataatattatagttggtattgacttgtattaatagcttgtataaaattatattatctttaccaaaaacttaaactccaccccggcccagacccaggtctgggtttggaatcgagttttgaggtcatgtcggagaccggagccgtgtcttagttcgagtctgaggtttagggttcgggacatggtccgaattcgagtctgaggttggggtctccaacctcgtaccctttgtaaatattataatacaagttaatgagaatcagttgttatgtattaaataatacgattcacattatatcaaaatttatagttgtaataattaatacagtacaatgttttatctaaatataatgttaattgttattcaatacaatacggcccttatactttttatatactttgattaaggtgtaatgtacgttaggcttagtttgatgtattttagtttctaaagttctcactataaatcaactcaatcctaatccaataattgtccaaattacaaaatatatacccggataccttacaagacacaaaatctactcctattattattattattctcatatatgtgttaatattattattattattctcatatatgtattaaaaggtatcagtggtgtctagtattctcatatatgtgttaatattattattggtttaactaagtatcgagttccatataatttaatataataatttttaaagagtatctctaatcaatcgtaaaacgacatgtttaaatatattaagtactagtgcccaatagcaatagtcataatttaaatatgtcattgaccttattttattaaattaattattagcacacataccatatttctgaattttgaaaaggatacttccttttattaattgcacctgccaaaagttcttcacaaattttcaaattcaataatgattttgttggaacatttattgtacattataactaagttttcgatttccttctcatcaagtcagctttggagttcttaatgttttctttttgaattttgttaggggagaaaatatcggcaccaatacaaacaaaaacctatagagttaggtgcactctaagaaataaaaacacacaaaatggattatattgttaaatatgaagtcacttataagaagtgagttactcttatagttcttgtgggtatttaatccacacctattttatcagtgtgttaaaaaaaatagagcacaacaataaaaggaattgaagcatatatttttcaaatttatttgttcaattaaatattttatttttattttgaatattaaataaaatagagcattttattttattttttatcaaaataaaagtaactttgttttcaaattttacactagatagtctataatttggaacaactctcgctgcttacaaactattgaacctgcaccccattttgtagaccccgactcctagcccagacctccgatgctgaccctaggtccagacctcaaacgttggcccccagcccaaactcgaccctcagacctaaaccccagtgtaataaccgcgtagttaaatcatgagagttagcagataactaagggtttaattattaatttatgattatgtgcttcttagtaaaaattaaggcttattgtcagaaataggccttaggaaaatattttctcaattatagaaatatatttgaatgctaggtgattatatgtgttatatgtgaattttcatggattgcatattttatgtctggtaatagtggaatgcaatgtttggcctatatagtcacatagatacggtatagtatgttagaatcagcgaggtaaaatttttagatatttggaatgttgggaatattggatgtcatggtttggaccatttaaccctaaaatatttgagttaatttttcgataaacaagggtaaaattgttaattaacctaaattattttatatggttttagtgggattttagttggtttgatttaagcttattgttgataaatataagatgagaaagataattatgctttaattatcttaagttttaaaaaaataaagataaacacttcaccaaccttctcggtctttgttcggtcaccaccaagaaccaaagaaaccaaaatctttcctcccaattttagacaagaaaaccatggatttcaattaagattttggtagattaagtgtgggatagctcaaggtaagcttctccccattttctttgaaattgtcaagttttctcgaattaggtttttctacatttctgtattttaggtgttgtgcgagttggttgtggttaagtttgttttctagagttattttaatattgttggaatagtttttaactggttttagtgtttgttgttgagcaattaaaatcatatccctaatttcacatccattgttaactctaattaaccattcttcttcctcctatgtgattgacatattataaattaacctaaactttttttagatcataaaggtcctaaatttcatgccaactactgcatctctaagatagaacaacatacaattcgcattaagcaataatctaaaagtcacataagctatgtaaataatttcgtttcacatcaaaccctaactttatttatttagagcattctcaatactcactttttagattttgtattgagattatagatcatgcataaggtgcacaatcaaatacatctaataaacacaaatatgaataaatcacaataacagggaaagaaagaacaatcatatagcattaatccatgaaaaaatctcagtcaatatccatcaaatttctaaatagggagtttagctcataatcaaatccataattaaacaaaacacaaataaaaacatagaatcaagagaagagaaggaaactagtgttggaaattattttac

SEQ ID NO: 298368 - DNA, 5560 bp, Cannabis indica
ttccttttggaagatacaggagcaaaagaaataatttacttctgactgccatcttatttgtacagaattatatactggttaggagagattactaccttgtggcaatcatcaatgtgaactttcgtaaaaaatgtaaaaatcatcaacatgagctagcaagcaatatggcaaggcttggcaaagaccaagcagactagacaattgccaagtaaatgggttgtagcccttatggtggcagccaggttcggcatggtatcacaaaaggtggagaagtgcctaaactgaaagcctttgtgggtataagttcttgaaaaattgacacatttctttgggacttagtacaatactttgaaggagcgagcatcattttgaagatcccacatgagtatgaattggttggtggtatacaactacatggggtagagctcactcccaaaagacatgcctatgaaaggagtgccttataaaccaccaactattcccatacgtagtcgatgtaggatcttaaccgtttataatttaagaaagccataatcaaagagaacatgaagcgagaaactaaggagagagaaactcttagtctcgatcccttgataatttaatttattttattttatttttttttgaaaaagagaaagggacctcttgtctcagacaggaccctctctgctatatattgaaaatcctcacttgtaaatggctcaagttgttacatcaactagttggatttgagttataagtaattgcaagtctcagcatgaactaatatttgagttgcaacaatttatatgttgtaaattgaactctcattatcaccatatgataataaaatatataaagccaagtatgcaatatatacatgaccttgatgaatatgagaatggagttgtcatggcttagaagcccccaaacatttttccaatactttcagtactctttgcagcattataaggctcaaattagtgttgataggaaaagattactttgttgcagattaaccatcaatctgaacttgtgaacataaatttgacagggtttcaataaattcgaaagtatcaagtgtgctgggaaggctattttgaaaacaataataaaaataatgctattttgcaaagtcacatcaaaaaacataaatatcttactaagcactccttatattagatagccaaatagctatccaatgccttattttatcccaaacactccccttatttccctcaaaatcttctgagtgttctcctttttctttaaagctataaatcacactaagtatcgacaactgcgctccaccaaagactctactgggctataccacgtataacattacaagttagtagctcaatactgtgttggggtgtacacccgcgtaggttgaattccattcacttagatactctcactccctttcacgtgtgggtctacatcaaacaaagatcagagggctagatgaaaataaaaaataataataaagaacaattggcccatcaagagacaagctagagagttgcaaattgtaaggattttttttgggaagaaaaacagccctacttgtatacaccagggatcctagttttaaaaaaaaaaaaagagcaaaggaaagtatacacaaatagcgatgttctgaacacctgatctcctactataataccatgagctcaatattatgaacgtaattctagccttccttgacaattcatagagattcaatactcctttgtaggttagaagccctagctttctagggctggttaccaaaacatgtgcacatacaatcaaatctcctaaattaaatcacaaatcatctcctatttatccacagctttctcttattgttattaaaaaaaacattgtcaagtcagtcatcattcatgatgctaataaactgcctcaagccaactcataataagaaaggaatattcattgttcatgatttatgtctctttatcccctctccattaaatagccaatcaaaagcatttttattactttcaattttatcagataaccaagcaaaactgttatgactttgcaaaggaaaaaaaatctgaagtcatcatctataaatactgaatttcccttgaaaccacgataaccaaaataattttactagccaaatattgaaaatgaatctggaaaccatgatatagcaaacagaaatgcaagagtgcaaacctgtgaacagtaatcatccatttcttcctccttccgttggcgtatttcatcctgaattggagtgcaaagagaaaaggcatttagcaagagtatacattattcaatatttgttaaaaaataggagaaaaacatagtcataaatcaacaattcacaaaatagtggcaagatataaaatagataattttgttacttacctaatcatatgctcaaaatgttacagttagaaaaataatgaacaaaggaggaaaagtataagcaaatgttgtcaccataatttctactgtctactctaagccatgtttaatttcctttctcatgaaaagattaaaataagagagaagcacaaagaaaaataaagtttcaggcagagacttgagtaggttttgctgagtgagatgttgaatatccacgtcttaatttgattccctttgcccctaaagtaatgacactagaaaatccagaagcctcagtattgagccaagcctcccaagtatcatcttctccagtaaaaagagcatgcaatccctacaattgcaacccaaaatgcaattatgaatcaaatattaactgagattatcaaatcctttatgtagaaggaaaacattgtaaactacttcataaagctttactatgtaccagggaaccttgcaaatcaactcgagctgcaaaaagacctgatggttggaatcttcttcggtgccaaacctggaggtaattattgaataagccaatgtattcattactttgcaaactaacaacagagggcactcaaagtaaacctcagtcagaaaatggtgagttccactatttattgaaaacgaacaaaggtcgataaaccaaagatgatgggagcagtattcatcaaaatctctgctcccgtacatgtagaaaattaggctgattgaaattttttttagtagagagagagagggaccacttgtctttgactggccccagctcgaatgtctaacaaacaatagtttagtttatgactttcaaagtaggaaatctctgcttcaaaccttgctacgatatgcaatctccaactgttcagcaacatcctcacgaagagggagccaatctacgaccccctttacgagcaaaccaatgacctcttaaaacacgccgattttctccactccagtaaactgggaaagaataccttttctctaaatctacctgcattaaccatgtcatttaacttatagatataagttttaaagttgaatcgtacaatatgtgtgaagatatgtatagtaggtacattacattgcttaaagagggtatggaaacattagtaattgcaggcaaagcacccaaaaaaattcaagcataattaaagtaccccaattaacaagaaccaatttttttcttcttttatttttttcaaacaaaagctcagtttgttttaatataaaaataaccaattagaaagatgaggcaaacctaattattttttctgttgtcttccaaacagaatatcccttagataaataacatcaaagtttaaagtgtaactttcaatatccattaatctcgcattaatatattcgcattgaaggataatgcaagcatatatgtagaactggctgatgtaaaaccatgttttaatccattgtatgaatgtctagctaataaatagctagtaatgctatttttaagaaagattggatgtattcattcaatttttgcaaatcatcgcaaagaacatgataaacactagaccaaatatgaaagctaaagaataatattcattgacatcaaagatagaattacaattttccaagtttttaggacacttggagatctcccaaaaagagtttaactcttccaaaatacacaaataatcagatctcctcaaatgagactacagagatttatttgtactcaaccttctgagttctgtccactcctaaatcctccccctaggctacttacaacttcattcagctccctaatagccaatcaaaatacatacataatgacagcaaggcattactaaactaagacaaggctaattacaccagagccaagtaatagttagagggacctcaagacattatttttttatttttcaaaattttagtaataggttgagtaattttaatttaaattattagtttagcccctccgaaactaaataataacaaataaccccacccacttcacgaggaggggtggctccataagaaacaccataaaaggaacacaggaagcctacctcataaagtcctcccttcactggaataccaactctctcttcctccatttcatataatttggttgatggaccaccctctgaggaagagatgttgacttgtttattcaatttattgcgggaactaggccgttctattggaccttcactgcattctgcatactctttccaccaacaaccaagcaactcttcctccctctgtaaatgtgagttcagcaaacacttaaacaatccattacctagttgttaagttaaatcagcactaacaagctcgattaccaaaagcttgatattctacacgtataagaaagtcttcccatcgagttaaattccactatgtttagcatatatctatagtctgatgaaaaattaactaccattaactcagaatataatgttcatattccaaaaagcatcatcaacatcttctgagatatataaaattaacaaaagtgtgtggtgtttacaagttagttaacctgtaaaaaagaagcctctattgcaagagaatcccttctgccaaaccgaaaatactctcctttccctactatctcagcccggggaactgaagcagccaactctaagtatacacaaggaagcatctagtttatgatatattttggtaaaactaattacaagttcaaatagagtctatacatacacatatatatactggaatagacagagaaacgaaaatttctaccattctcagctaaaggaaccttgcaaaagaaccagcgaacatcgacgccatcagagggactcctagtctgagcaagatacttctggcgacctatacactgttcaatctcatcctccaatctcgcaatattcgacggcgtgttcttcaataattcaggacttgtttcttcaacccgacgagaaacgttttccgtcttagagtcatttccctcactagttgccgatcttgaatccatggaaaatagcttctgagctataataatataagagaagagtcagccttccttcaatttgaggacaactctaacaattgaatcttagccaaaacccaggaatggggttcttcgaaatgaaaaagcaagaaattcgcaatcaaagctgttaaagctgaatatttaccttttatttggggactactcgcgaaattgaaaatttagaaatggaaaatgaagatagtactttttttt

SEQ ID NO: 298369 - DNA, 1879 bp, Cannabis indica
ttttttagaaaaatacactcaactacttattttgttttaatatgaatgatcattcacctttttgcatatttattgtaaaacccactgtgtattttcaaacagctttgaatctttttaattaatgcatcaaaattatcactttgtaaaataaggcaaaatattagggcgttacaccgactttttggcattcctttagtcagttcttattgattttcacaatatttttgatttcattgggattgtttctatctttctatctgagttatctttttctctctttcttccttcataaaaggtgtgtctcaatgatttgagttccttaattgatctggattgaatcttcactagtattaatcatcttagtgtgttatttttatttgctatgttttgtttctatgtttaattttatttttaataatagtgttgctacacgaccttgctattgttatggtaataggactttatccatttatggcaggtaattttagtcttatttattttcttagaacatttggtgtatctcaattagttcctagtctgtctcttttagtaccatgaccatgcttatctatgttcagatttaggaaattctccaatatttaatggcccaaatgatttatggtgcatttatttgttacaattgttatcaatatggttggtcatttaattattttcttttatcctagattgaataatagggtcgtcattactcaattttttattggaagatatttagatgatagttaagtataagtgtaatttatcacatattcatttgaattggatatctagtattcttagagcttctttcatgcttcaacactcacagcttattgttattttagttgaatgtgctattatagttttcattcttatttttgtaaacggtctatcatgttgatccttccttttaagtgatatattattatgtaatattagattattatccaatttaccaattaataaaaatttccatttactctttaacaaaaaatggagactaatcataattgaaatatatattagtattgatgatttcaaacgacttcacttgactgaaatttatcaattctcatttcaagttgtaaaatatatgtaatattataataataatactgattggctaatttttgccatcgaaatgaaattgaaattttcctttagaaaaagaaaaaaagaaagaaattgtaggtggtttattgttgtcgtacaaattatgagtactggacgatccaacgctcatcaagtatccttgcaggtaagacgatgacttacttaaatgtgaccttttgctgaattgcaagtgtgtgtgtggattgtatggtctgctaacatttgttacatcaattaaagggactctcacttatgtcctcccttatattcactaaaaaaaacatcagtaataattttggggagaatgctttgactcaaagcaaaaagtattatgaaaatgattatttagggactaatcctccttcactcatagaagcaatgtctttgcttaaccaagagtttactaactaattgaaatagttattcctatacgtaccacttcaacatgacccaccacactactactgctgaaaacacaacatttctgataaggaatcatatatataaatatgggtatgctcttaatgggtattaaccatatatgggtattttattcttgaccattggatcaaatatctaatggttgatatttataatcattaattaaatattaaaaaattaatatttcctattttgttattttctatattcttaaaatagataaaactattaatagaaataaaaaatttataaatggaattgttatttaaaaaataaaacacactaaaaaaattaacaaactattttttttaataaaaatcatttt

SEQ ID NO: 298370 - DNA, 2728 bp, Cannabis indica
gtttgagtcatttttagatttaaagaagattgtgtttaagcttaagggactcctagaagatgtttggatgtgaagaatgaaagttaaaaagcctataacgaaaatcaccatttttagactctatttttaacggttcactgccaaggaagaagacaatcaggtttaggctattgtggctattttctttggctttttcttggttgttttggggttcttagattcattggaaggtcttataataaaaaaatacaaaagcacccgaaaaagagatttgcatctcgccagggccagaaccaaaaaactccaaagataactatgacgaccttatttttgaggatcttgttctcaacaagaaaaacttgatgagagattcaaggtaaagcaaaggatatacttagaaactgaagtaagaagactgagcatctatgcatagggtgtatgtgaaacatacaacagtattatgggtttaaatttatgttttctttatgttgtggtttgatgatttacactagtaattgtagcatgtgatactgataaggtctctcctgcttctgtgagcatagcacttgcaagatatattattttctactgcttgtatgaatttacttccaagttatcttatcatgggtgagtacaacttgtaataagagattgtctcgttgaatgccaagtgtgagaacaggacaagacaggacaagttacacttcatgtctgatcaacatcagtaggagtagattatcgtatgtaagaaaaaatgtatgataagatgatgtatgatatgtgtgtgagtaaagcatgctttgagttttactttgtgatatatatactgtatgtgagaataagggcgtgatatgatatgattatatatgtaggtaaccatagtatgttgtgatattgttatatttatggttatgttatctagtttttgtgggggagttatgtcttatatagctcttcttactgggcgttagctcaccgtactctatgtgcaggtaaaacaaaaaccaagcagtgaggatggcaagctcgaggtgtagactacatgttagaagattatcgtggtgttttggttttaatgtttgttaaaaaattatgccttgactagttttgtacaagtttatgttctaaagtttgtgaataaattaaacgtttttgatttttaaaataatgagatctcatgttttatttattttttgacaaattaatttattatcttagtcgtgaatgatttttaaacaaattatcgagtgtaacgccttgaaaaatcagagcgttacagatatatgtaagttaaattatttattatttaactttaaaatataatttatctcaaaacccattataaattactttatttgtttatttttgtgtaggggccaccagaggagcatgtggttgatgtttatagagatgctcatacaaaaaaaaccatcagatacttttgtcaacgagatagttgcacaagattatataagtaaaatttattatattgttaaatttaaatgttatattagttctacgctctaataatagtttatttaaataggagaaattgtttaaggatcttgataagaaacagacaatctcagagtgatacatctagtactgaatctaatacttatcaatgcgaggtacttgagaaagtacttagggaaatatttgactatcaaagaggaacgagttataatatcaaagggtaaagaaaaaaaaaattatacaatcaaagtcagcttgctgcacattcttcaatccctaatgaaatgtacaacattgtgggagatatgtttatgactatacatgacacaatggaaagtggtttgatacttgaacaacatgccaatttaaataacccgcaatttgaaaactttctccaaatgtatggtcagttacaaactcccggtggttcatcttctcagagttacactgctcctcctctgcagcaacactagtcttcacaaagtcaaatgtagttcgtatatgcacccctttgcgatctcgatctcctctgctctcttcaaactttgttgatttcaagatatttggtgggcttgggagttctttggaggagcaacaatttttttacactccaatcttcaaccaagctcaattaggagaactaatacttgacttgtcatcatatcaactatattttccttctctgtcatagttaccgcccaaccttaataatacaaatcaagattttttttctctgagaccttaatgatgattttatggataaatataagtatgttaatgatttagatattagtttcatttgagacatataatagtaatgaatattgtatttattttggtgttaaaatagaatatttttaatttatttaattatatttaatttttatttaatttattattttaatttttgatttgttcaattatatttaatttattgtttttttatttttcaaatactaaatatattagcagcggacattaaagcggcaacttccgtcgctaataatattacaaaactgactaaaaactcgctgctaatgtttgccactattaatgattattagcgacaaactagaaatttgccactaataatcattaatagcggtaagttatctactgctaataactagtcgcggaaaaatgtattattagtggtagatttgtccgcctctaatacactaaaatgttgtagtggatcgggatggagattgggatctggattttggaaagagatgaagctttttgttttttt

SEQ ID NO: 298371 - DNA, 1653 bp, Cannabis indica
gaagagggtggatgatctacccaaaagtatgaatgctggtaattggggattactaaaaggcgcagaaaacaaccttaatgccattttagagaagcataagaggtattggagatagcgtagtaaagctttatggatgaaaggtggggataaaaactctaaatattttcatcataaagctacggtaagaaagaagaaaaacaagattggtgggatcatgaattagcacggtaggtagaagaaaaagcattatgagatcaacgaggtggcctgtgagtatttctaaaatatttttacgtctattaactcgagtgagatgatgataagcgatgtggtggataaggtaaaaagcaaagattcagagagcacaaacagtgatctccttgtggcgttcacggaggatgagataaccaaggtggtcttctccttgaatccactgaaggccctaggaagagatggcctcccaactcttttctttcaaaatacctgggaaattactaaaggggatattatacaagtgtgtctcaacatccttaataacaatgctcctatggaccacctcaacgacactcttattgctctaattcccaaagtggataaatcgacaaagatggaagaattctgtcctatcagcttatgtaatgtcgtctacaagatcatttgcaagtgccttactaaccgtatgaagacgtgtttgaacgaggtaatctcagagtttcaacgtgccttcgtgggaaatcgtattatccaagacaatgcaattgtaggttttgaaggaatacactgtatgaaacggaaccaattcaggttcggatctaaagtggatttcaagcttaatatgtcaaaagcttacgatagagttgaatgaaattttatcgaggcagtcatgttaaaattggggttcgatagtcagtgggttaagaagatctcaaactgtatttcctcggtgtccttttcggttttgatcaatggggatcccactagaaagtttgttccaaagctgggtttacgccagggggaacccttatccccatttttgttccttttcaatgccgaggctttgtctagcttaatcctggatgcggaagagaagggtcttattcatgggcttaagtttggtagagatcgtgtgtcggtatcccacctattcttcgcggatgatagtctggtttttgtggaagctaacagagaagaatgccaccaaattaagattcttactgcctacaaagcagcctcaggccaaactatcaatttcaggatattagaaatgtgctttgggaagttggttaatgaagattcaaaaacagaatgtgttgacttatttggagtcaagaaggtgaagtttttttataagtaccttgtgatcccaatctttgtggaaaggaagaagtgtgagctctttgatgcaattaaaaagcgggtgtggaacaggcttagaggctggaaaagaagcctttgtcagcggcgggtaaagaagtgcttattaaagcagtcatccaagcaatgccctactacacgatgggggtttttcatctcccccaaaaaaataatccatgagcttcatggaatgattgctaggttgtaacgtccccgctttaggcctccattgggcccttacacccacagaataatggctcttatacacgagtatgccac

SEQ ID NO: 298372 - DNA, 1271 bp, Cannabis indica
caagaaacctgatcttaagaaaagtacgggaaactcaacacaagatcagaataacagcgtggttagaataaaaaacgaaagtcgggtaaacctaaacttacctattttttaccttttttaccaaaataaggaaagctagactaactttccttctaagtttgaatacaccaataaggaaccatattaatgtataccagaccgaaaatatacaatgaataataaaatatttttgtcaattaaatatgccaaaaaatggaattaacaaagacattataattttgcagcttataatatggctaagtaggttttcgccaaaaaataactggtatggtcgatctttcctctatcgagattacatcttatgtaatcatgatcatgaagtgtaattttatttgattttaatatatttacctcttttattaaaaaaaatgtatatatatgtggtgataatgcatatagtcgtgaaaggcaaagactatatagtgtcgtttttgtaactgaagtcactttcaaaagaggatcattgtagcaaaacgaaccctgataatgatgaatctttttcttcgaaaaaaaaaataatacataggttaaatgcacaaattattcatcataattgatcaatctaccggtataattaggttaacattcatcacttattcgattagtgcctatacatttacacatatgtataaatatatacaaatctttacaaaagacaaatttattgcctaattaattaaattaattacacatatttttcttactctgtgtctgtggaagtgacatgacaatctgcttaatgtacctgtaagcttgcaatcatgcagtatcaaagaaagtagagagaactgtatatataacatgtcaattcattctatatgtttctttgtattgaaaagtctgatctgacgaaaactaaaattgttaccatttaaagcattaaattctcatcacttgttgcagtcgaaattaatgaagacgacaacagaaaaaataataataataaaaaaaaaaagtaaaacacaaaaggacattatagaaatagcagcgaaaacccacaaatattattattattaggatcctccctttactaaatattgtcgattaggccaacttgataatggactctgcagtggctgtttggcttgggtcgttttccttgtctggtgcaataaatagtcatgaggagggaatagcttttatttgcctcaacatcttgcctttatttcatttttttacaatgaacaacctttcatttaaaaaaaaaaaaa

SEQ ID NO: 298373 - DNA, 1419 bp, Cannabis indica
aatcaatgaaaaatgagctcttcattctctctgttttttttgttctgtttcttgctttgtttctcttcaataactaaaatggtattagaggcattttgatcttttggctcttcttccgcttcgttttttattactattctctctgatcttttcttctccatggctcgaggaggaggaactcaaactcgaagtaacaacaacaatggagttgctgctggttctatcgcttttcagctctggatgatagtagcaagcttcctacgaatgatcgacgaagcccttactttctctctaatggtgataatgcttcttcttcattggttcctaaaatccttactggtgcagagaattacagctcttggcgtaggtctatgatggttgcgttaatggcgagaaacaagttaaagttcattaatggcaaattgccagaaccagatgaagaggatgaagactatgaatcgtggatcaggtgcaatagcctcgttatctcttggatcttgaactccgtttcacctgctattgctgacagcatcatgtatatggaggatgcgtcacagatctcgagcgagttgcaagaaaggtttcatcaaaagaatgctcctagaatatttaaggttaagagaaatatgcagaacttgactcagggctcgagtgatgttactgcctattacacaaagctcaaaggtctttgggatctcattcaggaatacaaaccacaaccggtctgcacttgtggagccttgaaagtaatccaagaataccaggacgaagataaggtactcgaatttctaattggattaaatgaatcatatttgaatgctagatctcaaattcttcttcaagatccccttcctaatgtcaataaagcttttgcttgcataatacaagaagagaaacaaagaggaatcattattcctcaaactgagaacaatcagtccactaatgaaaattccaatcaatttgctggaagcacttatggaaatcgaagcaacaataggtctgataataaatctgataacagatctgataataggtctgatactcaaccaatttgctctcattgtggagtacctggacacactataactaagtgctatagaatccatggttatcctcctggtcatcgtttacatggaagatttcctagggcaacacctaatcaatctggcaaccagcaagggaaatcaacaaccaattttacagcaggaaatgataacagagaaaatgttggaggggagatggatcttgctgctcaatgtcaaagacttgtgcaattgctgacacaaaaattgcaggagacagctgcaccttcaccacaagttgatcagcctgttgtgtccaatatttcaggtaaaatcacatctcttcctaattttaattggatcatagacactggtgctacacatcatgtgtgctcca

SEQ ID NO: 298374 - DNA, 8371 bp, Cannabis indica
caaaaaaaaaaaaaaaaaaaaaaaaaaaaaaaaactaaatagagtgatgtgaaaactgataagacaaaaataatgttacactagctctaggcgctagttatattaatcaagtaaatataccaattaaaattgtaagactagtaaattactaattggtaaataataatgttacgtactattagggcaacacatggagaatagtatatagttgatgaggagccacgtatctcattcatttatccatatacatatcatcaccaaataattaactataaactaattaattatcattaattgtaatgattaaatgtaggtagacggtttcccaaatattatgcctaagttcatataccaatcatttggaatttggctgttaattgtttcaaaaaaaaaaaatgaaaagatatgggaggggacaaaatccagtcagcagatcatatagaatagttgttagttaattatttgattcgatataataagtactattataggtagtttagtttcagttcgagagaaaatgtcctacccatctacacgtcttgcctatataatcctttaattaattttatataattcatttaattaatttcctaatgtgtgtgtggtttttgttttttaaatatatattattatttttttttatatgtgaatccacattttattccaccgcacgttctcttcaatgacagatgtcattctctctttcttctttattttttatttttgtcttttcttctttcaagtatttcaccaaacttttattctaataataaaagaaaacttattactttaggctagggaggaaaggtgagtgaatggagaggagtgaaaagatttaaaggttggtttaattgggaggaataaaattaaaatataaaaataagaataggaataggatgaaataaaatttaaaatttataagaaaattattaaatttttttctcattatgtatttgaatggtttttactttctattttaaaatagaataatcattctactaaaatggtagaaacatcattccattagaatgacattttcttactttaatatgcaatcaaacaaaggaattgaatgaagattgtttcatatgcattttattatttccaaccaaacgtcacttaagagataaagtgataggcggaatgatttgtttggtaaaggaaaaagtcttattcctccaaactcaaaatgttcatcaatccctcctaaaatgaaaaaatctaagtacatataatatgtcatatttatcatgaaaaaataatattagaaaggatacataaatttagtaattcatttaccttttgtcctttcaaacaacattaagggaagatacattcctcactatcattcctattctctatcttaaaaagagaagaattagtattacatactattaatattattatgagatacaaattattttaacaagttttttaataattattaaatttaaacatatataattaaagtttaatactaaattacaatagcagtacgtattatgacaataatagacaccactgtgatttttaatatttttgtttaaaaaaaaacatgattataatttgttaaaatctcacattgttaattggttttaaaataaaacttcatacatctaaaacacacaccttacgtactaaattctaacatagctacactgttatattgaaattttaattatgattaaagttaaattagtgaaaactaatattatttttattcgcaaataagttttattattcacaaaaaagaatttatattgttactaaaaaaacccatcactaattgttaatactcacagctttaccagcatgatctatatggttatataactaactttatatgttatgttaaggggatatatatatataatgataggtaatttaaaaacatggcatagtcattcctaacaatatatatatataaatccaccaacaactgcacatttgtttaagtgagtaaacgtttgctcaaactggtcccctctctgagctgtacagtactccatgccaactgtttgggaagaaattaaactttggttttataatttaattaataataatgtcgacagtattataaatacattcacactacttgtatatatatagatcattaattgagatatacttctattcttacatatttattagccaaaaaaaaaaagaaagaaactaaaacccttttctctctttattacatatatatgatggagcatatgggagctgaaagacaatggagctcacttagtggagttcatacagctgaggaagcagatttcatggctttgttgctcaatagtaatactaatcctcaattgatgagtagtagtggaacacttccaccattgtggtctggtcatcatgaatcatcatcatcatcaccaccatataataatggaagtagtagttattctcattattgttctttagaaatctccaactctaatttattatacactaattttaataatgaacaagatcatcatgattattgcttaaaaaatatcaacggccaagaattaatgatcagtagtgatgaaaacttggaagaagagaaggtaatttcaaaatcaataatcccagcatctcataatattaagaagaataattctatgatgaaaaggcctcgaagcaacaatgcagaaaataatgtgagtagtatatatatatattttgttaattttttttttgtaggggttgtaattaattaattaattataatgatattaatttatgcaggttaaagtagaaaagaggtgtaataataataagaagaaacagaagttggtgtcaaccaagcttaacaatgttatcaaagaagaagaagaaggtaataataataacaatataaatggacaaagctgtagtagttattgtagctcaggagatgactccattgataataatgggtatggctcacaagatcagatgatgattatgagtccaaaagagaataatagtagtagttcaactttcgattctcaaggcaaaacaagagccagaagaggctcagctacagatccacaaagcctttacgctagggtaagtatatatttatctacacaatacaatacaacttcttctattgattaattaagtgaaatcatgttctatgtgttaatattgctattgatccaactaaatatcggatcttatataatttaatataataacttttagagagtatcgctatccaatcgcaaaacgacatgtctaggggtgctacgtaccactggtgctcaatagcaatgcttatattaattgcttttttgtaacactaataataatttcatgccctttaaattctgaatttggttattatttattaaacttgtgttgtggcctatatttttgtagaaaagaagagagagaataaatgagaggctgagaatcttacagaatattgtccctaatggaacaaaggtatgttaattatataatatgattttgagtaataaattataaaagtgttaatgcatgcagaataagaattaatgagaaggtatttaattatttggttgtgaaattgcattaatgcaggtagatattagcacaatgcttgaggaagctgtccaatatgttaagttcttacaactccaaattaaggtaatatatataatatctttatatatagcataattatctcaatctatatatacacaaacaagtttattgttattattatttataattgattataattaatttgtgattaaataatggaataaaatttgtagcttttgagttctgatgatatgtggatgtacgctccaatcgcttacaatggaatggatatcagacttgatcatctcagacttgccatatgatcatatcataaaacaacaaaatgagatcgacacctatatataccacgctttaatttctgtttattcaaaagattatattgttatcactaaataattaaataaactatatataaatcttgtaaagaaaaatcagaaacaattcttttagttcatttattgttacggtggatctgatccctggggaaccccaatgccaaatttcaacatatcatatatatatgacaagtttttgagtttttttttataatgtcccataacatattaaaacatgaaattaattgattagtttttttatttcggctgctataaactgtctactttgcggggaagataatttagattttttttaataaaatacagatattacgtattggattggattgaaaattttaaaatttatacttatacggattgaatattaatttacatatacgcaaaagtaattgatttaattcaatccacacgatttaatgtgcaaaagtgtagatattcaaagtacaatctaaaatttgcaaagtacaaatttatgcacttgtgcagactggttttgattgaaaaatctaaaatctgtacttgtgcaaattgaatgttgatttacatatgtgcaaaagtaattgatccaattcaatttagacgattcaatgcaaataatcacacttatgcacattggattgaaatgaaaattttaatatttatactttgtgcgaattgtgtgttgatttacataagaaagtaactaatcaagtgagtttcttcctatctctgaagattataaataatttgacagcgtgatagctcttttgagaatgcagaatccgatctctaaatagtaatttggatcaactatttataagaaaaaatatgtcaaagatattacattttattactgaataaataattgatgttagattgattcaataccacaaaatcatcaaacctacttaattcccgcaatttcatcattgtaggcgggttgattaacctatttacaaggaattcacttgaaggaatgaatttgggcatcttttctcacgagggtcactagtcggacattccatttgcctagtacttttctagttgctcagcaagacatatatcgtgtttcgttcagcacttgtacagtgctggaaggccctagcctgtgcatgctctgcttaattgacacctttcgagtagattataagtccacccctcgtctgtccaatcctggctatgctcgccacatgtcacatagattcacaccacatcatcagggagatttttgggataacttttaccccccaaattcgcgtggcgacttctggaggcacgacgactttgttggtttcttcctaatttgcacagtcaagtgacgtgtggccttactcggatggtccatttagtctgggcatcgtacctacccaaggcaaattttttccttgtcctttcaaatcttttgccatgattattttccattgaaaatagcacccttagagatagtgtccgatagttacaaattttctcaagtagtttttaatgcaaaatgaggcttttagattttgggggtaaaaaaccaatcatttcaaatttaattcccaaaaacttttctcacactctcatttttcatataaaattaaaagggaaaatcatttggaacggttgtcatccttgaaatttcaaagcaaaaggagagttttcttcgagttcttgagtcttcttctcagattgattgttgtgcagaccaattcttcaaggctttttctttaaaccatcaggtcaaacatggagtaagctccctcttcttttttctcttaaatttttacgattttgcgtgtattttcatatgagcctgaatctgtattttgtaaaaaatgcttgaatgttcttcgtttgtgaattgttgaattcttatttgctcggatacaatgttataatgtcatctgttagggaatattctggctcggtcttttgatacacttagtttctagtaagctttttatcaatttgaaacacttaaggaattttaggtttttgaaaaccctaaaatcctttttccattcaaagattttataaagaagatgaaatcttcttattttgattcgaacattttcactggtgaaagtcggagcttacagaagccatgcccctcttgaagaaatctaataagcctcaccccttatggaaatctcctccatccaggctgacgacgaaaaggctaaataattttcgttttagtgaagtcgttatttttcttcctcgcgaggatcaactggctgacagactcgggcaaggcctttgtgcatggtctgggccctatatcgagcaaggtgttattcttcccctccacccttacttccaaagggtagccaattattacaatatctacccgcgtgcagattaacccaaaaggtttgaagtacttgtcgacattgtacatactatacgcctaacaaggttggggggagccctctccccatgagatcaattggttttttgatctcaaatccaacccccacaactacaattcaaggtacttttacttttccctcttgagctacctgtggctcgaagcacataacgaagataggaggctaaactcaaaattactttataacaagggacgttgaagctaaccaccattcgttccaaattgttgggtcattcctccgcccattgttcaccttggacttgaggagtaaggcccgccagatagtaatactttccaacgaggccagggacatctccaacttggccaccgaggaaaactttcgcaagtttaggctctatccatccacaaagggaaaaagaaaatccaaaaaggccaaagggaagtcctctgtagctcaagtagcagtaaatatagtaaaggttgccttaagagatcctacccctcctacccaacaaggttgttcaaacataaggataaacagagccttggttgagaggaagcacaatctcctatgcccattgtcaagggcaaatggaagaaagtggtggatgaagagccgacccacgactcaagttttgtaccaatgctttcaatttcaactcaacactaattaactaacttgaaaaataccgaattggactgcatccaaccccgagagtaaaatatgaagagatcattattaagttccaatcctattagatccattactaatgtagataatatagtcttaaatgtgcatctggttccataatttacgattaataagaaaaaagaaaagaactccctcaatcaacaacaattgtgatcctagcaacaaacaaaaaataaccaatagcgataacaagaaattcaagctgtcctaaaagtacaaagtgggtaaattacagaactgcattcaaatatgaaaacatgttccacagaaatgaaattctggatattacttaacttcctaaccctttgaaatcttccacttcaaaccacacaaaatcaaatcccttccttcaactgtcgtcctctgactctcgctgtagtgcataatatagtcctaataaacaacgggcatgttgaaatctgcattaatttattatccaaatatattacactcatctatacgacaacactcggagaatcaaaattctgactagatgaagaaaggctgtttctattcatgatacacatccagattttcatcataaaggagaattctttctcatgcgtgattttggttgacgtggtttggaacttctccttggctgtccagcggcatatattgtgccattatcgctctgatttctgaatccatgtaagactgcaacaataacattcagaacatcacaaaccgaaacacttgggcttataaggaattaaacttcatacatttctgctagtaggcatgcaaatatcatttcagtcctaattaacctgcttgagcattgaccacattcaaatttttgcagatagtaaaaaatcattttgacggggaaagataatctaatataagcaagtcttcgtcctccagattcaacaacttcgggacagaatcatttttcttcatttaatgatttatgtacaacattagcacatgttgtagacatctttgtaagagttgcaaacagtatataagaacagtagtagaacaaagtacacaaaccatatatgaatttcaatgttgctacgtgtacacagcacaataagcttacccttaatctgtatttgtacactagatatgccccaaaaccagccatactcaagcctattaaaatgacccaaatagcagtccaagaagagcgtgtctctgaggcacttttacctgcaaatgatccaagagagagcacagagaaagagaaacattatatgattacacattatgcaaatctagaacatatgtattttggttggattaggttgccaaactcacttatgcaggtgtcatggtccctcatatacaataagtccccaccacatgagcagtcatagcttccccaagtgtttttgcagctgcattcagaacattggcaggcttttctctctttgcattcatcaatatctgaatgaaaaattaacagtttatgaatttcaaaaaaaaatattgccagattggaccatagctacaaaa

SEQ ID NO: 298375 - DNA, 1849 bp, Cannabis indica
ccattttaactcaggaccggccccgatgataatatatagtaataagaataatattatgatgtttgattttttatttttattttttgaagataataagaaagagtagtgcattgacaaaattagtcctttaaattcttttactaatgtaacgtataaaataagggtaatggtaatttgataggtgtaaaactataatcaaggatggtataatagtgattatattgtaaagattagaatttcaattacaccaaaccaaacatggtcatatttggtaaaagggggagaacaatggatggggaggtgaaaataaagttttaagtgcatcttcttgcaactacatttggttttcctatattttggtcaaatatggggagacattctctttattatcattataaaggctcggcataaaatttaaaaaatcgaaaaaatcgttcaaatcaacttaccgaatatcgttaaaatcaaaatcgacggaactgaaaaccaaaaaaaatcaaaatccagcgttatacatatatattaatttattgagttttttttttttattttatgtattgtagttactaataatatataataataatatattattattttattaatattgaagttaaaagaataagataattaattttggaacaattaatttgtatgtttgtagttgtaaaatgtagaataatgtgtttataaaataaattggataaaaaaaaaagttcgatttgggcggtttaaaccgaccaaatcgaagttcaaaatgatcggttttaagataagttctggattggtcggtcggttttcaaatttcaccaatcgagatcgaaaactgaattttagaattttatatagaaaaaaaccaaccaacccgaccgatgctcaaccctaattattatagtaaattatttttcccacagaatgtaacattagattaaactcttaattactaataggtcaatattttttttgttgacctacgcaatgatatttgcaatataattgtttgcaaccactgacatgtgttaaggctctcttgggtagaaaacttttctatgtataagtcttataaccttttctttatcctattgttggattggtttttattttaagaaagactactaatggtttctcaatttttgataaatcattgttttaatttttgttgctatttatctatttttgtttcagttttgtctaattgatttctaatagttattaaacattgtttgtataatttttttttttactatttcgtagcttaacaattttttgactcattaattgatccattttttgtgttaaagttttgacttctttcattagtatatatataaaagaagatgcatacataaaattaccacttaaaatcactttgaaatacaaatttatatcatttttttgaatatttaagaaaggtatttatgttattttactgtaaaatatatatttgataagaattatttaattaaaaaaaaacttgaaaatcaaataaagactgcaaatatatagcaatggccttccaaaaaaacatgtttatagataaaatattatatcatttactaaagagtaatttgcggcaaaaccccttcaactatcaatttacttgcaaaaaaccatccaacctcatattttggtggaaaaaccctccaaagtactgttccgtttacattttaaggtgccgtctgtccagttcctaattttgcccacgtgccaatgacaagtcactaaaaaaattatcctatgtggccatattttacaaaataaaaaataaaaactttaaacagtaatttgcggcaaaactcccccaactatcaatttacttgcaaaaaaccatccaaaaaactttaaggtt

SEQ ID NO: 298376 - DNA, 5916 bp, Cannabis indica
aataactataatttcaatacttatgtatgcatatacatgtatacacatatgtatacacaaaaataatatatacatatacaaataatacacacatacatatatatgcatacacttatatatacatacacacgtatatatacatacatatacatatacatatatacatacacacatatttatatacatacacttatacgtatatacgtacacatatatatacatacataagcatatatatttagatacatatatatgtatatacaaaatacacacatgttctaatatacacacatacatatacataaatattctaactatatacactcaatatacacaaaattaaacccaaatttatacacaaataaaaattagaggttacattgactgaaaacgagaattctagtagtggactcggaggctcaaacagcggtggccagaggtacggtcggtagtacgtcgtcggagttacgcttcaatttcattttttttacagaaaaaaattgagggagatagagagattgaggaaaatgggtgagagagagagagaaggagatgatggtggtgggagccgaaaatagtggtgaaaattgagaagaagaagagaaagagaaagaaatggggaaagggggttcggtattggattttattgagcttcaacttttgctagtgcatttaggcgcgccagcaaaagttaaagttgaaaaatacttttgccggtgcacttcagcttgccagcaaaagtttaccctaaatgaaaaaataaaacgcaatgtttcattaattgtaaaaactttttccaacgcacttaaactcgccggcaaaaattttcacctaattttctgtgcacatctttactgtgcgaaaaagaaactaccaaaattttcaatactttggtcggtgcatttatttaccggtaaaagtaaaattaaattgccaataattaattcacttttatcagcgcacttatagttttgtttgtaaaagtggaattaaactgctaaaaatttctacctttggcggttggtttactatcttttgtcagcgaaactaagtactttgttggcaaaagtaggttagttgtcgggataagtgttatttgatggaatattaatctgaccacctttcaccgacaaagttaataaactgcggtttttcttgtagtatgtttattagtgaagatacttaaatttatatgacatttttagatacctttgtaataaagaagaagtggaataactcccaaaaagataaagtagatacatcatgcatggtaacggaagacagctagtataattaaacatataaaagaaaagaggtacactggggtgaatcctcaccttggggtggctaccaagcccaaaataaatacaccattactaatcattcttttttctgctaaggaatatccgtagttcacacataataaataatgtttaaaattactaactactcgtaatctataatgttattttattatgtattattgggtatatatatagaggtaccaaatcgcaatttcctttttacattagtttaatcaaatataatgttagtatatgccactgaaatggtttatcaagtcacacagcatgtgtcagtcactcggtcatcaaagctcgtgcaccacctttaattttagcctctcgacccaacaacacaacacttgtcttcagagttttattaagatggacaattactttctttaatttaatataatttagaaaagtcaaacatgcatataatttaataatgtaatggttacttcaagcttaggattaagaaatataaatgtcaaggagtacgataattactattatatatatgtatataaaagttcaacgatgtttgacaagaacatgtgtcatccatgaccttattatataacccaattcttgttgttatctcaatttttacatttttactcgatatgttcacataaataaaaattgatgtcacgtggagtacaaccagtcaatctgtcaataggaggaccaagtcatcatgcacaacttaccaattaacgaagagttcaaatggtcaagcaggacaaagacacaacaaaatggccaaccaggagggcgggctagaccacccctggccggccataaagtggcatgtcgaccagcctccagcaaatggcaggccaatcagcttctattctggcaaacacaagtggtgtttctgcagctttcaccctggacagacagtggttcactcttagctacgaattcactctaacaacctacaaaactaggggttcaacttcaattatttacctattctctaggaataatttattggttattttctgtatatttaatatatgaaaaaggaggtgatatctcctcattttaagggatattaacctattttgggttagatcttctataagctctcatctatataaaaagtactaggctaaaccaaaaacctaaattctaatccttaagctcttgagttctagctcacaaaactctagctctctctcttttacacgccatctgctttgtaatagagactaagtctttcttatctcactcaattgagatctgcctagcattgttctctaaattataatttatagagagccactctagaaatcacaaagtaaaagcttgtgatctgagtggtattatctctcgagaaaggggagtaggtcattacctgttatcaaaggggaacgaacctctataaaattattgtgtctattttatttacttgcactaattatttacacgtggtgattctgatcgtaaataaggctccgctgttgaggtcaacattttggtacttttattgagagtgttatttatcaattcggtcaatcaccatggttataacaaggagaactccaactacaatttctgcttcatcaggtcttccataagaccccatgattgttgatcctaatgttcatgttctagccaccactagagttttcacaacaccaacggatgtagccaatcctaccaacttggcaggcccaacaaactcgaccaacacaactagttaggtcgactcagctaacctggttgatcccaatgaacagtctttgctacccagggtatagatctgtcattgtataacgccctaacaattaggcacactacgatttctgataatcataatctaatcccgctaaactgggattacaagaaataagaacagaatttaaactttaaatcatttagggaataaaaatttaacttgtaactatttaaactttacaaaccattctaaaatattctacatgtttcgggattccataaaaattgtcataaaatattacaagtcattttattcagttgatggtaacctgagcgaaggtcgatctttgaaaagactgtcttaccctttagttgatcaaataagtcgtcaattggggtagaggatatttattcttcatagtgagtttattcagttcttgatagtcaatgcccattcgaagcaacccgtctttctttttcacaaatagcagtaaagcaccgcagagagaataactcggtcttataaatcccaagttaagtaactcctaaagttggatctttaactctttttattccgttggagccattcgatacggtgcctttgatactggttctgctcccggaactaactctattacaaactcaattctagagaaggtggtaatctaggtaagtcctctagaaatacatctaaaaactcgcacaccagtctcgtattttcaggtccagatgacacaggttggctagtatccactgttgtaataaggaatcctatgcaacctctatgcatcagatttttagcttttaggagtgttattctatgtatgcgcgatccttgtaccttacccacaaacagtgctcgattggcactgtcaggttcaaacaccaccatcttccgcttgcattcaattgttgctccatacttaaataagaaatccattcacaggattatattaaaaccagaaaattgtaactcaatcaggttggcggttaattcataaccgtcaatcaaaaaagacaaagacctaatccactgagtagatacaattagctctcccaagggtaacagggaaaaatccccgaagcatacacatcacatggtttatgaaaactttcaattactctacttgatacataagaatgagtagctccgaaatcaaataatacagaataagaacaaccgtttatggacaattaacctgtcaccactgacgaactagcgacagtgtcagcctaagtcatagtgaacaaatgcctcagattctggttgttgttctgcattggctcgtctttcttagcctgtagacattctttgataaagtgacccaccatattgcactacaaaaaagtcttagcccggcactcaccttgatggtgctttttgcattcgggacactttggatatgatctaaatgtaaaccgcgaccttgacagccacctctgtttccctgaaactttctattacttctcagtgttttgaaagcttgagccttccatttgtgattcgagttgccactgtcgatccccttacttacattaccacccatagtaggatctgatgtcgtgatgacatccttaattgcttgttctttaattacatgttgctctgcctcttcagcgatcaaggctaactcaaccactttcttatatagtgtatcgtgattagtggtaatcttcaagtctcggctaattgtgacactcagtccctttacatacttttgtttctgggtgaagtctatttgtactagatcaccagcaaacttgggcaaccgatcaaattcaagggtatactcgaccacggtcatatttccttgagtcaacttcacaaaatcttctatctgtgaagttcttacagcaatgttataaaatttttcatcaaatagggctttaaactcttttcaagacatagtactaacatttttggtatgtcccacaatattccaccagacgcgggcatgatcttgtaacatgaatgcagcatagttaagtcgttcggtccccgtcaccaccatgttatctaggatgcaggtaatagtgctcatccgctgttcagccttgataatatcagtacctcttagaaatgttggaggttgcagcttcacaaaacgttcaaataataaatcctaacgtggaagaataaaccccgggttaccaccactagaataggagctggtggtaacacttattttgctagagctgtcggtgccggttgtttaaactaatgcaattcatcttcttgacgaagtatgatacttcggatttcaagaaacatttgttgctagtcgataggtggattagcattattcacccttgcattatcccccgaattctgcggaggcacaagcagtgccggtagacttcccctgcccgaagacggacaaatactgccaaacagatcttgtggcgggaaagtaagctctggctcctggtggcatggggggccaaccaggtacctctggctcattaaaactagacaaaggtccttaaatccaacaatctcaatagttcaaggggaatttttaacggccaaaaaagttcacatgtgacaaagtttggggggtaaaaaaaatcctaattagccttattttaaatacatagtgaatattgaataaaaaaaattaaaaaactaaagtaataaaagaaagtacaatataccataattaaaaaagatttgtttaaataaaatgtggaaatttataatttataatttttgattattattttttttaagaaattacttagcacatacgttttagttttgtatgttaattaagatggtatttggtaacacttttcgaatcagtttttttgtttttaaaattagaaaagtaaaaatatttttcaaaaacatgttccataaaattattttcactttttaattttttaattgagaattaaaattttaaaataaaaaaaaagtcactttcaa

SEQ ID NO: 298377 - DNA, 5858 bp, Cannabis indica
ttatgtttcatcttgttagatgcaagtattgggtttggaaccatcaatccatacatacgatggttttattagagcagttgtttctgagaggggtttcagtgctggcatggaagtggtaatttctataacttttcttcatggaattatcttttttctgagtttttcaaaactatatatataataattttttttttttgaagattatggtattcaagatagaaatagatttcaacttggtatgttatgttgtgtgatttgcagttaaaaattatgcaacacaaaaatttgaaagcttccgaccggactgttgcaaccctttcagtgagttgcagtaaagcgctagaattggatttagctgaggctctgcttcaccgactatctatatgtccatatccgcacccgttcaatgttttttttgctgcatgtgacacactggtaagttgaatttttgtaatatctgtgaatttggaatgaatacacatttttgcagtaaaaaaaagagtacccctgctcacgtatatttcactcacaattgcagtatttttcttcttattttttggctatccatctaaaattgttgcttatatatggcaggaccaacctgagcgtgctgtgcgggtattggccaagatgagaaatctgaaacttctgccagatattaggacatatgagcttctgttttctttgtttggtaacgtgaatgccccttatgaaaagggcaatatgctgtcacatttagatgttgctaaaagaataaatgctatagaaatggatatggcaaaaaatggtgtccagcacagtcatttatcaatgaagaacttggtaagtttaggttccatatttaaataatcctgaaaatcagtacctatttttatatgtatatacatttgttttttcacaaattctatttctattccattcaattttggctcctgctatcattattttctaatcatatgacctttaattgaatgcctcatttatttattaaatctaccttccagttgaaagcccttggagcagaggaaatgataaaagaacttatccattatttccacgtcgcagaaagtcttttcagtcgtagcaaaatttatcttggaacacccatttgcaatacggtgttgcattatcttgttgaagctaaggaagtaggtacttcaaaccgtgttttctcttctattcccttcattatgaagtcaactaatattgttctatggctgtttacaagctttctttcttgacgttcagattggcatggcaattgaactattcaaacacatgaagtcttgtggtatgttgcccaatgatgcaacttataatataatgatcgattgctgtagtaccttaagaagcttcagatccgcttgtgctcttgtttccatgatgattcgtgatgggttttatccacaggcaatgactttcactactctaatgaaggtagctttgtatattctgctaacatagtctgatttttcctttctttttattatatcagcttggaaaatattgtgctcctatgtgcgcgttacaaatgtttactcatgaaaagttctaatattaatttgactgagttaccttcttgtattcttggctataaacttttcagtgtgatgtagtgattcttgtagatgcctcagctgattcatatttcttctgataatagtaattgttcttcataattatttctactaacttacccttgttatcagctgtttctaactaattgtgctttaatggaaattttgatgtctatacactgcttttcccttaccatatatagcacaggccaccttaaagtaatatgcttgaattgttaagcagtatcaacgttactgattttcctgtgtggttctacttttttccagattctactggagaatgataattatggtggagctttaaatcttttggaacaagccatcacagaaggagttcaacttgatgttttgttgtttaatactattcttaagaaagcatgcgaacaggtactgaatttctattattattacttttactctataaactataaagggttataaggagttcttaacctgaaaattaacaagcaagaacaaattcagtgtgaaattgtttatttaaaaactattacatagagattgcataccatgaatattaatattgagttcaaaagcaaatattataatcatgaaactttgaaattgttgtcaaattggtaggggaaatacattttgtgatgtaactttttgacatgattaaaccaacttttcacttttagaactaatataattattacatgtcttgatatttgtattctaactcaacttatcggggagttcatagctaagtattatgtattgatactgctattctttttgtggaaaacaggggatgattgacgtgattgagttcgttgttgagcaaatgcaccaagaaaatatccagcccgactcatcaacttgtaactacgtgttctctgcataccatgaccgcggtttttacaacacagccatggaagcattgcaggtattgagcatgcgtgtgttaggagaagaattcggcgatcttccaaaagagatggaggttgaatacaattttatcctagctgaagaggctgaagccgagtcaagaatattgcagctgtttgaaaatttccaggaggaccgtgctgttgcccttctgaatttgagatggtgtgccatgcttggtttttcaatttcatggtcacctaatgagagttcatgggcaaaaagactctcaactaactataatacccgaaaaggactcagatgacagctagcacaaaattgataatattcctctcaatttgtttttttgttgaagagcagtgctgagttaaaattaactgggtctgcttggtaagccatagcctttggccagagttagttacgttgtggtccggatgacatggctaactaccatacttacttggctggcaaacttaacccagagtccaaggtggctacctcattcattctggtattctttaattgtttttttcacttaaaagtgctctaacataagataggaaagttcttgggactgtatactttcatcaagtccctgttagaactcttagattttccaaataacatgtatcattttggttgcattttcaactagtgaagagcaaagtagtaaatgaaattaaattgatggcaaatttattatttattttttttctacaatagtctgcaatctgttgcccccactttgacctttacctttttttgtctatcgaaaacgttattatacccagcgcatgcgtggccaattaggacaactttcctagtaaaacgacaacgttgttaatagctcttccttttgtaaacgacaattgtctaaaaaatgacaagtagacaacattcttgtcgttgaaatgaaaactacaatgtttatgggacgacaactttcttgaagaacgacatgttttttttagctaaaacgcaggaagacataggcccaaagctgaatagaaagtatagcaagtgttgtgtgtacaaccaaaactccagaagtatattattagttattttctttcaattagaaaccacaaataagttatattacgagtaacatgaattcaaattagctttttaaataatacaaaggtaattaatagttgcaaattgtaataattataataaaacatctcgatgattagtaatatattgaactaataagatgatgcaaaaataaatatagtggctacctagtctagtaatccttctgcgaatggaatatcagtgtcaggcaaccaagtttcccccatggtaaaattatagagagtgaaattcaaagcttgagtagtgttcattagaacaaagcccggccacttaaccctcataccagtatcagaacctggaccataattctcaaactctccataaaaaagggtatccaatcccaatgtaccattccactccaaccacccaaccaaagtcacaacaaaactcccaatatatgattgcatgtaaacagtcctagagtattgcttccatggcctaccaaggtaacttagagtagtcgtactagtagtatttgattcttcatcatcaacatcaactgcgagatcaggtgctgcttctatggtgcaattgtggatagagattccagtattttggttggggtctgtccgaccctgagccgtgatgacatttttttggtgcaacatgggtttacgagctagaattttgcagttttggaaaacagcagcagcattaccaaagataaaatctactgtgccctggatttggcaatctcggtagaattgccttagggaatggacatagagagtgtcttggtagccctcgatgctgcacctgctacgaataaaatatatataaattcaaaaacatatatttatatatttgtatagagatttagaaaaagtggccctatataggtggacctgtaaaatatggagaggtcggcttggttccgaactgccacggcttgatgtttctctgggcccgctgtattcctgaatgttatgtctatggccatgaaatggtctccggcaacagctacaacaatccattatatttacaaattgaaatatcttacttaattataacaaatgtttaatgatcttaatcatataatattcctaattaattatataatagggaaatttgtaagtagtcaaatgtaaattttaaataatttaatgttatctacaaattagaatttaggtagcatacatatcaacttttttattatgtgttaattttaatactataatttatatatatttgaaatttaggcttgatactccacaaattattcacacatagtaaaagacacatttttttgtatgataaatttaatcatactaaacataattttttatcacattactaaattaaaactctacttattcatacttaaaatttatatgaatttacttcttatagtggaccccagacttttttgtacgtacttaccgaatgttgaactattgtaagtactccaaccgtcaatgacgctgtggttcccagaaacaatagtggaattgatcccatctccaagcaacattatattcttcttacatcttggaataacaatatattcttcatagtatccttccatggcatatattatgaaatacccatcttctgctttcaaattcttgggtgctattgctatggcctctcctatgcttctgaaatcttttgtcccatctttcctcacaattacactcccgtttaccataattccattcccttccatttccaaaacaatcctttctgctaattcatccctcgaccgcttatgtaaactctaattaaacaacaaaaaaaaaaatagtgaaaagttaattaatctcaatcaataattaataagaaatttatgtttactattattggacatcatctcgatcaattgtccagcatctatacaaacctataaatatactacaaacttataaaaaaatgtttatgttagccgaaaaaccatttttctttttactatataaatgttcaaaactagctacccagcctattaaatgatgttattataaagaatgtttattgttgagtaaactggtttggaaaataaaagaggaacgatattaccgaatgaagaattctgggttgagtcgcggactaagtcgctctctttaagacgttcgcggcactgcccaggagtgtgcaagcagtcggaaattgccggtcgtccccaggataaaacagcccagtcgttgcactgtatcggaaccccactgcactgtagagcaccgtcgaatacacccaaaaaatttgatatcgcaaatggaattttaattttatgaaaactgtgttttttttgatacgaaagagagatgtattcttcccatcagaacaatcgcattatat

SEQ ID NO: 298378 - DNA, 3712 bp, Cannabis indica
tcatttctaaaaacaattttttaaaacaaaaaacagaaaacaataccaaacatgcttatatttctaactattttttttttgatattggagtggggtatttaaacttaagacctcctatttgtgagaagaaatatgaatctaccagataatggttagaaccacattatatttcctactgtcaaatatagattaaaatataaatattaaatttaagtatagaaaaaaagagcatacatttgaatccatagaaatacaaattttaccattaatattttccattcaaatatattgtcacaaatccacaactgcaattgcaaattaaaaagtgtcaacctatacttcttcacttaaaaataaataagagatatatgcatgtgaaattgaaaattacttcttcacctaaaaataaatagaaaatagaaatatatgcatatgaaattgaatatgcagataagttcaacaattattacccttaatagagaccataagaactttttttttttctttttaagttcaactattattacctctatacaacatacaactagaaataaaaggtaaagaaaatcaacagaaacaaatagattaaactcctgatgtgaaactatttcagattcagtaaccttgtaactgagcttctctgctagtgagtggtacataacgaacggaagtttcagtcctgatagtgacagaaccgtccaattttttgtccactaccttaagatcctggtatatgttccccactggaatgaccattctgcctcctggcttcaactgatcaataagtggctgtgggatttctggagcagctgccccgacatgaatagcgtcatagggtgcaaattctggccaaccaagtcttccatctgctcaaaagaaacaatcgccaaacagaacaattcatgctattcatgaggttataataagttctgaaagacagtgagaaaagaaagaaaccaaagatttctcgcaactaaaagtagagcaaaaaagaatgactggcttaccaccaacatgcaatgagagagaaccttctttgaacaatggtgcagcagcacttttttcgatattctggattgaggaagtaactaactctggaatgtgttccacacccactgcacgaccttgtggcccgaccatcagtgcaaaacaggctgttaggtatcccgttcctacaaaaaaagaaaaacttattgtctattttgaaagaaaatgagagaaatatgatgaaaataacagatgatgatattggataactgaaatcctcactaaccctatacatgagtacattccagcagtattagaaataggcagcggtaacttatgaatcaaaaaagatgatgacttttacttgaatccttgtttggtgagtaaaaaccacaaagaaaacacaaccaacaagctcagaaaaggaataacttgttcggttgtacctaaaccttaaaaatgtaattttcagcaagtcaaattcataatttgacgtcaagtaccattattgaaccccttatcttagtaagtatgctgtcccaggtttcaacacaaaattacaaaatcaatcatacatcatgaaacaaagataaggtattcataacactaattaaccaaaataattgcacataagttaaggttaaaggtgttcaaattcgaagttattacaattatattttattccggactctagtagtttattttaaaaatactttagaacataaagaaaactacaatagttttcatttgcaacaaaaaaggtaaggcaatgcaacaaaccagagccaacatctaaagcgtgcattccgggctgcaagttttcctccaacaattgaaggcatgttgcgtgcatatgtggagcagaaatggttgcattgtaacctatggccatgggactgtcataataaggtgggttaccatcaggtacaaacaaagccctgtccacgacctccataacttcagatactttttgggacgaaatcactccataacgctgcagctgctccaccattgctttgttcttagaaatgccactcccactccaaaatttctagtaaaaaatttaaaaatagaaaagaaacagaaaattcccactgaattaaactaattgaaggtcaatagaagacgtaaaaagacacataaagttcgaggaattattaaagaaaccacaacatagtaaatctttctgaaatagaagaaaatggtagcataacacaagcaacacctattagcaagtgactatgatcaatcgacaatattaattagcaagagcagagctgataataaatgcatcaaaaccccttttgaatccaactttatactaggaaatacctcatcattttgacaaacttcaatactaggggcagagcagtcagttatggcctgtatttgcccatccaaaagactgggatgtgtgtacaaatgaaaaacattgaagtgggagccacatgccccactagtaataaacaatataatatagaacgcccacaatactcgaggaaaaattacctggaaagtacaactacacatcaaaccgttcgtacataacctatatatgctaacaattagccttagtagcaaaccatttttcacaaacatatataggacaagttggacaacccgccattagaacttgatctaactaaaaaagccagtaatcccatatgagaacagaagctttagaatccaagtgtgccattgaaattactatccatagctatttttgatataccacataaactactatcctttctggtaacataaatttggcaatgtttccccttataaactctaatccgtaatactatcaaaagcattaatacacaaccatcaagaactgcaataatataatttgaagtagtttcaacactaaaccaaacaagaataccaaaatgaaagactcaaaatttgtgctcatattatcgaaaagcaatatcaattccaaaacacccatatgtataaagagagggattatgtttttaatcaatcttaaggtctaaatattatatataaagactaaagtgacatgataatccgaccaaaacccaaatacagaaatcggttctttatccagcctgaattatctcagaactcaacagatgaaaacctaagagacaggaaatgggaagtggattacctccatccggaaaataggtgagtttcccgtgaggaaattaacgtttgggaatcgagggaagtgagagaaagttgaagtttgtggaggtcgaggattatgatgatgaaaaagggtgaaggttaagaagtggttcacagtaggcgcacgatagcgagaaccatacgctagcgttgtagttcttgctgtagcagttgcggagtaaagatgcatttgctcgattcctctacacgattctctctctttctttttattttttttttcttttttatttatttattcatttattttatatttcttaatggaattttttttttttaatcatttttatttatgttttggttttttaaaagaatttcttatatatttttccaaacaataatttttgtgactagtgaaatgtcatgcaccgcctcaaccggtcgggccgatggtagtgcctagtgggccggaatttgggcctcagcctttagctcaacagctgacatgtggttccaataccaaaacatttaaggggtaagttgagaaataccccttttattaatcaattaatcaaatttacctctaattttatatttatttgaaacatac

SEQ ID NO: 298379 - DNA, 1871 bp, Cannabis indica
caaatagacaaacaattgatatggtgaaccaaaacatacaaatgaatgaaaaatacttatgtttctttattgatattgaataaaatggattacattgaaatgaagttttatttagggcataaaacccaacatgatatacatggagcttcggccaactatgcacagttcaagaaaaattgatctggccctcctaacccgaatggacacggtggatctaacaacttttgaggccgtggaagaagctcttatggtggaagaccgaacaatggtggtggcagagattactcgaatggtaatcgtccaatttttcagctctgtggtcgcacatgccatatagttcaaaagtgttatagaagatttgacatttcttacaatgacccttatgagaacaatgctaactcaagccaaatcaacctgaagctcttgttgcttcaactggaactcatggtgatgatgcttgcctcttttcatgtcactcaagacagtggcaatctccaacaacaaacctcctaaaaaggcaaaaaaacgattgttgtaggtaatggttcttctctttctatagataacattggtaatagtactttagctataagaaaatccctttatcttaaaaatattcttcatgcttcagccataacaaagaatttaataagcatttccaaatttactcgtgacaataatgtcattgttgaattcactcatgatttgtgttttgtcaaggacaatcaatcgaggatccctctccttcaaggtgctcttaaaggtggtctttatcaaatcacccctcaacttcttcaccaggcccctgcttcttctcactcaagtccctcagctactgtcacaaagaagaattatttgtaccaagttcatacagtttctactgccatttgtaataattctaataacaatgtttttccatattcttttttaagaaattctcaacttgtaaccttgtggaacaatagactttgccaccttaataaaaaagttcttaataaaattctcaattttttgaaaattgcctctactgatatgcctatttgccatgcttgtcaatatggaaaacttcatcaatttttatttcactcttcacaaaatatcaccagttgtccatttaaaatagtgcacacagatctttggggacccttctcttatccttctactaaaggtttcaagtactaaatatgcttcattaatgattttacaaagttctcttagatttttccctttactgcaaagtctgaaataactaatgttttcaaatattttaatacctatgttgaaagatagttgaacaccaaaattaaatccattcaagctgattagggggagagaatagaccattgaaaataattctttatgatctaggcattacctttagacatacataccctcacacacatcaacaatagggtagggctgagaaaaaatataaacacatcactgatatgggccttgctcaactacctttatctttttggggggatgcttttgttgttgggattttatgtcccaaataaaactcatttaaatctaatcttatttgttatcaatagaagattagaaatcatttatatttacatatattattcatgtttaaggtttaatatacaatttctgttaaattcataacatatagttattcacaattacagtgatgtcaacacaacggaaggtaattgtgattatatgcttcaaaagtttatgtcccatgattcatcactgaactggatttatactgatgtgatagtcagcgataaagcttacttacaccttggataagtgttatgttctttccaggacattggtaaagtatcctagtatcggatgtatagagtatgcattagaatgggaccgatattgatcttggt

SEQ ID NO: 298380 - DNA, 2864 bp, Cannabis indica
gattaaatttctataaatgtaattttagtaggagatttttaacaagccgtatattttaaggagcagaatcaatattatcaaaagttgtagaagtaaaattgctagttattctaaaatttaaatggttaataaaggatagaattaatgttatgtttataaagtattaaacaaaaataaaggttaatacttagttttgagtattttttttttacattcttaagttaatattgaaatataagtgtataattgaatatttaagtaaaaaaaatatattcaacccaattagtaattggattggattggattttgatgtctaattgcatttgatgggatgatgattttctaaattcaattactgattggattggatcgtatgagaaaaaaaaagttagattggatcggatgcccaccaccaaataataatataatttatgtgttgtgatatctcttttagcattttttatagacaccgtaaagtgctaaaagaaggcatattatattcgtattagggactccttataatcaaacagaagaggagtctaaaaatgtcgctaacaaaataaaaaattaaataagaaagaactgaagaaaagtcacagtcttcactctataaagtagtactttcaacaaaagcatacgtataattccatatctatatataggtagtgatcgagagtacaaacaattaatacactatctcattcaaccatgttcaccaacactaaatattatgggtatgacctttttgacattctcattcttttctcatcagcagcttttgctttgattgcattgtttggatggacaagaaaaaagctatcatcggaagcacagctgccgccaggccctcgggggcttcccctagtcggataccttcctttcctaactccaaacatacaccaagatttctcaggtttggccaagctttatggtcccattttcaagttatggatgggatccaaactatcagtggtgatcacttcaccacaactcattgcccaagtggttcgcgaacaagacacagtgttcgcgaaccgatatgttagtactggtgcagcagtcatcacacatgatggtcaagacattgcttttggatcgtacggtccagaatggaagaagcttcgaaaggtgtttgttcgtgagatgtcaagtaataacatgattgataatatgtatgagctaagaaaagcagaggtgaaaaaatctatgaagtacatcttcgaaaggatgaatacccctgttgatatcggaagcttggtgtttcaaactacaatgaacactgtcataagtatgacaattggtgcttcttttagaggagctgatgctgctattgatagtgatgagtttaagaaggcagtggaggaactcattaggatgttggggaaatttaatatctctgatgttttcccagctctcaaatggtttgatatacaaggaattgaaagagatattacaaagattacacatatgtttgaaggcatgtatgataaagccattgataaacgaaagaactctttgaaagaagggaaatccatggggaaggactttttacagtttcttatggagcttcatgaggaaaaagatagtgaaactcctattagcatgactgaaatcaaagccttgcttacggtatctacatacactctcatctcttttctttattgtcactattattcatttttttctttatgtgctataatgactcatacatatgttgtgttaaatataggacactttcttggctgtaacggatactactacgaccacagtggaatggggaatggcagagattctaaataagccagaagtattgaaaaaaattcaagaagaactgaaacaagttgtgggactaaacaacaacgtagaagagtctcacttacccaaactaacctatttgtatgctgttcttaaggagactttacgtttacatccaccagtgccatttttaataccacgtaagccaagcaaaactactgttgttggtggttataccataccaaaaggaacaaccatttatctaaacatttggtcaatgcaaagagatcctaatgtttgggaaaatgcttcggagttcttacctgagaggttcttggctgatcaaagcaaaggagatattgattatagcttttctggtaaaaatttcaagtatcttccatttggatctgggagaagaatgtgtgctggaatttccttaggggagaggatgttgatgcatatgttagcttctttcttgcattgttttgattggaaaatgcctattggtactaaggttgagctttcagacaggtttgggattattcttaagaagaggaactctttaattgccattccaacaccaagactttctgattttgacctatacactactactactagtacttgaaaacgtttgagcatgataactgtactgtactactttttttttatatatgtaataataaggtctaatagccgtcaatattgtaatgtactatcttgcatcgcaataaataatactaaaaattatattctcttgcttaacattatttctatttattataaattttctctcttacaaatagtgtaatagattatatgtgatgttggttgttgttgagaattatggggttccatctcaaattcaattggcaatgagtggagtagtccatgttcttatatatggctcaattctctaccatttattctatgtgggacaatgtccacaacattccccctcaagatgatggctatttttgctcatcaatcttgaaccgtatcagagtggacatggtcactatctgcataggtgcggatcggataggatcgcttgcccgcaagggatatggctctgataccatgttgagaatcatggggttccatctcaa

SEQ ID NO: 298381 - DNA, 2872 bp, Cannabis indica
aataaaattaaaaaaattgaatgaaaatactttccactatttctcttcaaccgaacaaacacttcttagaacttggatcattcctattacctaccaaaatctaacttttggccggtgacgttgtacttttttgttgtatagatatctttctcatctattattttgacaagaggttaagttaaaaaagatcaagtaaaatttgttttgtagttgctggataaaatttaagtgtagaaataggagttatcaaattgatccactcttttcctcagaaaagaactctgaaattcaaatctttcacccttaatagggcaaaaataggattagtggaagatttatggttgtaactaattacattatgttcaaagtcatcaatatcaatggttttgacttaatcatttcaaaggtttggtgatgacccaatactaattattttcacactttcatatattaagtatatgttgtcattttattgtatctgcaacaagcaatcactaattactacttaaaatgtagaaacaagtataaaaatactaaaaagtaaagatgcataaagagtatatttcttgtctagacagtttagttggagaggcttatataacaatacaaagattacaacatcaacaacttgattataacatgagtctactgtgccaatgcacttgtgttgtagacaaggagagcacctcctgcaagaatcccaagcagagtaacagcccatatggccaatccagttgtacctgcaaagtataatatgcaatatttccaacattattctctatctttacccaaaatttgatgattttagccaatgagaagttgtgttttttcagatatataaaagggattttattttttctttaaatgtttatacaaaagagttacttacctccaacatagacatcgccagaaggagaccactcatcagcgttgtagattggactgcatatcattatttatttacagactgttagcatatatctatatactacttacaattatagtgtacaacaacacaatcttatgttgctacatgcaaagttatttttatcaatatcctaaaatatattttctcaaattcaacttggtaacttcttattaagctatgttatacaagtgttagtgttagtgttataacgtaatctatgttaatgtaaaatgcatatgtgaggtgcaaaaaaacttttcctataatctataagccttctcttgtgtggcaaaaataagaataataacaattaatatgatataaaaaggaagagagagatacaagaaagatgcagtccaatacatgagaattgagatgagaatattttctctagttcgttattatagttttaaaagatgaatagatgaactttttaaatatttgttctttctatctatgatatatatatatatatatatgcgacatctactcctgttataaattaatgggtctgtgtcaatattttataggtaactttatcagtagagttccaaacatataatactattcattcatagctaaaataaataaataaaggagatgctaagacacaatattgaaagaaataacaataataataataattcaattaatacctgtatccatcgacattagcaccatatttgtctacatactggtacacaccctttccctgaatcatattatatggtagaaaagaaataataaatataaattctttcaatcaaataaataaaataattaagaaacataatcaaaaattaatttaccttaggcttccttccagaggcatcaactccatccctcaagtccatgctaccgttaattcctgtaaattaaattcatcataaagttttaatatatatatatatataattaacattaattccattaattatactcaaacccaacccaaatatcacaaatactactatacgtacataacaattaaatatgtttatagtatagttaaaaacgcttatttatatttgtaagaattaagtgagtaccatatggtttgtcggtcttgattttcttgactccactggcctctaccttgaaggagtaagaagctctagagagagaaggaaggcctctcacagaagacttttcaagtctaaagggagctggtttgaggctcactgatgccataactgaggctgccattttcactaagctaccttaattttctgattttcttttcctttgcttcggcaatttttttctttttggttactattagtatttcctgatataaaaatgccaataggacagaagtggctgtgggtgtgacacgtggcgttcattcagtgggaggatatctggatatggttgcaaaacgttatcaaaacgcgagctatttcaaccagtacttcttctcaatctcaagtatatcaaaatccagggacctatctgggtttctgacacgtggactctgcataggaaggagttgtacttgtaaattcttttgttatgaaataatatatgtagagtagatgttgttcgtggaattttgaagtactttaatactgcttaatggttagtctaaacacgtttaaaggtactttgatttacaagtccactattacattacatacactatccatgtagaattttattgaaactattaaatacccaaccactatagctagtatcaattaatatttaatagtaataattgttaaaagaagaaaaagaacagtagaagagaaaagatcaaaatagcatagcaaaacatggttcattcattcaggctgctttgcatacattttacatatgactggtttttcacagttttgttcatttagaatccttctttagcatataaaaacaattgccaaatttcgtgttataatgatagtaataatttcaatactcataaaaaagcaggctctctctctctct

SEQ ID NO: 298382 - DNA, 2695 bp, Cannabis indica
tgtgacaatatttttagaaaaatttactcaaattacaatacttttgtaagtttccggccctattcttttaaaagttaatgtataattaaggttgtctaaattttgcactctcttttggctggttggctggcccttgctaattaagtatcgttagaaatcactttaatatttatatatatatataaccatatggaaattaaggtgttatcgttacattattatcattaatattatcttcacttttcaaccttatttacaatttgagaactagagttataatcaaaaaagagaaatgttagaattccgctagtggtgatgttatatcaccataaccagaaggaaagccaatgaaaaaatagcatttatctcgaagttcgcctgatttttggcaattggaataggttgggcgcattttttttttcttgaagtgaaattggttgtagggttagaattagaagtggctacaggattggatgtagaggaagatgctgctgcaagaggggtaatattctatggccaagagttctttggcgttcttgatgaacaatcatagaaaacactttattcgaaggtagagagggatccaaaaggaaaaaaagatagcagaggagcatcgtccactggattgatgttgggatcagtagaggtagcagaggaattggctctcatgcgcactattattgtaggcggtggaagctttgtggattctatgattcttggattataacatttgataccatattagaagaatgaatcgaaaaacaaagtaaagtaaaagaaacttcgtattgattgaactgtatttaaatggtacttgagtagtgtttatatagtattaaaatacaagaagtatctaccactctctcttttgatctgagtcttccttcccatttcctttttttttctttctcttcttctcttcgttttggtgatctgtgtttttattttgttgtggttgtggcagtgtcctttgtgtttgcttttctgttttgttgcttccttccccttagttgctttggtcttagtcttccttgttatcctttaagggcgcttgttggttctgtctgttagttgtctcagtgtggggtctttgtgagtttagtgggggtagggtggtattctgtggtagaggggttggtaaggttggatttgtttagttgtttgcttttctttgtctggttcaatggcattagtaaatgctaccaactcttccaataatggaaagtgtttcacgtgtgaggaagcctctctcaagctcattccttgtgcctcttctcagcaggctttatcttctttttgtcttcttgggaaagtggtggccccgatggtagttaatgaagccaccattattgattttgtggaaaaagtatggaaatttaatgtgacagtggtagctgtgaatgagggtgccaacaaccgtaactgttttgagcttggtttcacaagtgctgggaaccgtatttgggcccttgaaaatggtccttggtgtgtccgtgggtatacattcctattgaaagcttgggagccaataaaagatctctctgctgtgtttaactgtgtgagaacttggctacacattcacaacctccctagggactactactcaacagataacggtaaaacattgggggcaaaagctggccaagttttatatgtgaatttggatgaaggaaaacctgctctctggagtaaggctctcaaagttttgattaggttgaatgttaatcaacctctgttcgctggttgttacttcggtctggaatcgggctcccaaaggtggatacagttcaagtacgagaagttgggcatcttctgttataactgcggcaaattgggtcttcaaagaagaggatgcactctgtcttctccggtcacggtggccagtgtaaatggggttcctttccctatgttcgggccgtggttgtctttggagtcgatgtaccttgacgtattctcgagagcaaactcgttcactccggcgtcgactcaagtgggtctggcgagttctggttcttttcgccctggaattcggccgttggccatgactgctggtacgaagggccacggtcggaagaactctcggcctcggacttcgaaccgttctgtgaaggcgaccgatcgtaggggcctggaggggggtcaggctcgcagtgtggtctgggttcccaaagagcttcctgcatcacgcatgcttggagcttccattaagggtaaaaagagtaccgttggaaacctggaagatggaaaggaggttgtacaatttcctgtttttaattcaaaatttaatgaccaaggtttgacttttggtaaaggaaaagagcctcggcttgggcttagtaatgagcttgttgggccgactctctcttgttctgggccgggttccaagattggctatttaaaagatagtgcatcttctaatgggcccatgaaaaaatgcaatggccagtttttttcttcatgtgggaccgagcccatcttggaacaaaatgaaaccggcttgcatcatcctaagagtttggggccgaatggtcttgttgggccttttgagttttctaaaggactaattgagggtaaggagattattgggtcgaccaattctaattcaattgagagctctatttgtggtcaagaggtaaacttccaccttgatgaaaaattagctttgactaatttttttcaagctcaaggcactact

SEQ ID NO: 298383 - DNA, 3603 bp, Cannabis indica
atagtaatagtaatagtaatggtgttaagatgttttgtttattgaaaaacatatactactttaaattcgttttggtaaaggaagggtataatggtcattttgtttctatataaattgtataacagaattgcataggtatagatctgtaatgttcattcatataaaaatggtgtaatggtgattacatttgtaacgatattacaaaactttcaaaaccaaataatacaattgtaacggtgattccaatccgattacccttgcgccaaaccaaacataaccaactgaatacaatttctgtaaaataattatgtttttctctggcgtctctgttcatttttaccggccatgttcagtcatttaactcttcatttattagctgtttatttaattacatttcaaattaatatggactcgctgataccccaactttttgtaggtcaatggtgttgcccaattgcacagtgatatattaaaggctgagttatttgaagattatgtctctatttggccaacaaagttccaaaacaaaaccaatggcattactccccgccgatggcttcggttttgcagtcctgagctcagtaacataatcactaaatggttaaaaactgatgaatgggtcactaaccttgacctgctagtcggtcttcgaaaagtgtgtataactgataaaattttcttagtaaggctgtcttatttatttaatattattacttacaccaataatctctaacagtttgcagatgatgagaaattacaagctgaatgggcatcagccaagatggctaataaacagcgtctcgctcagtacatagaacgtgtgactggtgtaagtatcgacccaaatactatgtttgacatacaagtgaagcgtatccatgaatacaagaggcagctgctgaacattctgggtgcaatttatagatataagaagttgaaggtacatcatacttcttattgttgctttcctttctattgtaaaaaggcattgctgcgacttacttctaatgtactatgtagaagaccgcacttcagaattttcccattacctttctcttgtttgtcattgttatcataatgatgacctttttcatgtccatattgtatggtcttggtcttggtctatacttcaatattctttaaattatattaatttttcttctcagtgaaaactgataaagatttttcagttgcttaccaatggaaagtcaaagaatgttatgtacatctttgtaaccagctcaaaatttaaatttgacaggagcttagccccgaagaacgaaagaaaacaactccacgcaccatcatgattggaggaaaggcatttgctacctacacgaatgctaaaagaattgttaagttggtgactgatgtaggtgcagtggtcaacaatgatcctgaagtcaacagccttttaaaggttagttgttttcggtccattctgagctcacttgaaaaattcattagcagaaaatgaaactacagatatgggtcctcattccttaggttgtttctcagtcagaaaagaccttttagaatgcttgttaattatataatgtagtttaggttggtggccaattcggagccctacaaggttcaagacttactaatttcaaatgataatgaattatgatactttaaatttacagactattagtcactaccttactactttcctccctcttcttataaatgctacattgtgtacagtttctttagacttacctgttttaactgtcaaaatcgttcaggttatttttgttccaaattacaacgtgtctgttgcggaaatgctcattccaggaagtgagctatcacagcatattagcactgcaggcatggaggcaagtggaacaagtaacatgaaatttgcactcaatggttgtctcataattggaacacttgatggggcaaacgtggaaatcagggaggaagttggagaggacaacttcttcttgttcggtgctacggctgacgaagttcccaaactgcggaaggaaagagaaaatggactggtatgatttttcagggaaatattatttttattattagtaataatcttgtaaactactgcttgttcttaaaggatttccttttgtgtgtgtggttgcttttttaaaaactcagtttaagcctgatccccgatttgaagaggccaaggattttataaggagtggagtatttggcagctatgactacaacccacttcttgactcccttgagggaaactccggtttcggtcgtggagattatttccttgttggctatgatttcccaagctacatggatgctcaagaaaaagttgatgaagcatacaagtaagataatagcactcaatcagaatttacaagagcatgataactcaccaacttattcaatcaaacctcaaatggatttaacttctgagtttgttttattttcgagctaactttgacaatgcaatctagattcaaccccataaaatcaagaaacaaaatcttggttataattgactaatagaattactcttttgactacagggacaggaaaagatggctgaagatgtccatactaagcactgcagggagtggaaagttcagcagtgaccgaacaatagcacaatacgctaaggaaatctggaatatccaggaatgtcgtgtaccataaaaatccatccgtacaattccaatgaaagagcaagaaataaaaagaaaaaggattgaaaaaagaatgaagatttaaaataatttgctgtgaagggtgtcttcctagacggaataaataattggcttttcatatgctttgttctttgtttttattattttttggccaatgatatgtattgtttaagtgtctgtatttgcttgtattatttttctcataaaatttacagtgttagtctatgctatcgtatcttcttattttcatattgagaaatttatattttatgtaggtattttcattttaattataaaatttacttgtaatggcactattggtgtttaaaaccaattaaataaaggtgtcgtgctatgaagtttttgtctaattcaatatcaaatcttaatattgtgtctattaaatatgtgccatgctttgcatctattgtgtaattcaaattaaatctcacatatttaaatttagtaattattattaaaaattgctaattatttatagtgtcactccatagtgttggacaccactaatactaatagcattgttcataacattctatttacaattataccatcacgacatcaaaaaataatgaatttaaaagtaagacctaaaatagaaaatgttttctactaaattggctggactagtgttactaccatattggtggtctatgcgtgacgtggcacacgaggtgcaagtattaaactatcacataaattatgagctatccatacacacattaaacattaatcatcattattcataatcattaaattcaagatcaatactttatttagaacatcccaaataatgtacacattcctcccattgagccattcatgtgagtcatttgaatacaaaaatcaccactaaaacaacacaaactcaaaattggaaaagagcacaatatggagctatcccctcttctcttcctattaccattaa

SEQ ID NO: 298384 - DNA, 3512 bp, Cannabis indica
tttaatatataaagatatagcctcctgtaattaacgattatttctataataatattattaatataacatttgttgttatatgtgttaatataataataatattattattatgcagatgggaataattggagagaaactggatatagattttgtgatatcaacgggtgataacttttatgaaagtggtctgaatggtgtggatgatcctgcttttcaagaatcatttaccaatatctataccgctccaagtttacaaaaaccttggtacactggtaattaattttcttcatatattctttttttaaaaaaaaaaaatcattataaagaatttaagtaatttctgaagatttatatatttttttaatttaatttattcatttgtttaagataattagaatttttttatatatattagttctcctagggtatctctccatgctcttagaatagacaatgaactgttatagatggaagaaaatcctcctctgattgcgtaactttgttacctttgttattttaatctatatttcttttaaaaaaaaaaaagataattagaatttttggctcctaattttgacatgtactacatcatgttcttgaactattttcttcgttaaaaattttctctgaactattaagattgttagattaaaggatatttgtcaatttcatttaatattactaattttgtgatcattaagtactaaaatatactatctagactttaatatctactaaattatatgtctttcgaactttattgacatgtaccaatatctaactagctaatcttctgaacttttattcatattagacttctatttttaaaattgaaaaaaaaataaataaataaccccttaattaatctaataatcacaataaatttaaaaaaaaaaaattaataggccttaaaaaatgacaaatacagtacatattacaattcaggaaaaaaaataccaaacttccatatagaagtgttgagtgagctggtgtggactgtggagtgtacatgcatatgcatgtggagtatagtacaatactatattaagtgtaaaaactcatcaattagtttgaaagagtactaatcataatttactaaaatatacaccctctaatatttttttacaaaccagtgatgtgacatttttctaattatatatatttacaattttcttaaaaataaaatttactgtttttaaaaacagtgttaaaggaaaattaaaattaaatataattgaccacaataataatgtgagatattatgtaaatgaaaaataatcttgagacttacttaacatcaatgtgatcaaaatcattatatagtaaagtaatagacacatttggtaacatcatttttcataagaaaaatcataaataatttataaaaaataattaagataattatcatatataggggaaatatatttttatattttcccatatattttattgaaattaatatatatatttgcagttttagggaatcatgactacaggggtgatgtggaggcacaacttagtcctgtccttagaaaattggacagcaaatggatttgtatgagatcttttattgttgacacaggtaagcatatatatataattaaattaaatttaacataatatatataatgattaattaaattattgtatgtaatatttattaattattatgtgcagaaattgctgagttcttctttgtagatactactccttttgttgacaaatatttcttagagccaaaggacgatgtctatgattgggatgccattctacccagaaaacattacctttctaatctcttgaaggtcattattatttttaataataattaataaaaacatataaatttgtatatatgtataattaatatgtgtatatatatgtgatttattatgtgcaggatgtggattcagcactaaaagagtcaagtgcaaaatggaagattgtagtgggtcatcataccattaaaagtgcttcatcacatggcaacactcacgaaattgaaaaccaacttctcccaattctcctggtataaatatttataatttgcggcataagataataataccatccaaatttaaaatatctatatgtaattaaagttaaatttaaatatttatgccacaaatataatttttatttatacttataaattcttaaaaaattaaaaataacttattcttaactttttaatttttaagcatgcgcaatccaaaaatattataattctaaaaactaaaatgcgatttaaattaacttaaattatattatgataaatattattccattcaaatggatctaataataacatagatactatacaaatagaagttagaattattctaattaatatatatatatatatatataaatatgtatatttaagaaagaaataagaaggatagctagattttgtctctcaacacgtgagataattaaattaatagaatatataatattttatatattagagaaaatgttttgttataattatgtaattaatataataatttacgcttatatatttcaggaaacaatgtggatgtttacatgaacgggcatgaccattgcttacaacatattactagcatggagaggtatatatattttatagtaattaataaattattaataattattaaatgattaatagtactatatatattaattaattaatattatttatataataatgcagtccaatacaatttttaacgagtggaggagggtcaaaggcatggagaggagaaataagttggtggaatccaaatgagatgaagttttattacgatggccaaggcttcatgtctgcacatttcacttcaacccatgcacactttcaattttatgatatttttggcaatgttttgcataaatccaccacttacaaaccactattttactctgctacagctaccaccatctgatcatatctcatcatcatcaaccttaattattattctaagttgtatttataactcttgttattattattataatgcctaaattatattatataaaggcataaattaataattaatttgatgatccacttatatgatgaaaatggatggaagaggtacttgaattattaatccatggttttttaaggaaaatgtgctgatatagtaaactaaatcaacaggagcacttaaaaatctagaacaagtatcaatctaaacacaaactctttatcaaactagtatcagacttaattagtgaatgggtcacaccatttgcaacaagcgcaaacccatactaagccccaaaagctccgccaccaccacatgaaactcgccaaaatagcccaagctcccataaatctccctcagcatcacatatcacaccccaaaaccagcaaaacctctccacactgccacatcagtcgacatcacaaacagggacggacccattaagattgatgtgggggctatagcccccacgaacaaaaatattgccttttaaaaaattaaatgtaaattttttaatttaataattataggccaaaatag

SEQ ID NO: 298385 - DNA, 961 bp, Cannabis indica
ataactgaattaaatttatattgcaggtgtagtaatatcgatgattagtgagaaaaatggaggtggatacgcattgttattggatgcatctacctttgaagagattgcaagagcaaagtttccctatggtcttccctatggactccatggctgctgggttccaaatccaaacaaataaattagcttatatatatatatacacaatagagttcatcagaagttgaagattaatttgttctagctagctatagctaaggtagatgatgcaactataaatatatacagatataaatgtaattatatgtggaaattgggatgtgtttatacatgtaacaatttatcatgtatggtgtgggatattgaatgagagtgaatgtactatgattttggttctttttgtttttgtatatataaaataataatgaatgctttcactaatgtaagtcggtacaataagcacacaaagaaagtgatttaagagttcttaagaaaaaaaaaaacaataagaaattgatccgatgcacatttatagtaagcatttcatctttttattaaaaattctaaatagcttgtttttatgataccaaaaaaagagttcaaaatagtcatatacacacgtataacaaaatataaacatgcatccacctgaatatttcaagtttcaacacataataaattttctgaaaataaaatataaaggctaattagtaattttttccccgaactttgacatgtaccaaatcatgctccctgaaattttttttacttgttaaaaattcctcctgaattattgagattgttagatttaaggacttttgtctaattttagtaagaaaattctaacatggatgaaagttcaagggacatgatttagtacatatcaaagtttaaggagcgtaatttggtagatttcaaagtctaagaaacataatttagtacataaacaatcactgaaatagta

SEQ ID NO: 298386 - DNA, 2686 bp, Cannabis indica
agagagagagagaaaaaatgagataactttggtttttctcttaatttcccttttctattttcttaatgaactaaatcaaacaatcaacataaaacaaaacttgagagtttctactaactgcactataggacaaaatctcaataagtggcaaattccaattttgtcctttgcttgatacttaagaaacatataggtctatggataaagtgtccaaaaccataaccccacctaacctcgatactccaaatatcaatatatgaatacccccctaaattaaaagttttaaactcacccatgtgactctattgaccatcagtcgcatttttcatcgtcactgaacaaaaatcataaaaaaaaattttaattttacatatgacataaatagtaccttagagtttaataaaatcttcagaaatgataaattataactctaatgtctatttttaaaaatgggacatgtaacaaataaaatcgtgcataatcataaaatatcaataattgatattaatcacctttattaatacatattctaatcatacagtcattacagaagatctaaggaaaggcatggcccttctctactaatctgtggcagtatagtttctgtaataatacttgaagatcccattaaacacttgaagtgagagagaaagtgagtaataactcttggataatcatccacaatatggccattctcttcaataaaagttataatcctatttgactcccttttttcttaatacaagcatggaaataggttgaatttcatctctaaacttcagccaatctaccttgcttttttgttttaagaaactttcaagtagtgtactgttgttgcttagcttctctcaggcagcagctaattccccttgaagatttaaactgtgaaggttcttttagacttccaattgagccttattgtaaatatcctttgccatctcataatcaactttaacatctccaatcttttctctgttaaagatcctaagatcttttcgaaatcttttcaacttgaaacaaacaacagctagatctctccccttgacttcctttctccagttgttgagcaaaatttcactaaactcaagatgcacagttcaaatattaaaaaacttgaaagaattgtaccgtaaattacccaatttcaagtttttgattagtgcataacagtgatccgagatgtcttcccactggaagtgagcttctatgtttggatgaagatcaactcattcttcatttttaagaacctaatcaatccttaagtagtttcttactccattctcatggttatttatccatgtgtagtgagatccgcatctcttcatctcatctgctaggcccaaagccatccacttattggcttccaaaatttcccaaaatgatatcggtttccctccaattctatcaccatgatgaaacacagtgttaaagtcctcacaaattagccaaggtttcactggcatgtgtaaaccagctaacctttgccaaagccattacctttcagttatgaaattgctcccataaacaacagtgaaacaataatcttcatttaattattgtcattctaactctacagtgtacaaactgcttattctcttctaccacatcaacatatacaacttacttagccaaatgattagtattctgcgtggacttgtataatactcccatcctacaaaagaggagttcattatttcttctactttgctacctcgcactttagtttccaaaattgttctccaattcccactttatttttatacagaatttctttaactttctcatgcttctttcttttattgaatcccccaatgttccaactcagtatattgtatttattcattttgtaatacactgaatttattcccttatttagccacccatttctaaattcttccactctttctcttttggatctcccactacccttctttgtctttcacatttctcatatgttcttttcttcctttctcccttattgcagaatacgtctctagctgcgtattagaatctgtcacaataatttttagcttctaaacatcctcagaattagatgtagcagtagtaacaacttggtgtgagaaagaatcaacactagcaggatcagtaattgtaacagcctcagagtcagctactgttgctttttctttttcctgagtgtcatctttaacttcacttgaagtagcagcatcaagagctattggtgcttcttcctgagtgccagccatatttgcaaatgaagccgcaacaatagtaccattgctggtttttagtttcccttttggaccaactctacaaacacccatcctatgtccatagcctccacagttggagcactttgttgggagccattcatattaaatgggcacagtgtcaagcattcccctttcattttcaaagtctatggttgatggcatattatcttgtatgtctatatctacaaggactctagcaaattttacttgagtcctttccgttgttatgctatccaccattattggagttctaattgtgcttactaaagcactaagacaattgttcccccaatattgaagacctagaccatagagctttactcacactggcacatactttactagtttaattgaatccaaatcaggcgtctaaggtttcatgataacaagcttattgtcaaaatgaaccaccccaacctctagtacataat

SEQ ID NO: 298387 - DNA, 3166 bp, Cannabis indica
agatcctggtaaaataaattccaacacgaccaactacggtcaccgagtttcaccctatcagcctctgcaatgtaagttataaagttatttcgaagtgtctggctaatcgaatgaagcagagtatgtctaaagttatttctgataaccaaagtgcttttatcaaaggtcgtctcatccaagaaaatgccatttcgagttttgaaagtctccactgtctaaaaaaagagtaattctgtaatgggaagaaaatggctctcaaattagatatttctaaggtatttaaccgggtcaaatggggcttccttattgctatgatggagtgtttgggttatgattttagatggatagagaagatcctaaactgcattcaatctgtttctttctcaattcttctcaacgggtaggtatgtcggctgtttattcctcattggggtctttgccaaggtgatcctttgtcgccctatctttttcttaattgttttgaggctttctcttgcttgattcatgaaggtgagagatccaattctatacacgacatttagtttgggagaaatggtcttaagctttctcatctcttcttcgctgatgacaaccttgttttcctgaatgcgactttggaagaaggggcactcttcttcagattctggccgagtataagaatgttttaaggcaacttattaaccttgacaagttagaaatatgtatggggaaacgaatcactgaggagatgggcactactcttgctagtacccttggagttaaactggttccatgtcaccccaagtatctcgatatgccgacttttgtggttcaacataagaaagaagtgttcaatactattcgtagaaaggtatcgaataaactccaatcttggaaagctagtctattctcttaagtgggtcgggaagatctaattaaatcagtggttcaagctcttccttattacattatgagctactttcaccttcccaaagaaaccataacggagattcatgccttggaagcgtctttctggtggggagcttctgattctacaaagaaaattcattggggttcttgggaaaaaatatgtcgaccttaaaacagaggagggatgggtgttcagaattcggaagtctttaatcaagctttattggccaagctttgttggaaaattcttttaaatcctcacacccttttggctcgggtcttaaaaaattgctactttccagatagtagtttgttggaggctactccttcaacacatggttcctatgtgtggcaaagcttgttacggggttgtgagctagtcgagatgggtactcactggcgtatctattctaggcatttggtgcgtatcaatgaagatcgttggttacctagagcttttcctttttctctttggactagagtgaccgttcctcctaacactaagctctagacccttatccttgacagtggtgattggaactctgatgttgttcattgcctctttcaccaagatgatgtgctgtgggtgtttggtcttaagcctagttcccttgccaaagaggatgacttgatttggcactatacgacggatggtttgtatacaattcgcagtggctataatttgagcattacgattcaaggagcattgtgctgatcaccaaaggatgaacacttggtggaaatttctttggagtttaaatgttggttcgaaagtcaaaaattttggctggcgggtttgccttgacttgcttcctgtcaatgacaacttgattcatcgtggtatggacatttgcccctactgttgttgttgtggttctcccttggaaaccatttgccatgctctctggttatgcccaactatcaagcctctttggaatcgggttagttggcatcagtatttttccagctaccagtagaatccttgggactttttgatgttcataaaggattacaaacctcatattgattttgaaatgtttctagttttgtcttggctggtgtggtcccgacgtaataaaagaagatttaatctttcttcggctctttggtgtccttgggctcttgatcaaattgaccagcatcttaccaccccagtccttacgcctcttcctcgattctccgctactgatggcagcaactgttgctctattaatatgacgaatcttccactcctttgttgtgatgctgctgtctccgatggcctcccgtaccatggatcgggagccattctccgtgattgttttggcaaagttttgggggcggctacttcctctagacctggttcttgttcagtcaccatggatgaaagaaaagccatcatactggggctgcatttagtttagcaggtggggctccataatttcaatttgacatccaattgccttatggttatcaactaccttcgccatccgtcttcttgcagatcagagtggagtgccttgttggatgatgctgtcgattacgggctagtgcagaattactcttattgtttccactctctttgtgctaaaacaaaatctgcccatttctcagctaagattgttatttctactaattgtaatgatacttgggtggacaatttcccccttcccttcttgatgttttctcagctgattggcactctttgtagtttttcctttgttgaataatcttctttcttcttcttcaaaaaaaaaaaaactttaacatgtattgaattgtgctcccgaattttgacacgtacaaattgtgatccttgaactttcgtccatgtcaaacgcctattagtcaaattgaacaaaattgggtggaagttcttgaatttaacaatctcaatacttatgaaaagttcgaaagacaattttatacatgtcaaaatttaaggacaaaacagaatcataattaaccttaaatcaatatctatattctcctaagattattaagtaaatgtaaaataattagatagttttatttgatttgaatagcttataacaattttaaaatcgtaaccgaattaaagaattataaacagttcaaaataatcaaactattaacatcatattcatttagttctgtctcaaatgatttcattctgattgattgagatttaaaataatttattgcgaattgtaagaagggtaaatatcattttagaccttatgttttgtaaaacttatcaattggaccatttgttttgttaaatgacaaaatgaacctt

SEQ ID NO: 298388 - DNA, 3304 bp, Cannabis indica
tttatagtaacttttattaatgtagattactttggtaacattattactgttatccatatttataaaaataaaaataaataaaacaattcaatacttttgtaaattgctctatttaataatattgaattcatttttctcagataataatactaatgataacatttttatcttcttgttagacatatttatgcacatttgaaatagatcatactatttaaataaacacaggaaatattactaaaaatcagtgtaaagttgaaaatgtcagaagaaatacaaggaaagcttgtcaaggaataagggccagaaacaatgcatttggtctcttgatttaaatagcaatgcttcttatccagttcatcgccaggcctttttgctgaaacaaccataagaagttcatgactaagctaaacaaaattgtcagcttaacgttagacaataaaaaatgatatagatggtaaaaggttgaataattaaagggaaaagaagttcatacccaaatcaaactcatgtataaaaggaaaaaggaagaaacgaattcttgaaggtacagttctcttcataatatttacagtcacgagtacatttaggaaatttgagtaaaaataaaattggtttttccaaatcgaacattatgtacctttggaaatatttcaacttgctctaaccaactgaagaccaatatattaacatggatgaattccggttgaagagacactcacttgaaaacagcaggtaccgagtacttagtcctcatcactatcataaacaacagccattcgacgatgagtagcagctgccttccttggcggagagtcctcatctgattcaacccctttgcgtttgaggttgtgtccagagtccttacccctgtacttgggctcctaggaaaatgtccaagaaacagattaaaagaatatcactacattctccaagagggtgcagaaaatctacaagtcattagggtttatatctcaattatttagcgcatatacaagtaattaaatgatgtttaatgttcagttttatcagaatgtaatcaactgacaactacgaaaaaaaaagaataatattgaaatttgaagagacggttccatttcttgattggtactgcttaagcaactagagtatatgcttttggccctctgaactttcactcctcgccagttttatccagtgctcaaaatttggtggaacttacacagatcatccaaaaataaattcaagctgtatttgaaattctaatcggagcaccactgctactatgttaaccaaagctgatagacaagtgcttaatctaaacaacaaaaatacatacctcagcttcctcctctgacagctcatgtctttctgcctcatcgtggtcttcttcctcttcttcatcttcttcatactcctgctccggctcctcaacccttttacgtggaggagacctctcatcttcttctccatcagtttcgtattcagattcctctctctcactatcagagaaatccacaggatgacgggaagatttggcaggtggtgcagatgatttccgagggatatctctcgatccctgtgactaaagtttcaagagcagacagtaaagaatagcgtgaacaaatttccgtacatgaaagagctaatgtactttattagtaagaccttcttagcattcaaaatccgtttctctgcgcgagcttccacttctagatcttcttcaaagcggttgcgagaacgacgagagtcataataatctgcttcatcatcctaagcaaatttggtagatagttacaggatgcctaacctcttatagcctcagattaaatcaataagtagagccaaaaagaacccaaccatacctcatcaagagcatcttccaagaacccaggtgaaagttggcgccttctatcaacatttggtgtatatttccgactcaccttttccctcttccgactaaggagtaaattagctctaatagtttgactttcagcctacagtagtataataaaacagtacataaataaaaatggaaaagaaagaaagacccatgagggttaggttgagagataggcccatgattatattcaaagcaatatgctagagttttcttctttgttcttcccagaaagtgtagggtttgaaaggacaagttaaaaataaataaataacagagaaagaggttagccttcaaagacaataacaaagcaaaagctaccttttccttctcctccttttccctttcaggatcaatatcagtgacacagtttttaaccttgtaaacctttttatgcctcgagtcaaccaaagcagttagcaatctatgagaatttgatgtcaaggatgaaggtatgaacctcatctttctcaatagccttccttgtgattgaaggattccctgcaagcacagatcataactatttaaaaaggaaataaactataagcaaacaaattttgtggaagcagaccaatgaggtactgggtttcacaaacataacataaacatacttgtctgtcaacaattttattaaaccctacttgattatccacaatacgataagtctatctaggtcccggacattacaatgagcttccaaaacagcttaaatgatcaggatttcgggataaaagttgcatgggtggtaagagattaaaatagatgtgatggctggtccacgagaataaaaatttataaccctaaacttggaaagaaaaaaattgcctccagttatattgaacaaagcataatcacaagcgtatagtgactctggtaaaagcaccaggaaacagaaacatggaatgatatagcattagctttagtaatatttatgaatcaagataccaattcttaaattccaaaggtaaataggtttagaaagtcaccttttggtgtcgaacaaatagatgcgcttgatcatgctgtgcgtcttgcacggttatgtctaggacttcattaccaagtaataactgcaaactgccatctgaccatctcacaaagcgtgcattgctttcacgctacaattaaaaagtaatccacatacattgagtcaatgccatatagggaaactaataaacattcttagagtgcatgttaaatcagttattctattgagagggatagagaggaacctcctgttttagaaattaatcaaacaacataacatatgactaatcagcaattgcctattaatgtcacagcttgatggtaagctgtatttttattttccatgagctttgttgtttaacttatgtattgaaagggttgaacatggcagggaaaaaggcaaagacatagacaatagaatgaccacaaaatttttat

SEQ ID NO: 298389 - DNA, 668 bp, Cannabis indica
aagggctagagatcttgaacggaaagagtcattatattccgctgcaaccaatataagattttctaaaacccttatgtgtttatttcattgttttagagaattcatatttaggatgttaatgaaacatacttgttagtaaatctagatcctggtaaaatattcctaacagttgttgggtggtaacagtggactgtgaatagaggagtcagagttggaagtggaatgttgggtgggtgttgtggacactgtgtttggagttgtaagtgtgggaggtggtggtggaattggtggtgttggatggggtgtgagaagagatgacagtggtggtgcaccagatgtttgtggctgcggaaactgagtggatattttggtatttgcatcagtgtgagcatagagaaaattcttttcatcaaagatcacatctcgagaattgtatagtcttttatccttggacatgcatttgtagcctttatgggagaggctatatcccaaaatgacacaaggaatgtacctatactctagttcgtttctgttgtagggtctgaggtttaagtaacacaagcacccgaacactttgagcattgagtagttgggtggagtatgaaacagagtttcaattggtgtggagtattgtaaaataggtgttggcatcctatttatgagatatg

SEQ ID NO: 298390 - DNA, 1853 bp, Cannabis indica
aagatgaaaaatattgaatgaatagattatcttgtttttggtggcatagctaagaaccaaatccaattgagctgttcgacgcatgatttgtgggtcataattttatgagttgtttgtgtggtggaaaggtgagaatgctccaatttcttaaagtaaagaaaacatgtgaactcatgcaattaccaaaacccacatatattatatatacatttttattcttcttagtacatgtcatttgttgggcattgagaagaaaatcaatattttaattcaatcacattcacattaatttttatttactacacaaatattgattattacatgatgatttatcttattagaaagtcaagcttctcaagggtcaaattgtggaacccaatccatagccatttaattaaatattatatagtgtgtagtaatatatattagttttttttataattttatatgattatcacacccttcaaaacattagggtgatttaatattattacatttatattaattattatattatttatcatggaaagacacattggtataaatgcaacattttcttggctgggttccttgattaattattctaattaattgtggcctacatccatccaggtcctttatttttctttttaaaactatattttatttttaatattcaattaccaatgctagcttgaaaggctacacctgtggacaatttagtcatagtcaggggttcaacaaaattaaatatattttatattaaattttcattttcatgattaaaaaactcaatgtcgtgaatcagatgattcaaagaaaatcatgtgataatttaagcatgttatatttattttattttattttttaatataaatgctctgtgagttggggaatcgaactacttatattatgacacgtgtgatatagtcacacggtgacgtatgattatattaaaatattataattattattgtattaaatccaatttaattttaaacatatagtcaatacttttctccaacaaattgattatgtaacaaggtagcaataaaataaaatttccattataaaatattaaaaaaaaaagaaagaaagctaaatttttgtaataattataacattagggtttccgtatcacttgtaagtaaacggctgtcaggcgccatgaattggtctttattaattaacgtaattttgcagtacttatatataattataattataattctaattattatcttaaatattaataatgtgcttatgtacatttgaatatttcattatttttttagtttaatttattatgaagagagtactggatattatatatatttatatgaatccaacttcctcaacattataataaaaataggatattaatacatattaatctttttgtatttgtggaggaacattaaaaatgttgtccttgtgtgaaaaataattaaaagaaaataattacacaaaaacagctggaaagaaaatggagggaggggagggggctacttctaaagatatacatgtactttgattttgatgaataataatggagattagtatatacatatataaatataaaaataaatagatagtaataaataatacaatttaatttataaatgaaaacaaattaataattagacaaagaaaagtggaaagagatatgcagagaatatatgatatatctactgtagatttgttggcacatgcaaaaactaaacaaaagggatgcattactccacacgatttgccaagcaaaaataataatcccttcgaagacgctcgtactattttcaattattattattattaattaattattagtattattatgtatacattaatataaatatttttttattaaaaaaaaa
